United States Patent Application Publication US 2024/0066114 A1 - sequence listing, part 21

SEQ ID NO: 25091 - RNA, 4167 nt, Artificial Sequence
  SARS-CoV-2/Wuhan/WIV05/2019__EPI_ISL_402128 spike protein mRNA gc (1-1273)(K986P_V987P_K986P_V987P_L18F_T20N_P26S_D138Y_R190S_K417T _E484K_N501Y_D614G_H655Y_T1027I)
aggagagggcgcuuggcuugcaaggacccugagcugcggcauugaagcacacccaacccaacucgacugaagucagccucacugaaccggaucugagaaucuucucucucugggcuugccagggcucuccgaaccuagcuagcauccucuucaauuccaacuagaaagcuuaccauguucguguuccugguccuccugccccuggugagcucccagugcgugaacuucaccaaccgcacccagcucccgagcgccuacacgaacuccuucacccggggcgucuacuaccccgacaagguguuccgcagcuccgugcugcacagcacccaggaccuguuccuccccuucuucuccaacgucaccugguuccacgccauccacgugagcgggacgaacggcaccaagcgguucgacaaccccgugcugccguucaacgacggggucuacuucgcguccaccgagaaguccaacaucauccgcggcuggaucuucgggaccacgcuggacuccaagacccagagccuccugaucgugaacaacgccaccaacguggucaucaaggugugcgaguuccaguucugcaacuaccccuuccugggcguguacuaccacaagaacaacaaguccuggauggagagcgaguuccgggucuacuccagcgccaacaacugcaccuucgaguacgugucccagcccuuccucauggaccuggagggcaagcaggggaacuucaagaaccugagcgaguucguguucaagaacaucgacggcuacuucaagaucuacuccaagcacacgcccaucaaccucguccgcgaccugccgcagggguucagcgcccuggagccccucguggaccugcccaucggcaucaacaucacccgguuccagacccugcucgcccugcaccgcagcuaccugacccccggggacuccagcuccggcuggacggcgggcgccgccgccuacuacgugggguaccuccagccgcggaccuuccugcugaaguacaacgagaacggcaccaucaccgacgcggucgacugcgcccucgacccccugagcgagacgaagugcacccugaaguccuucaccguggagaaggggaucuaccagaccagcaacuuccgcgugcagcccacggaguccaucguccgguuccccaacaucaccaaccucugcccguucggcgagguguucaacgccacccgcuucgccagcgucuacgccuggaaccggaagcgcaucuccaacugcguggcggacuacagcgugcuguacaacuccgccagcuucuccaccuucaagugcuacggcgucagccccacgaagcugaacgaccucugcuucaccaacguguacgccgacuccuucgugauccgcggggacgagguccggcagaucgcccccggccagaccgggaccaucgccgacuacaacuacaagcugcccgacgacuucacgggcugcgugaucgcguggaacagcaacaaccuggacuccaaggucgggggcaacuacaacuaccucuaccggcuguuccgcaagagcaaccugaagccguucgagcgggacaucuccaccgagaucuaccaggccggcagcacccccugcaacggggugaagggcuucaacugcuacuucccccuccagagcuacggguuccagcccaccuacggcgugggguaccagccguaccgcguggucgugcuguccuucgagcugcuccacgcccccgccacggugugcggccccaagaaguccaccaaccuggucaagaacaagugcgugaacuucaacuucaacggccugaccgggaccggcgugcucaccgagagcaacaagaaguuccugcccuuccagcaguucgggcgggacaucgccgacacgaccgacgcgguccgcgacccgcagacccuggagauccuggacaucacccccugcagcuucggcgggguguccgugaucacgcccggcaccaacaccagcaaccaggucgccgugcucuaccagggcgugaacugcaccgaggucccgguggccauccacgccgaccagcugacgcccaccuggcgcguguacuccaccgggagcaacgucuuccagacccgggccggcugccugaucggggcggaguacgugaacaacuccuacgagugcgacauccccaucggcgccggcaucugcgccagcuaccagacgcagaccaacagcccccgccgggcccgcagcguggcgucccagagcaucaucgccuacaccaugucccucggggccgagaacagcgucgccuacuccaacaacagcaucgccaucccgaccaacuucacgaucagcgugaccaccgagauccugcccguguccaugaccaagacgagcgucgacugcaccauguacaucugcggcgacuccaccgagugcagcaaccugcuccugcaguacggguccuucugcacccagcugaaccgggcgcucacgggcaucgccguggagcaggacaagaacacccaggagguguucgcccaggucaagcagaucuacaagaccccgcccaucaaggacuucgggggcuucaacuucagccagauccugcccgaccccuccaagcccagcaagcgcuccuucaucgaggaccuccuguucaacaaggugacccuggccgacgccggcuucaucaagcaguacggggacugccugggcgacaucgcggcccgggaccucaucugcgcccagaaguucaacgggcugacggugcugcccccgcuccugaccgacgagaugaucgcccaguacaccagcgcccugcucgcgggcaccaucacguccggguggaccuucggcgccggcgccgcccugcagauccccuucgcgaugcagauggccuaccgcuucaacgggaucggcgucacccagaacgugcuguacgagaaccagaagcucaucgccaaccaguucaacagcgccaucgggaagauccaggacucccugagcuccaccgccagcgcgcugggcaagcuccaggacguggucaaccagaacgcccaggcccugaacacgcuggugaagcagcucuccagcaacuucggggccaucuccagcgugcugaacgacauccugagccggcucgacccgcccgaggccgagguccagaucgaccgccugaucaccggccggcugcagucccuccagaccuacgugacccagcagcugauccgcgcggccgagauccgggccagcgccaaccuggccgcgaucaagauguccgagugcgugcucggccagagcaagcgcgucgacuucugcgggaagggcuaccaccugauguccuucccccagagcgcgccccacggggugguguuccugcacgucaccuacgugcccgcccaggagaagaacuucacgaccgcccccgccaucugccacgacggcaaggcccacuucccgcgggagggggucuucguguccaacggcacccacugguucgugacccagcgcaacuucuacgagccccagaucaucacgaccgacaacaccuucgucagcggcaacugcgacguggugaucgggaucgucaacaacaccguguacgacccccuccagcccgagcuggacuccuucaaggaggagcuggacaaguacuucaagaaccacacgagcccggacguggaccucggcgacaucuccgggaucaacgccagcgucgugaacauccagaaggagaucgaccggcugaacgagguggccaagaaccugaacgagucccucaucgaccugcaggagcugggcaaguacgagcaguacaucaaguggcccugguacaucuggcucggcuucaucgccgggcugaucgcgaucgucauggugaccaucaugcugugcugcaugaccagcugcugcuccugccucaagggcugcugcagcugcggguccugcugcaaguucgacgaggacgacagcgagcccgugcugaagggcgucaagcugcacuacaccugaggacuagucccuguucccagagcccacuuuuuuuucuuuuuuugaaauaaaauagccugucuuucagaucuaaaaaaaaaaaaaaaaaaaaaaaaaaaaaaaaaaaaaaaaaaaaaaaaaaaaaaaaaaaaaaaaaaaaaaaaaaaaaaaaaaaaaaaaaaaaaaaaaaaa

SEQ ID NO: 25092 - RNA, 4167 nt, Artificial Sequence
  SARS-CoV-2/Wuhan/WIV05/2019__EPI_ISL_402128 spike protein mRNA gc (1-1273)(K986P_V987P_K986P_V987P_S13I_W152C_L452R_D614G)
aggagagggcgcuuggcuugcaaggacccugagcugcggcauugaagcacacccaacccaacucgacugaagucagccucacugaaccggaucugagaaucuucucucucugggcuugccagggcucuccgaaccuagcuagcauccucuucaauuccaacuagaaagcuuaccauguucguguuccugguccuccugccccuggugagcauccagugcgugaaccucaccacccgcacgcagcugccgcccgccuacaccaacuccuucacccggggcgucuacuaccccgacaagguguuccgcagcuccgugcugcacagcacccaggaccucuuccugcccuucuucuccaacgucacgugguuccacgccauccacgugagcgggaccaacggcaccaagcgguucgacaacccggugcugcccuucaacgacggggucuacuucgcguccaccgagaaguccaacaucauccgcggcuggaucuucgggacgacccucgacagcaagacccagagccugcugaucgugaacaacgccaccaacguggucaucaaggugugcgaguuccaguucugcaacgaccccuuccucggcguguacuaccacaagaacaacaaguccugcauggagagcgaguuccgggucuacuccagcgccaacaacugcacguucgaguacgugucccagcccuuccugauggaccuggagggcaagcaggggaacuucaagaaccuccgcgaguucguguucaagaacaucgacggcuacuucaagaucuacagcaagcacaccccgaucaaccugguccgggaccugccccagggguucuccgcccucgagccccugguggaccugcccaucggcaucaacaucacccgcuuccagacccuccuggcccugcaccggagcuaccucacgccgggggacuccagcagcggcuggaccgcgggcgccgccgccuacuacgugggguaccugcagccccgcaccuuccugcucaaguacaacgagaacggcaccaucacggacgcggucgacugcgcccuggacccccuguccgagaccaagugcacccucaagagcuucaccguggagaaggggaucuaccagacguccaacuuccgggugcagcccaccgagagcaucguccgcuucccgaacaucaccaaccugugccccuucggcgagguguucaacgccacccgguucgccuccgucuacgccuggaaccgcaagcggaucagcaacugcguggcggacuacuccgugcuguacaacagcgccuccuucagcacguucaagugcuacggcgucucccccaccaagcucaacgaccugugcuucaccaacguguacgccgacagcuucgugauccgcggggacgagguccggcagaucgcccccggccagaccgggaagaucgccgacuacaacuacaagcugccggacgacuucacgggcugcgugaucgcguggaacuccaacaaccucgacagcaaggucgggggcaacuacaacuaccgcuaccggcuguuccgcaaguccaaccugaagcccuucgagcgggacaucagcaccgagaucuaccaggccggcuccacccccugcaacgggguggagggcuucaacugcuacuucccccuccagagcuacggguuccagccgaccaacggcgugggguaccagcccuaccgcguggucgugcuguccuucgagcugcuccacgcccccgccacggugugcggccccaagaaguccaccaaccuggucaagaacaagugcgugaacuucaacuucaacggccugaccgggaccggcgugcucaccgagagcaacaagaaguuccugccguuccagcaguucgggcgcgacaucgccgacacgaccgacgcgguccgggacccccagacccuggagauccuggacaucacccccugcagcuucggcggggugagcgugaucacgccgggcaccaacaccuccaaccaggucgccgugcucuaccagggcgugaacugcaccgagguccccguggccauccacgccgaccagcugacgcccaccuggcgcguguacagcaccggguccaacgucuuccagacccgggccggcugccugaucggggcggagcacgugaacaacagcuacgagugcgacauccccaucggcgccggcaucugcgccuccuaccagacgcagaccaacagcccgcgccgggcccgcuccguggcgagccaguccaucaucgccuacaccaugagccucggggccgagaacuccgucgccuacagcaacaacuccaucgccauccccaccaacuucacgaucagcgugaccaccgagauccugcccguguccaugaccaagacgagcgucgacugcaccauguacaucugcggcgacagcaccgagugcuccaaccugcuccugcaguacgggagcuucugcacccagcugaaccgggcgcucacgggcaucgccguggagcaggacaagaacacccaggagguguucgcccaggucaagcagaucuacaagacgcccccgaucaaggacuucgggggcuucaacuucucccagauccugcccgaccccagcaagcccuccaagcgcagcuucaucgaggaccuccuguucaacaaggugacccuggccgacgccggcuucaucaagcaguacggggacugccugggcgacaucgcggcccgggaccucaucugcgcccagaaguucaacgggcugaccgugcugccgccccuccugaccgacgagaugaucgcccaguacaccuccgcccugcucgcgggcaccaucacgagcggguggaccuucggcgccggcgccgcccugcagauccccuucgcgaugcagauggccuaccgcuucaacgggaucggcgucacccagaacgugcuguacgagaaccagaagcucaucgccaaccaguucaacuccgccaucgggaagauccaggacagccuguccagcaccgccuccgcgcugggcaagcuccaggacguggucaaccagaacgcccaggcccugaacacgcuggugaagcagcucagcuccaacuucggggccaucagcuccgugcugaacgacauccugagccggcucgacccgcccgaggccgagguccagaucgaccgccugaucaccggccggcugcagucccuccagaccuacgugacccagcagcugauccgcgcggccgagauccgggccagcgccaaccuggccgcgaccaagaugagcgagugcgugcucggccaguccaagcgcgucgacuucugcgggaagggcuaccaccugaugagcuucccccaguccgcgccccacggggugguguuccugcacgucacguacgugcccgcccaggagaagaacuucaccaccgccccggccaucugccacgacggcaaggcccacuucccccgggagggggucuucgugagcaacggcacccacugguucgugacgcagcgcaacuucuacgagccccagaucaucaccaccgacaacaccuucgucuccggcaacugcgacguggugaucgggaucgucaacaacacgguguacgacccccuccagccggagcuggacagcuucaaggaggagcuggacaaguacuucaagaaccacaccucccccgacguggaccucggcgacaucagcgggaucaacgccuccgucgugaacauccagaaggagaucgaccggcugaacgagguggccaagaaccugaacgagagccucaucgaccugcaggagcugggcaaguacgagcaguacaucaaguggcccugguacaucuggcucggcuucaucgccgggcugaucgcgaucgucauggugaccaucaugcugugcugcaugaccuccugcugcagcugccucaagggcugcugcuccugcgggagcugcugcaaguucgacgaggacgacuccgagccggugcugaagggcgucaagcugcacuacacgugaggacuagucccuguucccagagcccacuuuuuuuucuuuuuuugaaauaaaauagccugucuuucagaucuaaaaaaaaaaaaaaaaaaaaaaaaaaaaaaaaaaaaaaaaaaaaaaaaaaaaaaaaaaaaaaaaaaaaaaaaaaaaaaaaaaaaaaaaaaaaaaaaaaaa

SEQ ID NO: 25093 - RNA, 4167 nt, Artificial Sequence
  SARS-CoV-2/Wuhan/WIV05/2019__EPI_ISL_402128 spike protein mRNA gc (1-1273)(K986P_V987P)
aggagagggcgcuuggcuugcaaggacccugagcugcggcauugaagcacacccaacccaacucgacugaagucagccucacugaaccggaucugagaaucuucucucucugggcuugccagggcucuccgaaccuagcuagcauccucuucaauuccaacuagaaagcuuaccauguucguguuccuggugcugcugccccuggugagcagccagugcgugaaccugaccacccggacccagcugccaccagccuacaccaacagcuucacccggggcgucuacuaccccgacaagguguuccggagcagcguccugcacagcacccaggaccuguuccugcccuucuucagcaacgugaccugguuccacgccauccacgugagcggcaccaacggcaccaagcgguucgacaaccccgugcugcccuucaacgacggcguguacuucgccagcaccgagaagagcaacaucauccggggcuggaucuucggcaccacccuggacagcaagacccagagccugcugaucgugaauaacgccaccaacguggugaucaaggugugcgaguuccaguucugcaacgaccccuuccugggcguguacuaccacaagaacaacaagagcuggauggagagcgaguuccggguguacagcagcgccaacaacugcaccuucgaguacgugagccagcccuuccugauggaccuggagggcaagcagggcaacuucaagaaccugcgggaguucguguucaagaacaucgacggcuacuucaagaucuacagcaagcacaccccaaucaaccuggugcgggaucugccccagggcuucucagcccuggagccccugguggaccugcccaucggcaucaacaucacccgguuccagacccugcuggcccugcaccggagcuaccugaccccaggcgacagcagcagcggguggacagcaggcgcggcugcuuacuacgugggcuaccugcagccccggaccuuccugcugaaguacaacgagaacggcaccaucaccgacgccguggacugcgcccuggacccucugagcgagaccaagugcacccugaagagcuucaccguggagaagggcaucuaccagaccagcaacuuccgggugcagcccaccgagagcaucgugcgguuccccaacaucaccaaccugugccccuucggcgagguguucaacgccacccgguucgccagcguguacgccuggaaccggaagcggaucagcaacugcguggccgacuacagcgugcuguacaacagcgccagcuucagcaccuucaagugcuacggcgugagccccaccaagcugaacgaccugugcuucaccaacguguacgccgacagcuucgugauccguggcgacgaggugcggcagaucgcacccggccagacaggcaagaucgccgacuacaacuacaagcugcccgacgacuucaccggcugcgugaucgccuggaacagcaacaaccucgacagcaaggugggcggcaacuacaacuaccuguaccggcuguuccggaagagcaaccugaagcccuucgagcgggacaucagcaccgagaucuaccaagccggcuccaccccuugcaacggcguggagggcuucaacugcuacuucccucugcagagcuacggcuuccagcccaccaacggcgugggcuaccagcccuaccgggugguggugcugagcuucgagcugcugcacgccccagccaccguguguggccccaagaagagcaccaaccuggugaagaacaagugcgugaacuucaacuucaacggccuuaccggcaccggcgugcugaccgagagcaacaagaaauuccugcccuuucagcaguucggccgggacaucgccgacaccaccgacgcugugcgggauccccagacccuggagauccuggacaucaccccuugcagcuucggcggcgugagcgugaucaccccaggcaccaacaccagcaaccagguggccgugcuguaccaggacgugaacugcaccgaggugcccguggccauccacgccgaccagcugacacccaccuggcgggucuacagcaccggcagcaacguguuccagacccgggccgguugccugaucggcgccgagcacgugaacaacagcuacgagugcgacauccccaucggcgccggcaucugugccagcuaccagacccagaccaauucaccccggagggcaaggagcguggccagccagagcaucaucgccuacaccaugagccugggcgccgagaacagcguggccuacagcaacaacagcaucgccauccccaccaacuucaccaucagcgugaccaccgagauucugcccgugagcaugaccaagaccagcguggacugcaccauguacaucugcggcgacagcaccgagugcagcaaccugcugcugcaguacggcagcuucugcacccagcugaaccgggcccugaccggcaucgccguggagcaggacaagaacacccaggagguguucgcccaggugaagcagaucuacaagaccccucccaucaaggacuucggcggcuucaacuucagccagauccugcccgaccccagcaagcccagcaagcggagcuucaucgaggaccugcuguucaacaaggugacccuagccgacgccggcuucaucaagcaguacggcgacugccucggcgacauagccgcccgggaccugaucugcgcccagaaguucaacggccugaccgugcugccuccccugcugaccgacgagaugaucgcccaguacaccagcgcccuguuagccggaaccaucaccagcggcuggacuuucggcgcuggagccgcucugcagauccccuucgccaugcagauggccuaccgguucaacggcaucggcgugacccagaacgugcuguacgagaaccagaagcugaucgccaaccaguucaacagcgccaucggcaagauccaggacagccugagcagcaccgcuagcgcccugggcaagcugcaggacguggugaaccagaacgcccaggcccugaacacccuggugaagcagcugagcagcaacuucggcgccaucagcagcgugcugaacgacauccugagccggcuggacccucccgaggccgaggugcagaucgaccggcugaucacuggccggcugcagagccugcagaccuacgugacccagcagcugauccgggccgccgagauucgggccagcgccaaccuggccgccaccaagaugagcgagugcgugcugggccagagcaagcggguggacuucugcggcaagggcuaccaccugaugagcuuuccccagagcgcaccccacggagugguguuccugcacgugaccuacgugcccgcccaggagaagaacuucaccaccgccccagccaucugccacgacggcaaggcccacuuuccccgggagggcguguucgugagcaacggcacccacugguucgugacccagcggaacuucuacgagccccagaucaucaccaccgacaacaccuucgugagcggcaacugcgacguggugaucggcaucgugaacaacaccguguacgauccccugcagcccgagcuggacagcuucaaggaggagcuggacaaguacuucaagaaucacaccagccccgacguggaccugggcgacaucagcggcaucaacgccagcguggugaacauccagaaggagaucgaucggcugaacgagguggccaagaaccugaacgagagccugaucgaccugcaggagcugggcaaguacgagcaguacaucaaguggcccugguacaucuggcugggcuucaucgccggccugaucgccaucgugauggugaccaucaugcugugcugcaugaccagcugcugcagcugccugaagggcuguugcagcugcggcagcugcugcaaguucgacgaggacgacagcgagcccgugcugaagggcgugaagcugcacuacaccugaggacuagucccuguucccagagcccacuuuuuuuucuuuuuuugaaauaaaauagccugucuuucagaucuaaaaaaaaaaaaaaaaaaaaaaaaaaaaaaaaaaaaaaaaaaaaaaaaaaaaaaaaaaaaaaaaaaaaaaaaaaaaaaaaaaaaaaaaaaaaaaaaaaaa

SEQ ID NO: 25094 - RNA, 4167 nt, Artificial Sequence
  SARS-CoV-2/Wuhan/WIV05/2019__EPI_ISL_402128 spike protein mRNA gc (1-1273)(K986P_V987P_ D614G)
aggagagggcgcuuggcuugcaaggacccugagcugcggcauugaagcacacccaacccaacucgacugaagucagccucacugaaccggaucugagaaucuucucucucugggcuugccagggcucuccgaaccuagcuagcauccucuucaauuccaacuagaaagcuuaccauguucguguuccuggugcugcugccccuggugagcagccagugcgugaaccugaccacccggacccagcugccaccagccuacaccaacagcuucacccggggcgucuacuaccccgacaagguguuccggagcagcguccugcacagcacccaggaccuguuccugcccuucuucagcaacgugaccugguuccacgccauccacgugagcggcaccaacggcaccaagcgguucgacaaccccgugcugcccuucaacgacggcguguacuucgccagcaccgagaagagcaacaucauccggggcuggaucuucggcaccacccuggacagcaagacccagagccugcugaucgugaauaacgccaccaacguggugaucaaggugugcgaguuccaguucugcaacgaccccuuccugggcguguacuaccacaagaacaacaagagcuggauggagagcgaguuccggguguacagcagcgccaacaacugcaccuucgaguacgugagccagcccuuccugauggaccuggagggcaagcagggcaacuucaagaaccugcgggaguucguguucaagaacaucgacggcuacuucaagaucuacagcaagcacaccccaaucaaccuggugcgggaucugccccagggcuucucagcccuggagccccugguggaccugcccaucggcaucaacaucacccgguuccagacccugcuggcccugcaccggagcuaccugaccccaggcgacagcagcagcggguggacagcaggcgcggcugcuuacuacgugggcuaccugcagccccggaccuuccugcugaaguacaacgagaacggcaccaucaccgacgccguggacugcgcccuggacccucugagcgagaccaagugcacccugaagagcuucaccguggagaagggcaucuaccagaccagcaacuuccgggugcagcccaccgagagcaucgugcgguuccccaacaucaccaaccugugccccuucggcgagguguucaacgccacccgguucgccagcguguacgccuggaaccggaagcggaucagcaacugcguggccgacuacagcgugcuguacaacagcgccagcuucagcaccuucaagugcuacggcgugagccccaccaagcugaacgaccugugcuucaccaacguguacgccgacagcuucgugauccguggcgacgaggugcggcagaucgcacccggccagacaggcaagaucgccgacuacaacuacaagcugcccgacgacuucaccggcugcgugaucgccuggaacagcaacaaccucgacagcaaggugggcggcaacuacaacuaccuguaccggcuguuccggaagagcaaccugaagcccuucgagcgggacaucagcaccgagaucuaccaagccggcuccaccccuugcaacggcguggagggcuucaacugcuacuucccucugcagagcuacggcuuccagcccaccaacggcgugggcuaccagcccuaccgggugguggugcugagcuucgagcugcugcacgccccagccaccguguguggccccaagaagagcaccaaccuggugaagaacaagugcgugaacuucaacuucaacggccuuaccggcaccggcgugcugaccgagagcaacaagaaauuccugcccuuucagcaguucggccgggacaucgccgacaccaccgacgcugugcgggauccccagacccuggagauccuggacaucaccccuugcagcuucggcggcgugagcgugaucaccccaggcaccaacaccagcaaccagguggccgugcuguaccagggcgugaacugcaccgaggugcccguggccauccacgccgaccagcugacacccaccuggcgggucuacagcaccggcagcaacguguuccagacccgggccgguugccugaucggcgccgagcacgugaacaacagcuacgagugcgacauccccaucggcgccggcaucugugccagcuaccagacccagaccaauucaccccggagggcaaggagcguggccagccagagcaucaucgccuacaccaugagccugggcgccgagaacagcguggccuacagcaacaacagcaucgccauccccaccaacuucaccaucagcgugaccaccgagauucugcccgugagcaugaccaagaccagcguggacugcaccauguacaucugcggcgacagcaccgagugcagcaaccugcugcugcaguacggcagcuucugcacccagcugaaccgggcccugaccggcaucgccguggagcaggacaagaacacccaggagguguucgcccaggugaagcagaucuacaagaccccucccaucaaggacuucggcggcuucaacuucagccagauccugcccgaccccagcaagcccagcaagcggagcuucaucgaggaccugcuguucaacaaggugacccuagccgacgccggcuucaucaagcaguacggcgacugccucggcgacauagccgcccgggaccugaucugcgcccagaaguucaacggccugaccgugcugccuccccugcugaccgacgagaugaucgcccaguacaccagcgcccuguuagccggaaccaucaccagcggcuggacuuucggcgcuggagccgcucugcagauccccuucgccaugcagauggccuaccgguucaacggcaucggcgugacccagaacgugcuguacgagaaccagaagcugaucgccaaccaguucaacagcgccaucggcaagauccaggacagccugagcagcaccgcuagcgcccugggcaagcugcaggacguggugaaccagaacgcccaggcccugaacacccuggugaagcagcugagcagcaacuucggcgccaucagcagcgugcugaacgacauccugagccggcuggacccucccgaggccgaggugcagaucgaccggcugaucacuggccggcugcagagccugcagaccuacgugacccagcagcugauccgggccgccgagauucgggccagcgccaaccuggccgccaccaagaugagcgagugcgugcugggccagagcaagcggguggacuucugcggcaagggcuaccaccugaugagcuuuccccagagcgcaccccacggagugguguuccugcacgugaccuacgugcccgcccaggagaagaacuucaccaccgccccagccaucugccacgacggcaaggcccacuuuccccgggagggcguguucgugagcaacggcacccacugguucgugacccagcggaacuucuacgagccccagaucaucaccaccgacaacaccuucgugagcggcaacugcgacguggugaucggcaucgugaacaacaccguguacgauccccugcagcccgagcuggacagcuucaaggaggagcuggacaaguacuucaagaaucacaccagccccgacguggaccugggcgacaucagcggcaucaacgccagcguggugaacauccagaaggagaucgaucggcugaacgagguggccaagaaccugaacgagagccugaucgaccugcaggagcugggcaaguacgagcaguacaucaaguggcccugguacaucuggcugggcuucaucgccggccugaucgccaucgugauggugaccaucaugcugugcugcaugaccagcugcugcagcugccugaagggcuguugcagcugcggcagcugcugcaaguucgacgaggacgacagcgagcccgugcugaagggcgugaagcugcacuacaccugaggacuagucccuguucccagagcccacuuuuuuuucuuuuuuugaaauaaaauagccugucuuucagaucuaaaaaaaaaaaaaaaaaaaaaaaaaaaaaaaaaaaaaaaaaaaaaaaaaaaaaaaaaaaaaaaaaaaaaaaaaaaaaaaaaaaaaaaaaaaaaaaaaaaa

SEQ ID NO: 25095 - RNA, 4167 nt, Artificial Sequence
  SARS-CoV-2/Wuhan/WIV05/2019__EPI_ISL_402128 spike protein mRNA gc (1-1273)(K986P_V987P_A222V_D614G)
aggagagggcgcuuggcuugcaaggacccugagcugcggcauugaagcacacccaacccaacucgacugaagucagccucacugaaccggaucugagaaucuucucucucugggcuugccagggcucuccgaaccuagcuagcauccucuucaauuccaacuagaaagcuuaccauguucguguuccuggugcugcugccccuggugagcagccagugcgugaaccugaccacccggacccagcugccaccagccuacaccaacagcuucacccggggcgucuacuaccccgacaagguguuccggagcagcguccugcacagcacccaggaccuguuccugcccuucuucagcaacgugaccugguuccacgccauccacgugagcggcaccaacggcaccaagcgguucgacaaccccgugcugcccuucaacgacggcguguacuucgccagcaccgagaagagcaacaucauccggggcuggaucuucggcaccacccuggacagcaagacccagagccugcugaucgugaauaacgccaccaacguggugaucaaggugugcgaguuccaguucugcaacgaccccuuccugggcguguacuaccacaagaacaacaagagcuggauggagagcgaguuccggguguacagcagcgccaacaacugcaccuucgaguacgugagccagcccuuccugauggaccuggagggcaagcagggcaacuucaagaaccugcgggaguucguguucaagaacaucgacggcuacuucaagaucuacagcaagcacaccccaaucaaccuggugcgggaucugccccagggcuucucagugcuggagccccugguggaccugcccaucggcaucaacaucacccgguuccagacccugcuggcccugcaccggagcuaccugaccccaggcgacagcagcagcggguggacagcaggcgcggcugcuuacuacgugggcuaccugcagccccggaccuuccugcugaaguacaacgagaacggcaccaucaccgacgccguggacugcgcccuggacccucugagcgagaccaagugcacccugaagagcuucaccguggagaagggcaucuaccagaccagcaacuuccgggugcagcccaccgagagcaucgugcgguuccccaacaucaccaaccugugccccuucggcgagguguucaacgccacccgguucgccagcguguacgccuggaaccggaagcggaucagcaacugcguggccgacuacagcgugcuguacaacagcgccagcuucagcaccuucaagugcuacggcgugagccccaccaagcugaacgaccugugcuucaccaacguguacgccgacagcuucgugauccguggcgacgaggugcggcagaucgcacccggccagacaggcaagaucgccgacuacaacuacaagcugcccgacgacuucaccggcugcgugaucgccuggaacagcaacaaccucgacagcaaggugggcggcaacuacaacuaccuguaccggcuguuccggaagagcaaccugaagcccuucgagcgggacaucagcaccgagaucuaccaagccggcuccaccccuugcaacggcguggagggcuucaacugcuacuucccucugcagagcuacggcuuccagcccaccaacggcgugggcuaccagcccuaccgggugguggugcugagcuucgagcugcugcacgccccagccaccguguguggccccaagaagagcaccaaccuggugaagaacaagugcgugaacuucaacuucaacggccuuaccggcaccggcgugcugaccgagagcaacaagaaauuccugcccuuucagcaguucggccgggacaucgccgacaccaccgacgcugugcgggauccccagacccuggagauccuggacaucaccccuugcagcuucggcggcgugagcgugaucaccccaggcaccaacaccagcaaccagguggccgugcuguaccagggcgugaacugcaccgaggugcccguggccauccacgccgaccagcugacacccaccuggcgggucuacagcaccggcagcaacguguuccagacccgggccgguugccugaucggcgccgagcacgugaacaacagcuacgagugcgacauccccaucggcgccggcaucugugccagcuaccagacccagaccaauucaccccggagggcaaggagcguggccagccagagcaucaucgccuacaccaugagccugggcgccgagaacagcguggccuacagcaacaacagcaucgccauccccaccaacuucaccaucagcgugaccaccgagauucugcccgugagcaugaccaagaccagcguggacugcaccauguacaucugcggcgacagcaccgagugcagcaaccugcugcugcaguacggcagcuucugcacccagcugaaccgggcccugaccggcaucgccguggagcaggacaagaacacccaggagguguucgcccaggugaagcagaucuacaagaccccucccaucaaggacuucggcggcuucaacuucagccagauccugcccgaccccagcaagcccagcaagcggagcuucaucgaggaccugcuguucaacaaggugacccuagccgacgccggcuucaucaagcaguacggcgacugccucggcgacauagccgcccgggaccugaucugcgcccagaaguucaacggccugaccgugcugccuccccugcugaccgacgagaugaucgcccaguacaccagcgcccuguuagccggaaccaucaccagcggcuggacuuucggcgcuggagccgcucugcagauccccuucgccaugcagauggccuaccgguucaacggcaucggcgugacccagaacgugcuguacgagaaccagaagcugaucgccaaccaguucaacagcgccaucggcaagauccaggacagccugagcagcaccgcuagcgcccugggcaagcugcaggacguggugaaccagaacgcccaggcccugaacacccuggugaagcagcugagcagcaacuucggcgccaucagcagcgugcugaacgacauccugagccggcuggacccucccgaggccgaggugcagaucgaccggcugaucacuggccggcugcagagccugcagaccuacgugacccagcagcugauccgggccgccgagauucgggccagcgccaaccuggccgccaccaagaugagcgagugcgugcugggccagagcaagcggguggacuucugcggcaagggcuaccaccugaugagcuuuccccagagcgcaccccacggagugguguuccugcacgugaccuacgugcccgcccaggagaagaacuucaccaccgccccagccaucugccacgacggcaaggcccacuuuccccgggagggcguguucgugagcaacggcacccacugguucgugacccagcggaacuucuacgagccccagaucaucaccaccgacaacaccuucgugagcggcaacugcgacguggugaucggcaucgugaacaacaccguguacgauccccugcagcccgagcuggacagcuucaaggaggagcuggacaaguacuucaagaaucacaccagccccgacguggaccugggcgacaucagcggcaucaacgccagcguggugaacauccagaaggagaucgaucggcugaacgagguggccaagaaccugaacgagagccugaucgaccugcaggagcugggcaaguacgagcaguacaucaaguggcccugguacaucuggcugggcuucaucgccggccugaucgccaucgugauggugaccaucaugcugugcugcaugaccagcugcugcagcugccugaagggcuguugcagcugcggcagcugcugcaaguucgacgaggacgacagcgagcccgugcugaagggcgugaagcugcacuacaccugaggacuagucccuguucccagagcccacuuuuuuuucuuuuuuugaaauaaaauagccugucuuucagaucuaaaaaaaaaaaaaaaaaaaaaaaaaaaaaaaaaaaaaaaaaaaaaaaaaaaaaaaaaaaaaaaaaaaaaaaaaaaaaaaaaaaaaaaaaaaaaaaaaaaa

SEQ ID NO: 25096 - RNA, 4167 nt, Artificial Sequence
  SARS-CoV-2/Wuhan/WIV05/2019__EPI_ISL_402128 spike protein mRNA gc (1-1273)(K986P_V987P_N439K_D614G)
aggagagggcgcuuggcuugcaaggacccugagcugcggcauugaagcacacccaacccaacucgacugaagucagccucacugaaccggaucugagaaucuucucucucugggcuugccagggcucuccgaaccuagcuagcauccucuucaauuccaacuagaaagcuuaccauguucguguuccuggugcugcugccccuggugagcagccagugcgugaaccugaccacccggacccagcugccaccagccuacaccaacagcuucacccggggcgucuacuaccccgacaagguguuccggagcagcguccugcacagcacccaggaccuguuccugcccuucuucagcaacgugaccugguuccacgccauccacgugagcggcaccaacggcaccaagcgguucgacaaccccgugcugcccuucaacgacggcguguacuucgccagcaccgagaagagcaacaucauccggggcuggaucuucggcaccacccuggacagcaagacccagagccugcugaucgugaauaacgccaccaacguggugaucaaggugugcgaguuccaguucugcaacgaccccuuccugggcguguacuaccacaagaacaacaagagcuggauggagagcgaguuccggguguacagcagcgccaacaacugcaccuucgaguacgugagccagcccuuccugauggaccuggagggcaagcagggcaacuucaagaaccugcgggaguucguguucaagaacaucgacggcuacuucaagaucuacagcaagcacaccccaaucaaccuggugcgggaucugccccagggcuucucagcccuggagccccugguggaccugcccaucggcaucaacaucacccgguuccagacccugcuggcccugcaccggagcuaccugaccccaggcgacagcagcagcggguggacagcaggcgcggcugcuuacuacgugggcuaccugcagccccggaccuuccugcugaaguacaacgagaacggcaccaucaccgacgccguggacugcgcccuggacccucugagcgagaccaagugcacccugaagagcuucaccguggagaagggcaucuaccagaccagcaacuuccgggugcagcccaccgagagcaucgugcgguuccccaacaucaccaaccugugccccuucggcgagguguucaacgccacccgguucgccagcguguacgccuggaaccggaagcggaucagcaacugcguggccgacuacagcgugcuguacaacagcgccagcuucagcaccuucaagugcuacggcgugagccccaccaagcugaacgaccugugcuucaccaacguguacgccgacagcuucgugauccguggcgacgaggugcggcagaucgcacccggccagacaggcaagaucgccgacuacaacuacaagcugcccgacgacuucaccggcugcgugaucgccuggaacagcaagaaccucgacagcaaggugggcggcaacuacaacuaccuguaccggcuguuccggaagagcaaccugaagcccuucgagcgggacaucagcaccgagaucuaccaagccggcuccaccccuugcaacggcguggagggcuucaacugcuacuucccucugcagagcuacggcuuccagcccaccaacggcgugggcuaccagcccuaccgggugguggugcugagcuucgagcugcugcacgccccagccaccguguguggccccaagaagagcaccaaccuggugaagaacaagugcgugaacuucaacuucaacggccuuaccggcaccggcgugcugaccgagagcaacaagaaauuccugcccuuucagcaguucggccgggacaucgccgacaccaccgacgcugugcgggauccccagacccuggagauccuggacaucaccccuugcagcuucggcggcgugagcgugaucaccccaggcaccaacaccagcaaccagguggccgugcuguaccagggcgugaacugcaccgaggugcccguggccauccacgccgaccagcugacacccaccuggcgggucuacagcaccggcagcaacguguuccagacccgggccgguugccugaucggcgccgagcacgugaacaacagcuacgagugcgacauccccaucggcgccggcaucugugccagcuaccagacccagaccaauucaccccggagggcaaggagcguggccagccagagcaucaucgccuacaccaugagccugggcgccgagaacagcguggccuacagcaacaacagcaucgccauccccaccaacuucaccaucagcgugaccaccgagauucugcccgugagcaugaccaagaccagcguggacugcaccauguacaucugcggcgacagcaccgagugcagcaaccugcugcugcaguacggcagcuucugcacccagcugaaccgggcccugaccggcaucgccguggagcaggacaagaacacccaggagguguucgcccaggugaagcagaucuacaagaccccucccaucaaggacuucggcggcuucaacuucagccagauccugcccgaccccagcaagcccagcaagcggagcuucaucgaggaccugcuguucaacaaggugacccuagccgacgccggcuucaucaagcaguacggcgacugccucggcgacauagccgcccgggaccugaucugcgcccagaaguucaacggccugaccgugcugccuccccugcugaccgacgagaugaucgcccaguacaccagcgcccuguuagccggaaccaucaccagcggcuggacuuucggcgcuggagccgcucugcagauccccuucgccaugcagauggccuaccgguucaacggcaucggcgugacccagaacgugcuguacgagaaccagaagcugaucgccaaccaguucaacagcgccaucggcaagauccaggacagccugagcagcaccgcuagcgcccugggcaagcugcaggacguggugaaccagaacgcccaggcccugaacacccuggugaagcagcugagcagcaacuucggcgccaucagcagcgugcugaacgacauccugagccggcuggacccucccgaggccgaggugcagaucgaccggcugaucacuggccggcugcagagccugcagaccuacgugacccagcagcugauccgggccgccgagauucgggccagcgccaaccuggccgccaccaagaugagcgagugcgugcugggccagagcaagcggguggacuucugcggcaagggcuaccaccugaugagcuuuccccagagcgcaccccacggagugguguuccugcacgugaccuacgugcccgcccaggagaagaacuucaccaccgccccagccaucugccacgacggcaaggcccacuuuccccgggagggcguguucgugagcaacggcacccacugguucgugacccagcggaacuucuacgagccccagaucaucaccaccgacaacaccuucgugagcggcaacugcgacguggugaucggcaucgugaacaacaccguguacgauccccugcagcccgagcuggacagcuucaaggaggagcuggacaaguacuucaagaaucacaccagccccgacguggaccugggcgacaucagcggcaucaacgccagcguggugaacauccagaaggagaucgaucggcugaacgagguggccaagaaccugaacgagagccugaucgaccugcaggagcugggcaaguacgagcaguacaucaaguggcccugguacaucuggcugggcuucaucgccggccugaucgccaucgugauggugaccaucaugcugugcugcaugaccagcugcugcagcugccugaagggcuguugcagcugcggcagcugcugcaaguucgacgaggacgacagcgagcccgugcugaagggcgugaagcugcacuacaccugaggacuagucccuguucccagagcccacuuuuuuuucuuuuuuugaaauaaaauagccugucuuucagaucuaaaaaaaaaaaaaaaaaaaaaaaaaaaaaaaaaaaaaaaaaaaaaaaaaaaaaaaaaaaaaaaaaaaaaaaaaaaaaaaaaaaaaaaaaaaaaaaaaaaa

SEQ ID NO: 25097 - RNA, 4167 nt, Artificial Sequence
  SARS-CoV-2/Wuhan/WIV05/2019__EPI_ISL_402128 spike protein mRNA gc (1-1273)(K986P_V987P_S477N_D614G)
aggagagggcgcuuggcuugcaaggacccugagcugcggcauugaagcacacccaacccaacucgacugaagucagccucacugaaccggaucugagaaucuucucucucugggcuugccagggcucuccgaaccuagcuagcauccucuucaauuccaacuagaaagcuuaccauguucguguuccuggugcugcugccccuggugagcagccagugcgugaaccugaccacccggacccagcugccaccagccuacaccaacagcuucacccggggcgucuacuaccccgacaagguguuccggagcagcguccugcacagcacccaggaccuguuccugcccuucuucagcaacgugaccugguuccacgccauccacgugagcggcaccaacggcaccaagcgguucgacaaccccgugcugcccuucaacgacggcguguacuucgccagcaccgagaagagcaacaucauccggggcuggaucuucggcaccacccuggacagcaagacccagagccugcugaucgugaauaacgccaccaacguggugaucaaggugugcgaguuccaguucugcaacgaccccuuccugggcguguacuaccacaagaacaacaagagcuggauggagagcgaguuccggguguacagcagcgccaacaacugcaccuucgaguacgugagccagcccuuccugauggaccuggagggcaagcagggcaacuucaagaaccugcgggaguucguguucaagaacaucgacggcuacuucaagaucuacagcaagcacaccccaaucaaccuggugcgggaucugccccagggcuucucagcccuggagccccugguggaccugcccaucggcaucaacaucacccgguuccagacccugcuggcccugcaccggagcuaccugaccccaggcgacagcagcagcggguggacagcaggcgcggcugcuuacuacgugggcuaccugcagccccggaccuuccugcugaaguacaacgagaacggcaccaucaccgacgccguggacugcgcccuggacccucugagcgagaccaagugcacccugaagagcuucaccguggagaagggcaucuaccagaccagcaacuuccgggugcagcccaccgagagcaucgugcgguuccccaacaucaccaaccugugccccuucggcgagguguucaacgccacccgguucgccagcguguacgccuggaaccggaagcggaucagcaacugcguggccgacuacagcgugcuguacaacagcgccagcuucagcaccuucaagugcuacggcgugagccccaccaagcugaacgaccugugcuucaccaacguguacgccgacagcuucgugauccguggcgacgaggugcggcagaucgcacccggccagacaggcaagaucgccgacuacaacuacaagcugcccgacgacuucaccggcugcgugaucgccuggaacagcaacaaccucgacagcaaggugggcggcaacuacaacuaccuguaccggcuguuccggaagagcaaccugaagcccuucgagcgggacaucagcaccgagaucuaccaagccggcaacaccccuugcaacggcguggagggcuucaacugcuacuucccucugcagagcuacggcuuccagcccaccaacggcgugggcuaccagcccuaccgggugguggugcugagcuucgagcugcugcacgccccagccaccguguguggccccaagaagagcaccaaccuggugaagaacaagugcgugaacuucaacuucaacggccuuaccggcaccggcgugcugaccgagagcaacaagaaauuccugcccuuucagcaguucggccgggacaucgccgacaccaccgacgcugugcgggauccccagacccuggagauccuggacaucaccccuugcagcuucggcggcgugagcgugaucaccccaggcaccaacaccagcaaccagguggccgugcuguaccagggcgugaacugcaccgaggugcccguggccauccacgccgaccagcugacacccaccuggcgggucuacagcaccggcagcaacguguuccagacccgggccgguugccugaucggcgccgagcacgugaacaacagcuacgagugcgacauccccaucggcgccggcaucugugccagcuaccagacccagaccaauucaccccggagggcaaggagcguggccagccagagcaucaucgccuacaccaugagccugggcgccgagaacagcguggccuacagcaacaacagcaucgccauccccaccaacuucaccaucagcgugaccaccgagauucugcccgugagcaugaccaagaccagcguggacugcaccauguacaucugcggcgacagcaccgagugcagcaaccugcugcugcaguacggcagcuucugcacccagcugaaccgggcccugaccggcaucgccguggagcaggacaagaacacccaggagguguucgcccaggugaagcagaucuacaagaccccucccaucaaggacuucggcggcuucaacuucagccagauccugcccgaccccagcaagcccagcaagcggagcuucaucgaggaccugcuguucaacaaggugacccuagccgacgccggcuucaucaagcaguacggcgacugccucggcgacauagccgcccgggaccugaucugcgcccagaaguucaacggccugaccgugcugccuccccugcugaccgacgagaugaucgcccaguacaccagcgcccuguuagccggaaccaucaccagcggcuggacuuucggcgcuggagccgcucugcagauccccuucgccaugcagauggccuaccgguucaacggcaucggcgugacccagaacgugcuguacgagaaccagaagcugaucgccaaccaguucaacagcgccaucggcaagauccaggacagccugagcagcaccgcuagcgcccugggcaagcugcaggacguggugaaccagaacgcccaggcccugaacacccuggugaagcagcugagcagcaacuucggcgccaucagcagcgugcugaacgacauccugagccggcuggacccucccgaggccgaggugcagaucgaccggcugaucacuggccggcugcagagccugcagaccuacgugacccagcagcugauccgggccgccgagauucgggccagcgccaaccuggccgccaccaagaugagcgagugcgugcugggccagagcaagcggguggacuucugcggcaagggcuaccaccugaugagcuuuccccagagcgcaccccacggagugguguuccugcacgugaccuacgugcccgcccaggagaagaacuucaccaccgccccagccaucugccacgacggcaaggcccacuuuccccgggagggcguguucgugagcaacggcacccacugguucgugacccagcggaacuucuacgagccccagaucaucaccaccgacaacaccuucgugagcggcaacugcgacguggugaucggcaucgugaacaacaccguguacgauccccugcagcccgagcuggacagcuucaaggaggagcuggacaaguacuucaagaaucacaccagccccgacguggaccugggcgacaucagcggcaucaacgccagcguggugaacauccagaaggagaucgaucggcugaacgagguggccaagaaccugaacgagagccugaucgaccugcaggagcugggcaaguacgagcaguacaucaaguggcccugguacaucuggcugggcuucaucgccggccugaucgccaucgugauggugaccaucaugcugugcugcaugaccagcugcugcagcugccugaagggcuguugcagcugcggcagcugcugcaaguucgacgaggacgacagcgagcccgugcugaagggcgugaagcugcacuacaccugaggacuagucccuguucccagagcccacuuuuuuuucuuuuuuugaaauaaaauagccugucuuucagaucuaaaaaaaaaaaaaaaaaaaaaaaaaaaaaaaaaaaaaaaaaaaaaaaaaaaaaaaaaaaaaaaaaaaaaaaaaaaaaaaaaaaaaaaaaaaaaaaaaaaa

SEQ ID NO: 25098 - RNA, 4167 nt, Artificial Sequence
  SARS-CoV-2/Wuhan/WIV05/2019__EPI_ISL_402128 spike protein mRNA gc (1-1273)(K986P_V987P_N501Y_D614G)
aggagagggcgcuuggcuugcaaggacccugagcugcggcauugaagcacacccaacccaacucgacugaagucagccucacugaaccggaucugagaaucuucucucucugggcuugccagggcucuccgaaccuagcuagcauccucuucaauuccaacuagaaagcuuaccauguucguguuccuggugcugcugccccuggugagcagccagugcgugaaccugaccacccggacccagcugccaccagccuacaccaacagcuucacccggggcgucuacuaccccgacaagguguuccggagcagcguccugcacagcacccaggaccuguuccugcccuucuucagcaacgugaccugguuccacgccauccacgugagcggcaccaacggcaccaagcgguucgacaaccccgugcugcccuucaacgacggcguguacuucgccagcaccgagaagagcaacaucauccggggcuggaucuucggcaccacccuggacagcaagacccagagccugcugaucgugaauaacgccaccaacguggugaucaaggugugcgaguuccaguucugcaacgaccccuuccugggcguguacuaccacaagaacaacaagagcuggauggagagcgaguuccggguguacagcagcgccaacaacugcaccuucgaguacgugagccagcccuuccugauggaccuggagggcaagcagggcaacuucaagaaccugcgggaguucguguucaagaacaucgacggcuacuucaagaucuacagcaagcacaccccaaucaaccuggugcgggaucugccccagggcuucucagcccuggagccccugguggaccugcccaucggcaucaacaucacccgguuccagacccugcuggcccugcaccggagcuaccugaccccaggcgacagcagcagcggguggacagcaggcgcggcugcuuacuacgugggcuaccugcagccccggaccuuccugcugaaguacaacgagaacggcaccaucaccgacgccguggacugcgcccuggacccucugagcgagaccaagugcacccugaagagcuucaccguggagaagggcaucuaccagaccagcaacuuccgggugcagcccaccgagagcaucgugcgguuccccaacaucaccaaccugugccccuucggcgagguguucaacgccacccgguucgccagcguguacgccuggaaccggaagcggaucagcaacugcguggccgacuacagcgugcuguacaacagcgccagcuucagcaccuucaagugcuacggcgugagccccaccaagcugaacgaccugugcuucaccaacguguacgccgacagcuucgugauccguggcgacgaggugcggcagaucgcacccggccagacaggcaagaucgccgacuacaacuacaagcugcccgacgacuucaccggcugcgugaucgccuggaacagcaacaaccucgacagcaaggugggcggcaacuacaacuaccuguaccggcuguuccggaagagcaaccugaagcccuucgagcgggacaucagcaccgagaucuaccaagccggcuccaccccuugcaacggcguggagggcuucaacugcuacuucccucugcagagcuacggcuuccagcccaccuacggcgugggcuaccagcccuaccgggugguggugcugagcuucgagcugcugcacgccccagccaccguguguggccccaagaagagcaccaaccuggugaagaacaagugcgugaacuucaacuucaacggccuuaccggcaccggcgugcugaccgagagcaacaagaaauuccugcccuuucagcaguucggccgggacaucgccgacaccaccgacgcugugcgggauccccagacccuggagauccuggacaucaccccuugcagcuucggcggcgugagcgugaucaccccaggcaccaacaccagcaaccagguggccgugcuguaccagggcgugaacugcaccgaggugcccguggccauccacgccgaccagcugacacccaccuggcgggucuacagcaccggcagcaacguguuccagacccgggccgguugccugaucggcgccgagcacgugaacaacagcuacgagugcgacauccccaucggcgccggcaucugugccagcuaccagacccagaccaauucaccccggagggcaaggagcguggccagccagagcaucaucgccuacaccaugagccugggcgccgagaacagcguggccuacagcaacaacagcaucgccauccccaccaacuucaccaucagcgugaccaccgagauucugcccgugagcaugaccaagaccagcguggacugcaccauguacaucugcggcgacagcaccgagugcagcaaccugcugcugcaguacggcagcuucugcacccagcugaaccgggcccugaccggcaucgccguggagcaggacaagaacacccaggagguguucgcccaggugaagcagaucuacaagaccccucccaucaaggacuucggcggcuucaacuucagccagauccugcccgaccccagcaagcccagcaagcggagcuucaucgaggaccugcuguucaacaaggugacccuagccgacgccggcuucaucaagcaguacggcgacugccucggcgacauagccgcccgggaccugaucugcgcccagaaguucaacggccugaccgugcugccuccccugcugaccgacgagaugaucgcccaguacaccagcgcccuguuagccggaaccaucaccagcggcuggacuuucggcgcuggagccgcucugcagauccccuucgccaugcagauggccuaccgguucaacggcaucggcgugacccagaacgugcuguacgagaaccagaagcugaucgccaaccaguucaacagcgccaucggcaagauccaggacagccugagcagcaccgcuagcgcccugggcaagcugcaggacguggugaaccagaacgcccaggcccugaacacccuggugaagcagcugagcagcaacuucggcgccaucagcagcgugcugaacgacauccugagccggcuggacccucccgaggccgaggugcagaucgaccggcugaucacuggccggcugcagagccugcagaccuacgugacccagcagcugauccgggccgccgagauucgggccagcgccaaccuggccgccaccaagaugagcgagugcgugcugggccagagcaagcggguggacuucugcggcaagggcuaccaccugaugagcuuuccccagagcgcaccccacggagugguguuccugcacgugaccuacgugcccgcccaggagaagaacuucaccaccgccccagccaucugccacgacggcaaggcccacuuuccccgggagggcguguucgugagcaacggcacccacugguucgugacccagcggaacuucuacgagccccagaucaucaccaccgacaacaccuucgugagcggcaacugcgacguggugaucggcaucgugaacaacaccguguacgauccccugcagcccgagcuggacagcuucaaggaggagcuggacaaguacuucaagaaucacaccagccccgacguggaccugggcgacaucagcggcaucaacgccagcguggugaacauccagaaggagaucgaucggcugaacgagguggccaagaaccugaacgagagccugaucgaccugcaggagcugggcaaguacgagcaguacaucaaguggcccugguacaucuggcugggcuucaucgccggccugaucgccaucgugauggugaccaucaugcugugcugcaugaccagcugcugcagcugccugaagggcuguugcagcugcggcagcugcugcaaguucgacgaggacgacagcgagcccgugcugaagggcgugaagcugcacuacaccugaggacuagucccuguucccagagcccacuuuuuuuucuuuuuuugaaauaaaauagccugucuuucagaucuaaaaaaaaaaaaaaaaaaaaaaaaaaaaaaaaaaaaaaaaaaaaaaaaaaaaaaaaaaaaaaaaaaaaaaaaaaaaaaaaaaaaaaaaaaaaaaaaaaaa

SEQ ID NO: 25099 - RNA, 4161 nt, Artificial Sequence
  SARS-CoV-2/Wuhan/WIV05/2019__EPI_ISL_402128 spike protein mRNA gc (1-1273)(K986P_V987P_H69del_V70del_D614G)
aggagagggcgcuuggcuugcaaggacccugagcugcggcauugaagcacacccaacccaacucgacugaagucagccucacugaaccggaucugagaaucuucucucucugggcuugccagggcucuccgaaccuagcuagcauccucuucaauuccaacuagaaagcuuaccauguucguguuccuggugcugcugccccuggugagcagccagugcgugaaccugaccacccggacccagcugccaccagccuacaccaacagcuucacccggggcgucuacuaccccgacaagguguuccggagcagcguccugcacagcacccaggaccuguuccugcccuucuucagcaacgugaccugguuccacgccaucagcggcaccaacggcaccaagcgguucgacaaccccgugcugcccuucaacgacggcguguacuucgccagcaccgagaagagcaacaucauccggggcuggaucuucggcaccacccuggacagcaagacccagagccugcugaucgugaauaacgccaccaacguggugaucaaggugugcgaguuccaguucugcaacgaccccuuccugggcguguacuaccacaagaacaacaagagcuggauggagagcgaguuccggguguacagcagcgccaacaacugcaccuucgaguacgugagccagcccuuccugauggaccuggagggcaagcagggcaacuucaagaaccugcgggaguucguguucaagaacaucgacggcuacuucaagaucuacagcaagcacaccccaaucaaccuggugcgggaucugccccagggcuucucagcccuggagccccugguggaccugcccaucggcaucaacaucacccgguuccagacccugcuggcccugcaccggagcuaccugaccccaggcgacagcagcagcggguggacagcaggcgcggcugcuuacuacgugggcuaccugcagccccggaccuuccugcugaaguacaacgagaacggcaccaucaccgacgccguggacugcgcccuggacccucugagcgagaccaagugcacccugaagagcuucaccguggagaagggcaucuaccagaccagcaacuuccgggugcagcccaccgagagcaucgugcgguuccccaacaucaccaaccugugccccuucggcgagguguucaacgccacccgguucgccagcguguacgccuggaaccggaagcggaucagcaacugcguggccgacuacagcgugcuguacaacagcgccagcuucagcaccuucaagugcuacggcgugagccccaccaagcugaacgaccugugcuucaccaacguguacgccgacagcuucgugauccguggcgacgaggugcggcagaucgcacccggccagacaggcaagaucgccgacuacaacuacaagcugcccgacgacuucaccggcugcgugaucgccuggaacagcaacaaccucgacagcaaggugggcggcaacuacaacuaccuguaccggcuguuccggaagagcaaccugaagcccuucgagcgggacaucagcaccgagaucuaccaagccggcuccaccccuugcaacggcguggagggcuucaacugcuacuucccucugcagagcuacggcuuccagcccaccaacggcgugggcuaccagcccuaccgggugguggugcugagcuucgagcugcugcacgccccagccaccguguguggccccaagaagagcaccaaccuggugaagaacaagugcgugaacuucaacuucaacggccuuaccggcaccggcgugcugaccgagagcaacaagaaauuccugcccuuucagcaguucggccgggacaucgccgacaccaccgacgcugugcgggauccccagacccuggagauccuggacaucaccccuugcagcuucggcggcgugagcgugaucaccccaggcaccaacaccagcaaccagguggccgugcuguaccagggcgugaacugcaccgaggugcccguggccauccacgccgaccagcugacacccaccuggcgggucuacagcaccggcagcaacguguuccagacccgggccgguugccugaucggcgccgagcacgugaacaacagcuacgagugcgacauccccaucggcgccggcaucugugccagcuaccagacccagaccaauucaccccggagggcaaggagcguggccagccagagcaucaucgccuacaccaugagccugggcgccgagaacagcguggccuacagcaacaacagcaucgccauccccaccaacuucaccaucagcgugaccaccgagauucugcccgugagcaugaccaagaccagcguggacugcaccauguacaucugcggcgacagcaccgagugcagcaaccugcugcugcaguacggcagcuucugcacccagcugaaccgggcccugaccggcaucgccguggagcaggacaagaacacccaggagguguucgcccaggugaagcagaucuacaagaccccucccaucaaggacuucggcggcuucaacuucagccagauccugcccgaccccagcaagcccagcaagcggagcuucaucgaggaccugcuguucaacaaggugacccuagccgacgccggcuucaucaagcaguacggcgacugccucggcgacauagccgcccgggaccugaucugcgcccagaaguucaacggccugaccgugcugccuccccugcugaccgacgagaugaucgcccaguacaccagcgcccuguuagccggaaccaucaccagcggcuggacuuucggcgcuggagccgcucugcagauccccuucgccaugcagauggccuaccgguucaacggcaucggcgugacccagaacgugcuguacgagaaccagaagcugaucgccaaccaguucaacagcgccaucggcaagauccaggacagccugagcagcaccgcuagcgcccugggcaagcugcaggacguggugaaccagaacgcccaggcccugaacacccuggugaagcagcugagcagcaacuucggcgccaucagcagcgugcugaacgacauccugagccggcuggacccucccgaggccgaggugcagaucgaccggcugaucacuggccggcugcagagccugcagaccuacgugacccagcagcugauccgggccgccgagauucgggccagcgccaaccuggccgccaccaagaugagcgagugcgugcugggccagagcaagcggguggacuucugcggcaagggcuaccaccugaugagcuuuccccagagcgcaccccacggagugguguuccugcacgugaccuacgugcccgcccaggagaagaacuucaccaccgccccagccaucugccacgacggcaaggcccacuuuccccgggagggcguguucgugagcaacggcacccacugguucgugacccagcggaacuucuacgagccccagaucaucaccaccgacaacaccuucgugagcggcaacugcgacguggugaucggcaucgugaacaacaccguguacgauccccugcagcccgagcuggacagcuucaaggaggagcuggacaaguacuucaagaaucacaccagccccgacguggaccugggcgacaucagcggcaucaacgccagcguggugaacauccagaaggagaucgaucggcugaacgagguggccaagaaccugaacgagagccugaucgaccugcaggagcugggcaaguacgagcaguacaucaaguggcccugguacaucuggcugggcuucaucgccggccugaucgccaucgugauggugaccaucaugcugugcugcaugaccagcugcugcagcugccugaagggcuguugcagcugcggcagcugcugcaaguucgacgaggacgacagcgagcccgugcugaagggcgugaagcugcacuacaccugaggacuagucccuguucccagagcccacuuuuuuuucuuuuuuugaaauaaaauagccugucuuucagaucuaaaaaaaaaaaaaaaaaaaaaaaaaaaaaaaaaaaaaaaaaaaaaaaaaaaaaaaaaaaaaaaaaaaaaaaaaaaaaaaaaaaaaaaaaaaaaaaaaaaa

SEQ ID NO: 25100 - RNA, 4167 nt, Artificial Sequence
  SARS-CoV-2/Wuhan/WIV05/2019__EPI_ISL_402128 spike protein mRNA gc (1-1273)(K986P_V987P_Y453F_D614G)
aggagagggcgcuuggcuugcaaggacccugagcugcggcauugaagcacacccaacccaacucgacugaagucagccucacugaaccggaucugagaaucuucucucucugggcuugccagggcucuccgaaccuagcuagcauccucuucaauuccaacuagaaagcuuaccauguucguguuccuggugcugcugccccuggugagcagccagugcgugaaccugaccacccggacccagcugccaccagccuacaccaacagcuucacccggggcgucuacuaccccgacaagguguuccggagcagcguccugcacagcacccaggaccuguuccugcccuucuucagcaacgugaccugguuccacgccauccacgugagcggcaccaacggcaccaagcgguucgacaaccccgugcugcccuucaacgacggcguguacuucgccagcaccgagaagagcaacaucauccggggcuggaucuucggcaccacccuggacagcaagacccagagccugcugaucgugaauaacgccaccaacguggugaucaaggugugcgaguuccaguucugcaacgaccccuuccugggcguguacuaccacaagaacaacaagagcuggauggagagcgaguuccggguguacagcagcgccaacaacugcaccuucgaguacgugagccagcccuuccugauggaccuggagggcaagcagggcaacuucaagaaccugcgggaguucguguucaagaacaucgacggcuacuucaagaucuacagcaagcacaccccaaucaaccuggugcgggaucugccccagggcuucucagcccuggagccccugguggaccugcccaucggcaucaacaucacccgguuccagacccugcuggcccugcaccggagcuaccugaccccaggcgacagcagcagcggguggacagcaggcgcggcugcuuacuacgugggcuaccugcagccccggaccuuccugcugaaguacaacgagaacggcaccaucaccgacgccguggacugcgcccuggacccucugagcgagaccaagugcacccugaagagcuucaccguggagaagggcaucuaccagaccagcaacuuccgggugcagcccaccgagagcaucgugcgguuccccaacaucaccaaccugugccccuucggcgagguguucaacgccacccgguucgccagcguguacgccuggaaccggaagcggaucagcaacugcguggccgacuacagcgugcuguacaacagcgccagcuucagcaccuucaagugcuacggcgugagccccaccaagcugaacgaccugugcuucaccaacguguacgccgacagcuucgugauccguggcgacgaggugcggcagaucgcacccggccagacaggcaagaucgccgacuacaacuacaagcugcccgacgacuucaccggcugcgugaucgccuggaacagcaacaaccucgacagcaaggugggcggcaacuacaacuaccuguuccggcuguuccggaagagcaaccugaagcccuucgagcgggacaucagcaccgagaucuaccaagccggcuccaccccuugcaacggcguggagggcuucaacugcuacuucccucugcagagcuacggcuuccagcccaccaacggcgugggcuaccagcccuaccgggugguggugcugagcuucgagcugcugcacgccccagccaccguguguggccccaagaagagcaccaaccuggugaagaacaagugcgugaacuucaacuucaacggccuuaccggcaccggcgugcugaccgagagcaacaagaaauuccugcccuuucagcaguucggccgggacaucgccgacaccaccgacgcugugcgggauccccagacccuggagauccuggacaucaccccuugcagcuucggcggcgugagcgugaucaccccaggcaccaacaccagcaaccagguggccgugcuguaccagggcgugaacugcaccgaggugcccguggccauccacgccgaccagcugacacccaccuggcgggucuacagcaccggcagcaacguguuccagacccgggccgguugccugaucggcgccgagcacgugaacaacagcuacgagugcgacauccccaucggcgccggcaucugugccagcuaccagacccagaccaauucaccccggagggcaaggagcguggccagccagagcaucaucgccuacaccaugagccugggcgccgagaacagcguggccuacagcaacaacagcaucgccauccccaccaacuucaccaucagcgugaccaccgagauucugcccgugagcaugaccaagaccagcguggacugcaccauguacaucugcggcgacagcaccgagugcagcaaccugcugcugcaguacggcagcuucugcacccagcugaaccgggcccugaccggcaucgccguggagcaggacaagaacacccaggagguguucgcccaggugaagcagaucuacaagaccccucccaucaaggacuucggcggcuucaacuucagccagauccugcccgaccccagcaagcccagcaagcggagcuucaucgaggaccugcuguucaacaaggugacccuagccgacgccggcuucaucaagcaguacggcgacugccucggcgacauagccgcccgggaccugaucugcgcccagaaguucaacggccugaccgugcugccuccccugcugaccgacgagaugaucgcccaguacaccagcgcccuguuagccggaaccaucaccagcggcuggacuuucggcgcuggagccgcucugcagauccccuucgccaugcagauggccuaccgguucaacggcaucggcgugacccagaacgugcuguacgagaaccagaagcugaucgccaaccaguucaacagcgccaucggcaagauccaggacagccugagcagcaccgcuagcgcccugggcaagcugcaggacguggugaaccagaacgcccaggcccugaacacccuggugaagcagcugagcagcaacuucggcgccaucagcagcgugcugaacgacauccugagccggcuggacccucccgaggccgaggugcagaucgaccggcugaucacuggccggcugcagagccugcagaccuacgugacccagcagcugauccgggccgccgagauucgggccagcgccaaccuggccgccaccaagaugagcgagugcgugcugggccagagcaagcggguggacuucugcggcaagggcuaccaccugaugagcuuuccccagagcgcaccccacggagugguguuccugcacgugaccuacgugcccgcccaggagaagaacuucaccaccgccccagccaucugccacgacggcaaggcccacuuuccccgggagggcguguucgugagcaacggcacccacugguucgugacccagcggaacuucuacgagccccagaucaucaccaccgacaacaccuucgugagcggcaacugcgacguggugaucggcaucgugaacaacaccguguacgauccccugcagcccgagcuggacagcuucaaggaggagcuggacaaguacuucaagaaucacaccagccccgacguggaccugggcgacaucagcggcaucaacgccagcguggugaacauccagaaggagaucgaucggcugaacgagguggccaagaaccugaacgagagccugaucgaccugcaggagcugggcaaguacgagcaguacaucaaguggcccugguacaucuggcugggcuucaucgccggccugaucgccaucgugauggugaccaucaugcugugcugcaugaccagcugcugcagcugccugaagggcuguugcagcugcggcagcugcugcaaguucgacgaggacgacagcgagcccgugcugaagggcgugaagcugcacuacaccugaggacuagucccuguucccagagcccacuuuuuuuucuuuuuuugaaauaaaauagccugucuuucagaucuaaaaaaaaaaaaaaaaaaaaaaaaaaaaaaaaaaaaaaaaaaaaaaaaaaaaaaaaaaaaaaaaaaaaaaaaaaaaaaaaaaaaaaaaaaaaaaaaaaaa

SEQ ID NO: 25101 - RNA, 4167 nt, Artificial Sequence
  SARS-CoV-2/Wuhan/WIV05/2019__EPI_ISL_402128 spike protein mRNA gc (1-1273)(K986P_V987P_D614G_I692V)
aggagagggcgcuuggcuugcaaggacccugagcugcggcauugaagcacacccaacccaacucgacugaagucagccucacugaaccggaucugagaaucuucucucucugggcuugccagggcucuccgaaccuagcuagcauccucuucaauuccaacuagaaagcuuaccauguucguguuccuggugcugcugccccuggugagcagccagugcgugaaccugaccacccggacccagcugccaccagccuacaccaacagcuucacccggggcgucuacuaccccgacaagguguuccggagcagcguccugcacagcacccaggaccuguuccugcccuucuucagcaacgugaccugguuccacgccauccacgugagcggcaccaacggcaccaagcgguucgacaaccccgugcugcccuucaacgacggcguguacuucgccagcaccgagaagagcaacaucauccggggcuggaucuucggcaccacccuggacagcaagacccagagccugcugaucgugaauaacgccaccaacguggugaucaaggugugcgaguuccaguucugcaacgaccccuuccugggcguguacuaccacaagaacaacaagagcuggauggagagcgaguuccggguguacagcagcgccaacaacugcaccuucgaguacgugagccagcccuuccugauggaccuggagggcaagcagggcaacuucaagaaccugcgggaguucguguucaagaacaucgacggcuacuucaagaucuacagcaagcacaccccaaucaaccuggugcgggaucugccccagggcuucucagcccuggagccccugguggaccugcccaucggcaucaacaucacccgguuccagacccugcuggcccugcaccggagcuaccugaccccaggcgacagcagcagcggguggacagcaggcgcggcugcuuacuacgugggcuaccugcagccccggaccuuccugcugaaguacaacgagaacggcaccaucaccgacgccguggacugcgcccuggacccucugagcgagaccaagugcacccugaagagcuucaccguggagaagggcaucuaccagaccagcaacuuccgggugcagcccaccgagagcaucgugcgguuccccaacaucaccaaccugugccccuucggcgagguguucaacgccacccgguucgccagcguguacgccuggaaccggaagcggaucagcaacugcguggccgacuacagcgugcuguacaacagcgccagcuucagcaccuucaagugcuacggcgugagccccaccaagcugaacgaccugugcuucaccaacguguacgccgacagcuucgugauccguggcgacgaggugcggcagaucgcacccggccagacaggcaagaucgccgacuacaacuacaagcugcccgacgacuucaccggcugcgugaucgccuggaacagcaacaaccucgacagcaaggugggcggcaacuacaacuaccuguaccggcuguuccggaagagcaaccugaagcccuucgagcgggacaucagcaccgagaucuaccaagccggcuccaccccuugcaacggcguggagggcuucaacugcuacuucccucugcagagcuacggcuuccagcccaccaacggcgugggcuaccagcccuaccgggugguggugcugagcuucgagcugcugcacgccccagccaccguguguggccccaagaagagcaccaaccuggugaagaacaagugcgugaacuucaacuucaacggccuuaccggcaccggcgugcugaccgagagcaacaagaaauuccugcccuuucagcaguucggccgggacaucgccgacaccaccgacgcugugcgggauccccagacccuggagauccuggacaucaccccuugcagcuucggcggcgugagcgugaucaccccaggcaccaacaccagcaaccagguggccgugcuguaccagggcgugaacugcaccgaggugcccguggccauccacgccgaccagcugacacccaccuggcgggucuacagcaccggcagcaacguguuccagacccgggccgguugccugaucggcgccgagcacgugaacaacagcuacgagugcgacauccccaucggcgccggcaucugugccagcuaccagacccagaccaauucaccccggagggcaaggagcguggccagccagagcgugaucgccuacaccaugagccugggcgccgagaacagcguggccuacagcaacaacagcaucgccauccccaccaacuucaccaucagcgugaccaccgagauucugcccgugagcaugaccaagaccagcguggacugcaccauguacaucugcggcgacagcaccgagugcagcaaccugcugcugcaguacggcagcuucugcacccagcugaaccgggcccugaccggcaucgccguggagcaggacaagaacacccaggagguguucgcccaggugaagcagaucuacaagaccccucccaucaaggacuucggcggcuucaacuucagccagauccugcccgaccccagcaagcccagcaagcggagcuucaucgaggaccugcuguucaacaaggugacccuagccgacgccggcuucaucaagcaguacggcgacugccucggcgacauagccgcccgggaccugaucugcgcccagaaguucaacggccugaccgugcugccuccccugcugaccgacgagaugaucgcccaguacaccagcgcccuguuagccggaaccaucaccagcggcuggacuuucggcgcuggagccgcucugcagauccccuucgccaugcagauggccuaccgguucaacggcaucggcgugacccagaacgugcuguacgagaaccagaagcugaucgccaaccaguucaacagcgccaucggcaagauccaggacagccugagcagcaccgcuagcgcccugggcaagcugcaggacguggugaaccagaacgcccaggcccugaacacccuggugaagcagcugagcagcaacuucggcgccaucagcagcgugcugaacgacauccugagccggcuggacccucccgaggccgaggugcagaucgaccggcugaucacuggccggcugcagagccugcagaccuacgugacccagcagcugauccgggccgccgagauucgggccagcgccaaccuggccgccaccaagaugagcgagugcgugcugggccagagcaagcggguggacuucugcggcaagggcuaccaccugaugagcuuuccccagagcgcaccccacggagugguguuccugcacgugaccuacgugcccgcccaggagaagaacuucaccaccgccccagccaucugccacgacggcaaggcccacuuuccccgggagggcguguucgugagcaacggcacccacugguucgugacccagcggaacuucuacgagccccagaucaucaccaccgacaacaccuucgugagcggcaacugcgacguggugaucggcaucgugaacaacaccguguacgauccccugcagcccgagcuggacagcuucaaggaggagcuggacaaguacuucaagaaucacaccagccccgacguggaccugggcgacaucagcggcaucaacgccagcguggugaacauccagaaggagaucgaucggcugaacgagguggccaagaaccugaacgagagccugaucgaccugcaggagcugggcaaguacgagcaguacaucaaguggcccugguacaucuggcugggcuucaucgccggccugaucgccaucgugauggugaccaucaugcugugcugcaugaccagcugcugcagcugccugaagggcuguugcagcugcggcagcugcugcaaguucgacgaggacgacagcgagcccgugcugaagggcgugaagcugcacuacaccugaggacuagucccuguucccagagcccacuuuuuuuucuuuuuuugaaauaaaauagccugucuuucagaucuaaaaaaaaaaaaaaaaaaaaaaaaaaaaaaaaaaaaaaaaaaaaaaaaaaaaaaaaaaaaaaaaaaaaaaaaaaaaaaaaaaaaaaaaaaaaaaaaaaaa

SEQ ID NO: 25102 - RNA, 4167 nt, Artificial Sequence
  SARS-CoV-2/Wuhan/WIV05/2019__EPI_ISL_402128 spike protein mRNA gc (1-1273)(K986P_V987P_D614G_M1229I)
aggagagggcgcuuggcuugcaaggacccugagcugcggcauugaagcacacccaacccaacucgacugaagucagccucacugaaccggaucugagaaucuucucucucugggcuugccagggcucuccgaaccuagcuagcauccucuucaauuccaacuagaaagcuuaccauguucguguuccuggugcugcugccccuggugagcagccagugcgugaaccugaccacccggacccagcugccaccagccuacaccaacagcuucacccggggcgucuacuaccccgacaagguguuccggagcagcguccugcacagcacccaggaccuguuccugcccuucuucagcaacgugaccugguuccacgccauccacgugagcggcaccaacggcaccaagcgguucgacaaccccgugcugcccuucaacgacggcguguacuucgccagcaccgagaagagcaacaucauccggggcuggaucuucggcaccacccuggacagcaagacccagagccugcugaucgugaauaacgccaccaacguggugaucaaggugugcgaguuccaguucugcaacgaccccuuccugggcguguacuaccacaagaacaacaagagcuggauggagagcgaguuccggguguacagcagcgccaacaacugcaccuucgaguacgugagccagcccuuccugauggaccuggagggcaagcagggcaacuucaagaaccugcgggaguucguguucaagaacaucgacggcuacuucaagaucuacagcaagcacaccccaaucaaccuggugcgggaucugccccagggcuucucagcccuggagccccugguggaccugcccaucggcaucaacaucacccgguuccagacccugcuggcccugcaccggagcuaccugaccccaggcgacagcagcagcggguggacagcaggcgcggcugcuuacuacgugggcuaccugcagccccggaccuuccugcugaaguacaacgagaacggcaccaucaccgacgccguggacugcgcccuggacccucugagcgagaccaagugcacccugaagagcuucaccguggagaagggcaucuaccagaccagcaacuuccgggugcagcccaccgagagcaucgugcgguuccccaacaucaccaaccugugccccuucggcgagguguucaacgccacccgguucgccagcguguacgccuggaaccggaagcggaucagcaacugcguggccgacuacagcgugcuguacaacagcgccagcuucagcaccuucaagugcuacggcgugagccccaccaagcugaacgaccugugcuucaccaacguguacgccgacagcuucgugauccguggcgacgaggugcggcagaucgcacccggccagacaggcaagaucgccgacuacaacuacaagcugcccgacgacuucaccggcugcgugaucgccuggaacagcaacaaccucgacagcaaggugggcggcaacuacaacuaccuguaccggcuguuccggaagagcaaccugaagcccuucgagcgggacaucagcaccgagaucuaccaagccggcuccaccccuugcaacggcguggagggcuucaacugcuacuucccucugcagagcuacggcuuccagcccaccaacggcgugggcuaccagcccuaccgggugguggugcugagcuucgagcugcugcacgccccagccaccguguguggccccaagaagagcaccaaccuggugaagaacaagugcgugaacuucaacuucaacggccuuaccggcaccggcgugcugaccgagagcaacaagaaauuccugcccuuucagcaguucggccgggacaucgccgacaccaccgacgcugugcgggauccccagacccuggagauccuggacaucaccccuugcagcuucggcggcgugagcgugaucaccccaggcaccaacaccagcaaccagguggccgugcuguaccagggcgugaacugcaccgaggugcccguggccauccacgccgaccagcugacacccaccuggcgggucuacagcaccggcagcaacguguuccagacccgggccgguugccugaucggcgccgagcacgugaacaacagcuacgagugcgacauccccaucggcgccggcaucugugccagcuaccagacccagaccaauucaccccggagggcaaggagcguggccagccagagcaucaucgccuacaccaugagccugggcgccgagaacagcguggccuacagcaacaacagcaucgccauccccaccaacuucaccaucagcgugaccaccgagauucugcccgugagcaugaccaagaccagcguggacugcaccauguacaucugcggcgacagcaccgagugcagcaaccugcugcugcaguacggcagcuucugcacccagcugaaccgggcccugaccggcaucgccguggagcaggacaagaacacccaggagguguucgcccaggugaagcagaucuacaagaccccucccaucaaggacuucggcggcuucaacuucagccagauccugcccgaccccagcaagcccagcaagcggagcuucaucgaggaccugcuguucaacaaggugacccuagccgacgccggcuucaucaagcaguacggcgacugccucggcgacauagccgcccgggaccugaucugcgcccagaaguucaacggccugaccgugcugccuccccugcugaccgacgagaugaucgcccaguacaccagcgcccuguuagccggaaccaucaccagcggcuggacuuucggcgcuggagccgcucugcagauccccuucgccaugcagauggccuaccgguucaacggcaucggcgugacccagaacgugcuguacgagaaccagaagcugaucgccaaccaguucaacagcgccaucggcaagauccaggacagccugagcagcaccgcuagcgcccugggcaagcugcaggacguggugaaccagaacgcccaggcccugaacacccuggugaagcagcugagcagcaacuucggcgccaucagcagcgugcugaacgacauccugagccggcuggacccucccgaggccgaggugcagaucgaccggcugaucacuggccggcugcagagccugcagaccuacgugacccagcagcugauccgggccgccgagauucgggccagcgccaaccuggccgccaccaagaugagcgagugcgugcugggccagagcaagcggguggacuucugcggcaagggcuaccaccugaugagcuuuccccagagcgcaccccacggagugguguuccugcacgugaccuacgugcccgcccaggagaagaacuucaccaccgccccagccaucugccacgacggcaaggcccacuuuccccgggagggcguguucgugagcaacggcacccacugguucgugacccagcggaacuucuacgagccccagaucaucaccaccgacaacaccuucgugagcggcaacugcgacguggugaucggcaucgugaacaacaccguguacgauccccugcagcccgagcuggacagcuucaaggaggagcuggacaaguacuucaagaaucacaccagccccgacguggaccugggcgacaucagcggcaucaacgccagcguggugaacauccagaaggagaucgaucggcugaacgagguggccaagaaccugaacgagagccugaucgaccugcaggagcugggcaaguacgagcaguacaucaaguggcccugguacaucuggcugggcuucaucgccggccugaucgccaucgugaucgugaccaucaugcugugcugcaugaccagcugcugcagcugccugaagggcuguugcagcugcggcagcugcugcaaguucgacgaggacgacagcgagcccgugcugaagggcgugaagcugcacuacaccugaggacuagucccuguucccagagcccacuuuuuuuucuuuuuuugaaauaaaauagccugucuuucagaucuaaaaaaaaaaaaaaaaaaaaaaaaaaaaaaaaaaaaaaaaaaaaaaaaaaaaaaaaaaaaaaaaaaaaaaaaaaaaaaaaaaaaaaaaaaaaaaaaaaaa

SEQ ID NO: 25103 - RNA, 4161 nt, Artificial Sequence
  SARS-CoV-2/Wuhan/WIV05/2019__EPI_ISL_402128 spike protein mRNA gc (1-1273)(K986P_V987P_H69del_V70del_A222V_Y453F_S477N_D614G_I692V)
aggagagggcgcuuggcuugcaaggacccugagcugcggcauugaagcacacccaacccaacucgacugaagucagccucacugaaccggaucugagaaucuucucucucugggcuugccagggcucuccgaaccuagcuagcauccucuucaauuccaacuagaaagcuuaccauguucguguuccuggugcugcugccccuggugagcagccagugcgugaaccugaccacccggacccagcugccaccagccuacaccaacagcuucacccggggcgucuacuaccccgacaagguguuccggagcagcguccugcacagcacccaggaccuguuccugcccuucuucagcaacgugaccugguuccacgccaucagcggcaccaacggcaccaagcgguucgacaaccccgugcugcccuucaacgacggcguguacuucgccagcaccgagaagagcaacaucauccggggcuggaucuucggcaccacccuggacagcaagacccagagccugcugaucgugaauaacgccaccaacguggugaucaaggugugcgaguuccaguucugcaacgaccccuuccugggcguguacuaccacaagaacaacaagagcuggauggagagcgaguuccggguguacagcagcgccaacaacugcaccuucgaguacgugagccagcccuuccugauggaccuggagggcaagcagggcaacuucaagaaccugcgggaguucguguucaagaacaucgacggcuacuucaagaucuacagcaagcacaccccaaucaaccuggugcgggaucugccccagggcuucucagugcuggagccccugguggaccugcccaucggcaucaacaucacccgguuccagacccugcuggcccugcaccggagcuaccugaccccaggcgacagcagcagcggguggacagcaggcgcggcugcuuacuacgugggcuaccugcagccccggaccuuccugcugaaguacaacgagaacggcaccaucaccgacgccguggacugcgcccuggacccucugagcgagaccaagugcacccugaagagcuucaccguggagaagggcaucuaccagaccagcaacuuccgggugcagcccaccgagagcaucgugcgguuccccaacaucaccaaccugugccccuucggcgagguguucaacgccacccgguucgccagcguguacgccuggaaccggaagcggaucagcaacugcguggccgacuacagcgugcuguacaacagcgccagcuucagcaccuucaagugcuacggcgugagccccaccaagcugaacgaccugugcuucaccaacguguacgccgacagcuucgugauccguggcgacgaggugcggcagaucgcacccggccagacaggcaagaucgccgacuacaacuacaagcugcccgacgacuucaccggcugcgugaucgccuggaacagcaacaaccucgacagcaaggugggcggcaacuacaacuaccuguuccggcuguuccggaagagcaaccugaagcccuucgagcgggacaucagcaccgagaucuaccaagccggcaacaccccuugcaacggcguggagggcuucaacugcuacuucccucugcagagcuacggcuuccagcccaccaacggcgugggcuaccagcccuaccgggugguggugcugagcuucgagcugcugcacgccccagccaccguguguggccccaagaagagcaccaaccuggugaagaacaagugcgugaacuucaacuucaacggccuuaccggcaccggcgugcugaccgagagcaacaagaaauuccugcccuuucagcaguucggccgggacaucgccgacaccaccgacgcugugcgggauccccagacccuggagauccuggacaucaccccuugcagcuucggcggcgugagcgugaucaccccaggcaccaacaccagcaaccagguggccgugcuguaccagggcgugaacugcaccgaggugcccguggccauccacgccgaccagcugacacccaccuggcgggucuacagcaccggcagcaacguguuccagacccgggccgguugccugaucggcgccgagcacgugaacaacagcuacgagugcgacauccccaucggcgccggcaucugugccagcuaccagacccagaccaauucaccccggagggcaaggagcguggccagccagagcgugaucgccuacaccaugagccugggcgccgagaacagcguggccuacagcaacaacagcaucgccauccccaccaacuucaccaucagcgugaccaccgagauucugcccgugagcaugaccaagaccagcguggacugcaccauguacaucugcggcgacagcaccgagugcagcaaccugcugcugcaguacggcagcuucugcacccagcugaaccgggcccugaccggcaucgccguggagcaggacaagaacacccaggagguguucgcccaggugaagcagaucuacaagaccccucccaucaaggacuucggcggcuucaacuucagccagauccugcccgaccccagcaagcccagcaagcggagcuucaucgaggaccugcuguucaacaaggugacccuagccgacgccggcuucaucaagcaguacggcgacugccucggcgacauagccgcccgggaccugaucugcgcccagaaguucaacggccugaccgugcugccuccccugcugaccgacgagaugaucgcccaguacaccagcgcccuguuagccggaaccaucaccagcggcuggacuuucggcgcuggagccgcucugcagauccccuucgccaugcagauggccuaccgguucaacggcaucggcgugacccagaacgugcuguacgagaaccagaagcugaucgccaaccaguucaacagcgccaucggcaagauccaggacagccugagcagcaccgcuagcgcccugggcaagcugcaggacguggugaaccagaacgcccaggcccugaacacccuggugaagcagcugagcagcaacuucggcgccaucagcagcgugcugaacgacauccugagccggcuggacccucccgaggccgaggugcagaucgaccggcugaucacuggccggcugcagagccugcagaccuacgugacccagcagcugauccgggccgccgagauucgggccagcgccaaccuggccgccaccaagaugagcgagugcgugcugggccagagcaagcggguggacuucugcggcaagggcuaccaccugaugagcuuuccccagagcgcaccccacggagugguguuccugcacgugaccuacgugcccgcccaggagaagaacuucaccaccgccccagccaucugccacgacggcaaggcccacuuuccccgggagggcguguucgugagcaacggcacccacugguucgugacccagcggaacuucuacgagccccagaucaucaccaccgacaacaccuucgugagcggcaacugcgacguggugaucggcaucgugaacaacaccguguacgauccccugcagcccgagcuggacagcuucaaggaggagcuggacaaguacuucaagaaucacaccagccccgacguggaccugggcgacaucagcggcaucaacgccagcguggugaacauccagaaggagaucgaucggcugaacgagguggccaagaaccugaacgagagccugaucgaccugcaggagcugggcaaguacgagcaguacaucaaguggcccugguacaucuggcugggcuucaucgccggccugaucgccaucgugauggugaccaucaugcugugcugcaugaccagcugcugcagcugccugaagggcuguugcagcugcggcagcugcugcaaguucgacgaggacgacagcgagcccgugcugaagggcgugaagcugcacuacaccugaggacuagucccuguucccagagcccacuuuuuuuucuuuuuuugaaauaaaauagccugucuuucagaucuaaaaaaaaaaaaaaaaaaaaaaaaaaaaaaaaaaaaaaaaaaaaaaaaaaaaaaaaaaaaaaaaaaaaaaaaaaaaaaaaaaaaaaaaaaaaaaaaaaaa

SEQ ID NO: 25104 - RNA, 4161 nt, Artificial Sequence
  SARS-CoV-2/Wuhan/WIV05/2019__EPI_ISL_402128 spike protein mRNA gc (1-1273)(K986P_V987P_H69del_V70del_Y453F_D614G_I692V_M1229I)
aggagagggcgcuuggcuugcaaggacccugagcugcggcauugaagcacacccaacccaacucgacugaagucagccucacugaaccggaucugagaaucuucucucucugggcuugccagggcucuccgaaccuagcuagcauccucuucaauuccaacuagaaagcuuaccauguucguguuccuggugcugcugccccuggugagcagccagugcgugaaccugaccacccggacccagcugccaccagccuacaccaacagcuucacccggggcgucuacuaccccgacaagguguuccggagcagcguccugcacagcacccaggaccuguuccugcccuucuucagcaacgugaccugguuccacgccaucagcggcaccaacggcaccaagcgguucgacaaccccgugcugcccuucaacgacggcguguacuucgccagcaccgagaagagcaacaucauccggggcuggaucuucggcaccacccuggacagcaagacccagagccugcugaucgugaauaacgccaccaacguggugaucaaggugugcgaguuccaguucugcaacgaccccuuccugggcguguacuaccacaagaacaacaagagcuggauggagagcgaguuccggguguacagcagcgccaacaacugcaccuucgaguacgugagccagcccuuccugauggaccuggagggcaagcagggcaacuucaagaaccugcgggaguucguguucaagaacaucgacggcuacuucaagaucuacagcaagcacaccccaaucaaccuggugcgggaucugccccagggcuucucagcccuggagccccugguggaccugcccaucggcaucaacaucacccgguuccagacccugcuggcccugcaccggagcuaccugaccccaggcgacagcagcagcggguggacagcaggcgcggcugcuuacuacgugggcuaccugcagccccggaccuuccugcugaaguacaacgagaacggcaccaucaccgacgccguggacugcgcccuggacccucugagcgagaccaagugcacccugaagagcuucaccguggagaagggcaucuaccagaccagcaacuuccgggugcagcccaccgagagcaucgugcgguuccccaacaucaccaaccugugccccuucggcgagguguucaacgccacccgguucgccagcguguacgccuggaaccggaagcggaucagcaacugcguggccgacuacagcgugcuguacaacagcgccagcuucagcaccuucaagugcuacggcgugagccccaccaagcugaacgaccugugcuucaccaacguguacgccgacagcuucgugauccguggcgacgaggugcggcagaucgcacccggccagacaggcaagaucgccgacuacaacuacaagcugcccgacgacuucaccggcugcgugaucgccuggaacagcaacaaccucgacagcaaggugggcggcaacuacaacuaccuguuccggcuguuccggaagagcaaccugaagcccuucgagcgggacaucagcaccgagaucuaccaagccggcuccaccccuugcaacggcguggagggcuucaacugcuacuucccucugcagagcuacggcuuccagcccaccaacggcgugggcuaccagcccuaccgggugguggugcugagcuucgagcugcugcacgccccagccaccguguguggccccaagaagagcaccaaccuggugaagaacaagugcgugaacuucaacuucaacggccuuaccggcaccggcgugcugaccgagagcaacaagaaauuccugcccuuucagcaguucggccgggacaucgccgacaccaccgacgcugugcgggauccccagacccuggagauccuggacaucaccccuugcagcuucggcggcgugagcgugaucaccccaggcaccaacaccagcaaccagguggccgugcuguaccagggcgugaacugcaccgaggugcccguggccauccacgccgaccagcugacacccaccuggcgggucuacagcaccggcagcaacguguuccagacccgggccgguugccugaucggcgccgagcacgugaacaacagcuacgagugcgacauccccaucggcgccggcaucugugccagcuaccagacccagaccaauucaccccggagggcaaggagcguggccagccagagcgugaucgccuacaccaugagccugggcgccgagaacagcguggccuacagcaacaacagcaucgccauccccaccaacuucaccaucagcgugaccaccgagauucugcccgugagcaugaccaagaccagcguggacugcaccauguacaucugcggcgacagcaccgagugcagcaaccugcugcugcaguacggcagcuucugcacccagcugaaccgggcccugaccggcaucgccguggagcaggacaagaacacccaggagguguucgcccaggugaagcagaucuacaagaccccucccaucaaggacuucggcggcuucaacuucagccagauccugcccgaccccagcaagcccagcaagcggagcuucaucgaggaccugcuguucaacaaggugacccuagccgacgccggcuucaucaagcaguacggcgacugccucggcgacauagccgcccgggaccugaucugcgcccagaaguucaacggccugaccgugcugccuccccugcugaccgacgagaugaucgcccaguacaccagcgcccuguuagccggaaccaucaccagcggcuggacuuucggcgcuggagccgcucugcagauccccuucgccaugcagauggccuaccgguucaacggcaucggcgugacccagaacgugcuguacgagaaccagaagcugaucgccaaccaguucaacagcgccaucggcaagauccaggacagccugagcagcaccgcuagcgcccugggcaagcugcaggacguggugaaccagaacgcccaggcccugaacacccuggugaagcagcugagcagcaacuucggcgccaucagcagcgugcugaacgacauccugagccggcuggacccucccgaggccgaggugcagaucgaccggcugaucacuggccggcugcagagccugcagaccuacgugacccagcagcugauccgggccgccgagauucgggccagcgccaaccuggccgccaccaagaugagcgagugcgugcugggccagagcaagcggguggacuucugcggcaagggcuaccaccugaugagcuuuccccagagcgcaccccacggagugguguuccugcacgugaccuacgugcccgcccaggagaagaacuucaccaccgccccagccaucugccacgacggcaaggcccacuuuccccgggagggcguguucgugagcaacggcacccacugguucgugacccagcggaacuucuacgagccccagaucaucaccaccgacaacaccuucgugagcggcaacugcgacguggugaucggcaucgugaacaacaccguguacgauccccugcagcccgagcuggacagcuucaaggaggagcuggacaaguacuucaagaaucacaccagccccgacguggaccugggcgacaucagcggcaucaacgccagcguggugaacauccagaaggagaucgaucggcugaacgagguggccaagaaccugaacgagagccugaucgaccugcaggagcugggcaaguacgagcaguacaucaaguggcccugguacaucuggcugggcuucaucgccggccugaucgccaucgugaucgugaccaucaugcugugcugcaugaccagcugcugcagcugccugaagggcuguugcagcugcggcagcugcugcaaguucgacgaggacgacagcgagcccgugcugaagggcgugaagcugcacuacaccugaggacuagucccuguucccagagcccacuuuuuuuucuuuuuuugaaauaaaauagccugucuuucagaucuaaaaaaaaaaaaaaaaaaaaaaaaaaaaaaaaaaaaaaaaaaaaaaaaaaaaaaaaaaaaaaaaaaaaaaaaaaaaaaaaaaaaaaaaaaaaaaaaaaaa

SEQ ID NO: 25105 - RNA, 4158 nt, Artificial Sequence
  SARS-CoV-2/Wuhan/WIV05/2019__EPI_ISL_402128 spike protein mRNA gc (1-1273)(K986P_V987P_K986P_V987P_H69del_V70del_Y144del_N501Y_A570 D_D614G_P681H_T716I_S982A_D1118H)
aggagagggcgcuuggcuugcaaggacccugagcugcggcauugaagcacacccaacccaacucgacugaagucagccucacugaaccggaucugagaaucuucucucucugggcuugccagggcucuccgaaccuagcuagcauccucuucaauuccaacuagaaagcuuaccauguucguguuccuggugcugcugccccuggugagcagccagugcgugaaccugaccacccggacccagcugccaccagccuacaccaacagcuucacccggggcgucuacuaccccgacaagguguuccggagcagcguccugcacagcacccaggaccuguuccugcccuucuucagcaacgugaccugguuccacgccaucagcggcaccaacggcaccaagcgguucgacaaccccgugcugcccuucaacgacggcguguacuucgccagcaccgagaagagcaacaucauccggggcuggaucuucggcaccacccuggacagcaagacccagagccugcugaucgugaauaacgccaccaacguggugaucaaggugugcgaguuccaguucugcaacgaccccuuccugggcguguaccacaagaacaacaagagcuggauggagagcgaguuccggguguacagcagcgccaacaacugcaccuucgaguacgugagccagcccuuccugauggaccuggagggcaagcagggcaacuucaagaaccugcgggaguucguguucaagaacaucgacggcuacuucaagaucuacagcaagcacaccccaaucaaccuggugcgggaucugccccagggcuucucagcccuggagccccugguggaccugcccaucggcaucaacaucacccgguuccagacccugcuggcccugcaccggagcuaccugaccccaggcgacagcagcagcggguggacagcaggcgcggcugcuuacuacgugggcuaccugcagccccggaccuuccugcugaaguacaacgagaacggcaccaucaccgacgccguggacugcgcccuggacccucugagcgagaccaagugcacccugaagagcuucaccguggagaagggcaucuaccagaccagcaacuuccgggugcagcccaccgagagcaucgugcgguuccccaacaucaccaaccugugccccuucggcgagguguucaacgccacccgguucgccagcguguacgccuggaaccggaagcggaucagcaacugcguggccgacuacagcgugcuguacaacagcgccagcuucagcaccuucaagugcuacggcgugagccccaccaagcugaacgaccugugcuucaccaacguguacgccgacagcuucgugauccguggcgacgaggugcggcagaucgcacccggccagacaggcaagaucgccgacuacaacuacaagcugcccgacgacuucaccggcugcgugaucgccuggaacagcaacaaccucgacagcaaggugggcggcaacuacaacuaccuguaccggcuguuccggaagagcaaccugaagcccuucgagcgggacaucagcaccgagaucuaccaagccggcuccaccccuugcaacggcguggagggcuucaacugcuacuucccucugcagagcuacggcuuccagcccaccuacggcgugggcuaccagcccuaccgggugguggugcugagcuucgagcugcugcacgccccagccaccguguguggccccaagaagagcaccaaccuggugaagaacaagugcgugaacuucaacuucaacggccuuaccggcaccggcgugcugaccgagagcaacaagaaauuccugcccuuucagcaguucggccgggacaucgacgacaccaccgacgcugugcgggauccccagacccuggagauccuggacaucaccccuugcagcuucggcggcgugagcgugaucaccccaggcaccaacaccagcaaccagguggccgugcuguaccagggcgugaacugcaccgaggugcccguggccauccacgccgaccagcugacacccaccuggcgggucuacagcaccggcagcaacguguuccagacccgggccgguugccugaucggcgccgagcacgugaacaacagcuacgagugcgacauccccaucggcgccggcaucugugccagcuaccagacccagaccaauucacaccggagggcaaggagcguggccagccagagcaucaucgccuacaccaugagccugggcgccgagaacagcguggccuacagcaacaacagcaucgccauccccaucaacuucaccaucagcgugaccaccgagauucugcccgugagcaugaccaagaccagcguggacugcaccauguacaucugcggcgacagcaccgagugcagcaaccugcugcugcaguacggcagcuucugcacccagcugaaccgggcccugaccggcaucgccguggagcaggacaagaacacccaggagguguucgcccaggugaagcagaucuacaagaccccucccaucaaggacuucggcggcuucaacuucagccagauccugcccgaccccagcaagcccagcaagcggagcuucaucgaggaccugcuguucaacaaggugacccuagccgacgccggcuucaucaagcaguacggcgacugccucggcgacauagccgcccgggaccugaucugcgcccagaaguucaacggccugaccgugcugccuccccugcugaccgacgagaugaucgcccaguacaccagcgcccuguuagccggaaccaucaccagcggcuggacuuucggcgcuggagccgcucugcagauccccuucgccaugcagauggccuaccgguucaacggcaucggcgugacccagaacgugcuguacgagaaccagaagcugaucgccaaccaguucaacagcgccaucggcaagauccaggacagccugagcagcaccgcuagcgcccugggcaagcugcaggacguggugaaccagaacgcccaggcccugaacacccuggugaagcagcugagcagcaacuucggcgccaucagcagcgugcugaacgacauccuggcccggcuggacccucccgaggccgaggugcagaucgaccggcugaucacuggccggcugcagagccugcagaccuacgugacccagcagcugauccgggccgccgagauucgggccagcgccaaccuggccgccaccaagaugagcgagugcgugcugggccagagcaagcggguggacuucugcggcaagggcuaccaccugaugagcuuuccccagagcgcaccccacggagugguguuccugcacgugaccuacgugcccgcccaggagaagaacuucaccaccgccccagccaucugccacgacggcaaggcccacuuuccccgggagggcguguucgugagcaacggcacccacugguucgugacccagcggaacuucuacgagccccagaucaucaccacccacaacaccuucgugagcggcaacugcgacguggugaucggcaucgugaacaacaccguguacgauccccugcagcccgagcuggacagcuucaaggaggagcuggacaaguacuucaagaaucacaccagccccgacguggaccugggcgacaucagcggcaucaacgccagcguggugaacauccagaaggagaucgaucggcugaacgagguggccaagaaccugaacgagagccugaucgaccugcaggagcugggcaaguacgagcaguacaucaaguggcccugguacaucuggcugggcuucaucgccggccugaucgccaucgugauggugaccaucaugcugugcugcaugaccagcugcugcagcugccugaagggcuguugcagcugcggcagcugcugcaaguucgacgaggacgacagcgagcccgugcugaagggcgugaagcugcacuacaccugaggacuagucccuguucccagagcccacuuuuuuuucuuuuuuugaaauaaaauagccugucuuucagaucuaaaaaaaaaaaaaaaaaaaaaaaaaaaaaaaaaaaaaaaaaaaaaaaaaaaaaaaaaaaaaaaaaaaaaaaaaaaaaaaaaaaaaaaaaaaaaaaaaaaa

SEQ ID NO: 25106 - RNA, 4167 nt, Artificial Sequence
  SARS-CoV-2/Wuhan/WIV05/2019__EPI_ISL_402128 spike protein mRNA gc (1-1273)(K986P_V987P_K986P_V987P_K417N_E484K_N501Y_D614G)
aggagagggcgcuuggcuugcaaggacccugagcugcggcauugaagcacacccaacccaacucgacugaagucagccucacugaaccggaucugagaaucuucucucucugggcuugccagggcucuccgaaccuagcuagcauccucuucaauuccaacuagaaagcuuaccauguucguguuccuggugcugcugccccuggugagcagccagugcgugaaccugaccacccggacccagcugccaccagccuacaccaacagcuucacccggggcgucuacuaccccgacaagguguuccggagcagcguccugcacagcacccaggaccuguuccugcccuucuucagcaacgugaccugguuccacgccauccacgugagcggcaccaacggcaccaagcgguucgacaaccccgugcugcccuucaacgacggcguguacuucgccagcaccgagaagagcaacaucauccggggcuggaucuucggcaccacccuggacagcaagacccagagccugcugaucgugaauaacgccaccaacguggugaucaaggugugcgaguuccaguucugcaacgaccccuuccugggcguguacuaccacaagaacaacaagagcuggauggagagcgaguuccggguguacagcagcgccaacaacugcaccuucgaguacgugagccagcccuuccugauggaccuggagggcaagcagggcaacuucaagaaccugcgggaguucguguucaagaacaucgacggcuacuucaagaucuacagcaagcacaccccaaucaaccuggugcgggaucugccccagggcuucucagcccuggagccccugguggaccugcccaucggcaucaacaucacccgguuccagacccugcuggcccugcaccggagcuaccugaccccaggcgacagcagcagcggguggacagcaggcgcggcugcuuacuacgugggcuaccugcagccccggaccuuccugcugaaguacaacgagaacggcaccaucaccgacgccguggacugcgcccuggacccucugagcgagaccaagugcacccugaagagcuucaccguggagaagggcaucuaccagaccagcaacuuccgggugcagcccaccgagagcaucgugcgguuccccaacaucaccaaccugugccccuucggcgagguguucaacgccacccgguucgccagcguguacgccuggaaccggaagcggaucagcaacugcguggccgacuacagcgugcuguacaacagcgccagcuucagcaccuucaagugcuacggcgugagccccaccaagcugaacgaccugugcuucaccaacguguacgccgacagcuucgugauccguggcgacgaggugcggcagaucgcacccggccagacaggcaacaucgccgacuacaacuacaagcugcccgacgacuucaccggcugcgugaucgccuggaacagcaacaaccucgacagcaaggugggcggcaacuacaacuaccuguaccggcuguuccggaagagcaaccugaagcccuucgagcgggacaucagcaccgagaucuaccaagccggcuccaccccuugcaacggcgugaagggcuucaacugcuacuucccucugcagagcuacggcuuccagcccaccuacggcgugggcuaccagcccuaccgggugguggugcugagcuucgagcugcugcacgccccagccaccguguguggccccaagaagagcaccaaccuggugaagaacaagugcgugaacuucaacuucaacggccuuaccggcaccggcgugcugaccgagagcaacaagaaauuccugcccuuucagcaguucggccgggacaucgccgacaccaccgacgcugugcgggauccccagacccuggagauccuggacaucaccccuugcagcuucggcggcgugagcgugaucaccccaggcaccaacaccagcaaccagguggccgugcuguaccagggcgugaacugcaccgaggugcccguggccauccacgccgaccagcugacacccaccuggcgggucuacagcaccggcagcaacguguuccagacccgggccgguugccugaucggcgccgagcacgugaacaacagcuacgagugcgacauccccaucggcgccggcaucugugccagcuaccagacccagaccaauucaccccggagggcaaggagcguggccagccagagcaucaucgccuacaccaugagccugggcgccgagaacagcguggccuacagcaacaacagcaucgccauccccaccaacuucaccaucagcgugaccaccgagauucugcccgugagcaugaccaagaccagcguggacugcaccauguacaucugcggcgacagcaccgagugcagcaaccugcugcugcaguacggcagcuucugcacccagcugaaccgggcccugaccggcaucgccguggagcaggacaagaacacccaggagguguucgcccaggugaagcagaucuacaagaccccucccaucaaggacuucggcggcuucaacuucagccagauccugcccgaccccagcaagcccagcaagcggagcuucaucgaggaccugcuguucaacaaggugacccuagccgacgccggcuucaucaagcaguacggcgacugccucggcgacauagccgcccgggaccugaucugcgcccagaaguucaacggccugaccgugcugccuccccugcugaccgacgagaugaucgcccaguacaccagcgcccuguuagccggaaccaucaccagcggcuggacuuucggcgcuggagccgcucugcagauccccuucgccaugcagauggccuaccgguucaacggcaucggcgugacccagaacgugcuguacgagaaccagaagcugaucgccaaccaguucaacagcgccaucggcaagauccaggacagccugagcagcaccgcuagcgcccugggcaagcugcaggacguggugaaccagaacgcccaggcccugaacacccuggugaagcagcugagcagcaacuucggcgccaucagcagcgugcugaacgacauccugagccggcuggacccucccgaggccgaggugcagaucgaccggcugaucacuggccggcugcagagccugcagaccuacgugacccagcagcugauccgggccgccgagauucgggccagcgccaaccuggccgccaccaagaugagcgagugcgugcugggccagagcaagcggguggacuucugcggcaagggcuaccaccugaugagcuuuccccagagcgcaccccacggagugguguuccugcacgugaccuacgugcccgcccaggagaagaacuucaccaccgccccagccaucugccacgacggcaaggcccacuuuccccgggagggcguguucgugagcaacggcacccacugguucgugacccagcggaacuucuacgagccccagaucaucaccaccgacaacaccuucgugagcggcaacugcgacguggugaucggcaucgugaacaacaccguguacgauccccugcagcccgagcuggacagcuucaaggaggagcuggacaaguacuucaagaaucacaccagccccgacguggaccugggcgacaucagcggcaucaacgccagcguggugaacauccagaaggagaucgaucggcugaacgagguggccaagaaccugaacgagagccugaucgaccugcaggagcugggcaaguacgagcaguacaucaaguggcccugguacaucuggcugggcuucaucgccggccugaucgccaucgugauggugaccaucaugcugugcugcaugaccagcugcugcagcugccugaagggcuguugcagcugcggcagcugcugcaaguucgacgaggacgacagcgagcccgugcugaagggcgugaagcugcacuacaccugaggacuagucccuguucccagagcccacuuuuuuuucuuuuuuugaaauaaaauagccugucuuucagaucuaaaaaaaaaaaaaaaaaaaaaaaaaaaaaaaaaaaaaaaaaaaaaaaaaaaaaaaaaaaaaaaaaaaaaaaaaaaaaaaaaaaaaaaaaaaaaaaaaaaa

SEQ ID NO: 25107 - RNA, 4158 nt, Artificial Sequence
  SARS-CoV-2/Wuhan/WIV05/2019__EPI_ISL_402128 spike protein mRNA gc (1-1273)(K986P_V987P_K986P_V987P_L18F_D80A_D215G_L242del_A243del_ L244del_R246I_K417N_E484K_N501Y_D614G_A701V)
aggagagggcgcuuggcuugcaaggacccugagcugcggcauugaagcacacccaacccaacucgacugaagucagccucacugaaccggaucugagaaucuucucucucugggcuugccagggcucuccgaaccuagcuagcauccucuucaauuccaacuagaaagcuuaccauguucguguuccuggugcugcugccccuggugagcagccagugcgugaacuucaccacccggacccagcugccaccagccuacaccaacagcuucacccggggcgucuacuaccccgacaagguguuccggagcagcguccugcacagcacccaggaccuguuccugcccuucuucagcaacgugaccugguuccacgccauccacgugagcggcaccaacggcaccaagcgguucgccaaccccgugcugcccuucaacgacggcguguacuucgccagcaccgagaagagcaacaucauccggggcuggaucuucggcaccacccuggacagcaagacccagagccugcugaucgugaauaacgccaccaacguggugaucaaggugugcgaguuccaguucugcaacgaccccuuccugggcguguacuaccacaagaacaacaagagcuggauggagagcgaguuccggguguacagcagcgccaacaacugcaccuucgaguacgugagccagcccuuccugauggaccuggagggcaagcagggcaacuucaagaaccugcgggaguucguguucaagaacaucgacggcuacuucaagaucuacagcaagcacaccccaaucaaccuggugcggggccugccccagggcuucucagcccuggagccccugguggaccugcccaucggcaucaacaucacccgguuccagacccugcacaucagcuaccugaccccaggcgacagcagcagcggguggacagcaggcgcggcugcuuacuacgugggcuaccugcagccccggaccuuccugcugaaguacaacgagaacggcaccaucaccgacgccguggacugcgcccuggacccucugagcgagaccaagugcacccugaagagcuucaccguggagaagggcaucuaccagaccagcaacuuccgggugcagcccaccgagagcaucgugcgguuccccaacaucaccaaccugugccccuucggcgagguguucaacgccacccgguucgccagcguguacgccuggaaccggaagcggaucagcaacugcguggccgacuacagcgugcuguacaacagcgccagcuucagcaccuucaagugcuacggcgugagccccaccaagcugaacgaccugugcuucaccaacguguacgccgacagcuucgugauccguggcgacgaggugcggcagaucgcacccggccagacaggcaacaucgccgacuacaacuacaagcugcccgacgacuucaccggcugcgugaucgccuggaacagcaacaaccucgacagcaaggugggcggcaacuacaacuaccuguaccggcuguuccggaagagcaaccugaagcccuucgagcgggacaucagcaccgagaucuaccaagccggcuccaccccuugcaacggcgugaagggcuucaacugcuacuucccucugcagagcuacggcuuccagcccaccuacggcgugggcuaccagcccuaccgggugguggugcugagcuucgagcugcugcacgccccagccaccguguguggccccaagaagagcaccaaccuggugaagaacaagugcgugaacuucaacuucaacggccuuaccggcaccggcgugcugaccgagagcaacaagaaauuccugcccuuucagcaguucggccgggacaucgccgacaccaccgacgcugugcgggauccccagacccuggagauccuggacaucaccccuugcagcuucggcggcgugagcgugaucaccccaggcaccaacaccagcaaccagguggccgugcuguaccagggcgugaacugcaccgaggugcccguggccauccacgccgaccagcugacacccaccuggcgggucuacagcaccggcagcaacguguuccagacccgggccgguugccugaucggcgccgagcacgugaacaacagcuacgagugcgacauccccaucggcgccggcaucugugccagcuaccagacccagaccaauucaccccggagggcaaggagcguggccagccagagcaucaucgccuacaccaugagccugggcguggagaacagcguggccuacagcaacaacagcaucgccauccccaccaacuucaccaucagcgugaccaccgagauucugcccgugagcaugaccaagaccagcguggacugcaccauguacaucugcggcgacagcaccgagugcagcaaccugcugcugcaguacggcagcuucugcacccagcugaaccgggcccugaccggcaucgccguggagcaggacaagaacacccaggagguguucgcccaggugaagcagaucuacaagaccccucccaucaaggacuucggcggcuucaacuucagccagauccugcccgaccccagcaagcccagcaagcggagcuucaucgaggaccugcuguucaacaaggugacccuagccgacgccggcuucaucaagcaguacggcgacugccucggcgacauagccgcccgggaccugaucugcgcccagaaguucaacggccugaccgugcugccuccccugcugaccgacgagaugaucgcccaguacaccagcgcccuguuagccggaaccaucaccagcggcuggacuuucggcgcuggagccgcucugcagauccccuucgccaugcagauggccuaccgguucaacggcaucggcgugacccagaacgugcuguacgagaaccagaagcugaucgccaaccaguucaacagcgccaucggcaagauccaggacagccugagcagcaccgcuagcgcccugggcaagcugcaggacguggugaaccagaacgcccaggcccugaacacccuggugaagcagcugagcagcaacuucggcgccaucagcagcgugcugaacgacauccugagccggcuggacccucccgaggccgaggugcagaucgaccggcugaucacuggccggcugcagagccugcagaccuacgugacccagcagcugauccgggccgccgagauucgggccagcgccaaccuggccgccaccaagaugagcgagugcgugcugggccagagcaagcggguggacuucugcggcaagggcuaccaccugaugagcuuuccccagagcgcaccccacggagugguguuccugcacgugaccuacgugcccgcccaggagaagaacuucaccaccgccccagccaucugccacgacggcaaggcccacuuuccccgggagggcguguucgugagcaacggcacccacugguucgugacccagcggaacuucuacgagccccagaucaucaccaccgacaacaccuucgugagcggcaacugcgacguggugaucggcaucgugaacaacaccguguacgauccccugcagcccgagcuggacagcuucaaggaggagcuggacaaguacuucaagaaucacaccagccccgacguggaccugggcgacaucagcggcaucaacgccagcguggugaacauccagaaggagaucgaucggcugaacgagguggccaagaaccugaacgagagccugaucgaccugcaggagcugggcaaguacgagcaguacaucaaguggcccugguacaucuggcugggcuucaucgccggccugaucgccaucgugauggugaccaucaugcugugcugcaugaccagcugcugcagcugccugaagggcuguugcagcugcggcagcugcugcaaguucgacgaggacgacagcgagcccgugcugaagggcgugaagcugcacuacaccugaggacuagucccuguucccagagcccacuuuuuuuucuuuuuuugaaauaaaauagccugucuuucagaucuaaaaaaaaaaaaaaaaaaaaaaaaaaaaaaaaaaaaaaaaaaaaaaaaaaaaaaaaaaaaaaaaaaaaaaaaaaaaaaaaaaaaaaaaaaaaaaaaaaaa

SEQ ID NO: 25108 - RNA, 4167 nt, Artificial Sequence
  SARS-CoV-2/Wuhan/WIV05/2019__EPI_ISL_402128 spike protein mRNA gc (1-1273)(K986P_V987P_K986P_V987P_E484K_D614G)
aggagagggcgcuuggcuugcaaggacccugagcugcggcauugaagcacacccaacccaacucgacugaagucagccucacugaaccggaucugagaaucuucucucucugggcuugccagggcucuccgaaccuagcuagcauccucuucaauuccaacuagaaagcuuaccauguucguguuccuggugcugcugccccuggugagcagccagugcgugaaccugaccacccggacccagcugccaccagccuacaccaacagcuucacccggggcgucuacuaccccgacaagguguuccggagcagcguccugcacagcacccaggaccuguuccugcccuucuucagcaacgugaccugguuccacgccauccacgugagcggcaccaacggcaccaagcgguucgacaaccccgugcugcccuucaacgacggcguguacuucgccagcaccgagaagagcaacaucauccggggcuggaucuucggcaccacccuggacagcaagacccagagccugcugaucgugaauaacgccaccaacguggugaucaaggugugcgaguuccaguucugcaacgaccccuuccugggcguguacuaccacaagaacaacaagagcuggauggagagcgaguuccggguguacagcagcgccaacaacugcaccuucgaguacgugagccagcccuuccugauggaccuggagggcaagcagggcaacuucaagaaccugcgggaguucguguucaagaacaucgacggcuacuucaagaucuacagcaagcacaccccaaucaaccuggugcgggaucugccccagggcuucucagcccuggagccccugguggaccugcccaucggcaucaacaucacccgguuccagacccugcuggcccugcaccggagcuaccugaccccaggcgacagcagcagcggguggacagcaggcgcggcugcuuacuacgugggcuaccugcagccccggaccuuccugcugaaguacaacgagaacggcaccaucaccgacgccguggacugcgcccuggacccucugagcgagaccaagugcacccugaagagcuucaccguggagaagggcaucuaccagaccagcaacuuccgggugcagcccaccgagagcaucgugcgguuccccaacaucaccaaccugugccccuucggcgagguguucaacgccacccgguucgccagcguguacgccuggaaccggaagcggaucagcaacugcguggccgacuacagcgugcuguacaacagcgccagcuucagcaccuucaagugcuacggcgugagccccaccaagcugaacgaccugugcuucaccaacguguacgccgacagcuucgugauccguggcgacgaggugcggcagaucgcacccggccagacaggcaagaucgccgacuacaacuacaagcugcccgacgacuucaccggcugcgugaucgccuggaacagcaacaaccucgacagcaaggugggcggcaacuacaacuaccuguaccggcuguuccggaagagcaaccugaagcccuucgagcgggacaucagcaccgagaucuaccaagccggcuccaccccuugcaacggcgugaagggcuucaacugcuacuucccucugcagagcuacggcuuccagcccaccaacggcgugggcuaccagcccuaccgggugguggugcugagcuucgagcugcugcacgccccagccaccguguguggccccaagaagagcaccaaccuggugaagaacaagugcgugaacuucaacuucaacggccuuaccggcaccggcgugcugaccgagagcaacaagaaauuccugcccuuucagcaguucggccgggacaucgccgacaccaccgacgcugugcgggauccccagacccuggagauccuggacaucaccccuugcagcuucggcggcgugagcgugaucaccccaggcaccaacaccagcaaccagguggccgugcuguaccagggcgugaacugcaccgaggugcccguggccauccacgccgaccagcugacacccaccuggcgggucuacagcaccggcagcaacguguuccagacccgggccgguugccugaucggcgccgagcacgugaacaacagcuacgagugcgacauccccaucggcgccggcaucugugccagcuaccagacccagaccaauucaccccggagggcaaggagcguggccagccagagcaucaucgccuacaccaugagccugggcgccgagaacagcguggccuacagcaacaacagcaucgccauccccaccaacuucaccaucagcgugaccaccgagauucugcccgugagcaugaccaagaccagcguggacugcaccauguacaucugcggcgacagcaccgagugcagcaaccugcugcugcaguacggcagcuucugcacccagcugaaccgggcccugaccggcaucgccguggagcaggacaagaacacccaggagguguucgcccaggugaagcagaucuacaagaccccucccaucaaggacuucggcggcuucaacuucagccagauccugcccgaccccagcaagcccagcaagcggagcuucaucgaggaccugcuguucaacaaggugacccuagccgacgccggcuucaucaagcaguacggcgacugccucggcgacauagccgcccgggaccugaucugcgcccagaaguucaacggccugaccgugcugccuccccugcugaccgacgagaugaucgcccaguacaccagcgcccuguuagccggaaccaucaccagcggcuggacuuucggcgcuggagccgcucugcagauccccuucgccaugcagauggccuaccgguucaacggcaucggcgugacccagaacgugcuguacgagaaccagaagcugaucgccaaccaguucaacagcgccaucggcaagauccaggacagccugagcagcaccgcuagcgcccugggcaagcugcaggacguggugaaccagaacgcccaggcccugaacacccuggugaagcagcugagcagcaacuucggcgccaucagcagcgugcugaacgacauccugagccggcuggacccucccgaggccgaggugcagaucgaccggcugaucacuggccggcugcagagccugcagaccuacgugacccagcagcugauccgggccgccgagauucgggccagcgccaaccuggccgccaccaagaugagcgagugcgugcugggccagagcaagcggguggacuucugcggcaagggcuaccaccugaugagcuuuccccagagcgcaccccacggagugguguuccugcacgugaccuacgugcccgcccaggagaagaacuucaccaccgccccagccaucugccacgacggcaaggcccacuuuccccgggagggcguguucgugagcaacggcacccacugguucgugacccagcggaacuucuacgagccccagaucaucaccaccgacaacaccuucgugagcggcaacugcgacguggugaucggcaucgugaacaacaccguguacgauccccugcagcccgagcuggacagcuucaaggaggagcuggacaaguacuucaagaaucacaccagccccgacguggaccugggcgacaucagcggcaucaacgccagcguggugaacauccagaaggagaucgaucggcugaacgagguggccaagaaccugaacgagagccugaucgaccugcaggagcugggcaaguacgagcaguacaucaaguggcccugguacaucuggcugggcuucaucgccggccugaucgccaucgugauggugaccaucaugcugugcugcaugaccagcugcugcagcugccugaagggcuguugcagcugcggcagcugcugcaaguucgacgaggacgacagcgagcccgugcugaagggcgugaagcugcacuacaccugaggacuagucccuguucccagagcccacuuuuuuuucuuuuuuugaaauaaaauagccugucuuucagaucuaaaaaaaaaaaaaaaaaaaaaaaaaaaaaaaaaaaaaaaaaaaaaaaaaaaaaaaaaaaaaaaaaaaaaaaaaaaaaaaaaaaaaaaaaaaaaaaaaaaa

SEQ ID NO: 25109 - RNA, 4167 nt, Artificial Sequence
  SARS-CoV-2/Wuhan/WIV05/2019__EPI_ISL_402128 spike protein mRNA gc (1-1273)(K986P_V987P_K986P_V987P_L18F_T20N_P26S_D138Y_R190S_K417T _E484K_N501Y_D614G_H655Y_T1027I)
aggagagggcgcuuggcuugcaaggacccugagcugcggcauugaagcacacccaacccaacucgacugaagucagccucacugaaccggaucugagaaucuucucucucugggcuugccagggcucuccgaaccuagcuagcauccucuucaauuccaacuagaaagcuuaccauguucguguuccuggugcugcugccccuggugagcagccagugcgugaacuucaccaaccggacccagcugccaagcgccuacaccaacagcuucacccggggcgucuacuaccccgacaagguguuccggagcagcguccugcacagcacccaggaccuguuccugcccuucuucagcaacgugaccugguuccacgccauccacgugagcggcaccaacggcaccaagcgguucgacaaccccgugcugcccuucaacgacggcguguacuucgccagcaccgagaagagcaacaucauccggggcuggaucuucggcaccacccuggacagcaagacccagagccugcugaucgugaauaacgccaccaacguggugaucaaggugugcgaguuccaguucugcaacuaccccuuccugggcguguacuaccacaagaacaacaagagcuggauggagagcgaguuccggguguacagcagcgccaacaacugcaccuucgaguacgugagccagcccuuccugauggaccuggagggcaagcagggcaacuucaagaaccugagcgaguucguguucaagaacaucgacggcuacuucaagaucuacagcaagcacaccccaaucaaccuggugcgggaucugccccagggcuucucagcccuggagccccugguggaccugcccaucggcaucaacaucacccgguuccagacccugcuggcccugcaccggagcuaccugaccccaggcgacagcagcagcggguggacagcaggcgcggcugcuuacuacgugggcuaccugcagccccggaccuuccugcugaaguacaacgagaacggcaccaucaccgacgccguggacugcgcccuggacccucugagcgagaccaagugcacccugaagagcuucaccguggagaagggcaucuaccagaccagcaacuuccgggugcagcccaccgagagcaucgugcgguuccccaacaucaccaaccugugccccuucggcgagguguucaacgccacccgguucgccagcguguacgccuggaaccggaagcggaucagcaacugcguggccgacuacagcgugcuguacaacagcgccagcuucagcaccuucaagugcuacggcgugagccccaccaagcugaacgaccugugcuucaccaacguguacgccgacagcuucgugauccguggcgacgaggugcggcagaucgcacccggccagacaggcaccaucgccgacuacaacuacaagcugcccgacgacuucaccggcugcgugaucgccuggaacagcaacaaccucgacagcaaggugggcggcaacuacaacuaccuguaccggcuguuccggaagagcaaccugaagcccuucgagcgggacaucagcaccgagaucuaccaagccggcuccaccccuugcaacggcgugaagggcuucaacugcuacuucccucugcagagcuacggcuuccagcccaccuacggcgugggcuaccagcccuaccgggugguggugcugagcuucgagcugcugcacgccccagccaccguguguggccccaagaagagcaccaaccuggugaagaacaagugcgugaacuucaacuucaacggccuuaccggcaccggcgugcugaccgagagcaacaagaaauuccugcccuuucagcaguucggccgggacaucgccgacaccaccgacgcugugcgggauccccagacccuggagauccuggacaucaccccuugcagcuucggcggcgugagcgugaucaccccaggcaccaacaccagcaaccagguggccgugcuguaccagggcgugaacugcaccgaggugcccguggccauccacgccgaccagcugacacccaccuggcgggucuacagcaccggcagcaacguguuccagacccgggccgguugccugaucggcgccgaguacgugaacaacagcuacgagugcgacauccccaucggcgccggcaucugugccagcuaccagacccagaccaauucaccccggagggcaaggagcguggccagccagagcaucaucgccuacaccaugagccugggcgccgagaacagcguggccuacagcaacaacagcaucgccauccccaccaacuucaccaucagcgugaccaccgagauucugcccgugagcaugaccaagaccagcguggacugcaccauguacaucugcggcgacagcaccgagugcagcaaccugcugcugcaguacggcagcuucugcacccagcugaaccgggcccugaccggcaucgccguggagcaggacaagaacacccaggagguguucgcccaggugaagcagaucuacaagaccccucccaucaaggacuucggcggcuucaacuucagccagauccugcccgaccccagcaagcccagcaagcggagcuucaucgaggaccugcuguucaacaaggugacccuagccgacgccggcuucaucaagcaguacggcgacugccucggcgacauagccgcccgggaccugaucugcgcccagaaguucaacggccugaccgugcugccuccccugcugaccgacgagaugaucgcccaguacaccagcgcccuguuagccggaaccaucaccagcggcuggacuuucggcgcuggagccgcucugcagauccccuucgccaugcagauggccuaccgguucaacggcaucggcgugacccagaacgugcuguacgagaaccagaagcugaucgccaaccaguucaacagcgccaucggcaagauccaggacagccugagcagcaccgcuagcgcccugggcaagcugcaggacguggugaaccagaacgcccaggcccugaacacccuggugaagcagcugagcagcaacuucggcgccaucagcagcgugcugaacgacauccugagccggcuggacccucccgaggccgaggugcagaucgaccggcugaucacuggccggcugcagagccugcagaccuacgugacccagcagcugauccgggccgccgagauucgggccagcgccaaccuggccgccaucaagaugagcgagugcgugcugggccagagcaagcggguggacuucugcggcaagggcuaccaccugaugagcuuuccccagagcgcaccccacggagugguguuccugcacgugaccuacgugcccgcccaggagaagaacuucaccaccgccccagccaucugccacgacggcaaggcccacuuuccccgggagggcguguucgugagcaacggcacccacugguucgugacccagcggaacuucuacgagccccagaucaucaccaccgacaacaccuucgugagcggcaacugcgacguggugaucggcaucgugaacaacaccguguacgauccccugcagcccgagcuggacagcuucaaggaggagcuggacaaguacuucaagaaucacaccagccccgacguggaccugggcgacaucagcggcaucaacgccagcguggugaacauccagaaggagaucgaucggcugaacgagguggccaagaaccugaacgagagccugaucgaccugcaggagcugggcaaguacgagcaguacaucaaguggcccugguacaucuggcugggcuucaucgccggccugaucgccaucgugauggugaccaucaugcugugcugcaugaccagcugcugcagcugccugaagggcuguugcagcugcggcagcugcugcaaguucgacgaggacgacagcgagcccgugcugaagggcgugaagcugcacuacaccugaggacuagucccuguucccagagcccacuuuuuuuucuuuuuuugaaauaaaauagccugucuuucagaucuaaaaaaaaaaaaaaaaaaaaaaaaaaaaaaaaaaaaaaaaaaaaaaaaaaaaaaaaaaaaaaaaaaaaaaaaaaaaaaaaaaaaaaaaaaaaaaaaaaaa

SEQ ID NO: 25110 - RNA, 4167 nt, Artificial Sequence
  SARS-CoV-2/Wuhan/WIV05/2019__EPI_ISL_402128 spike protein mRNA gc (1-1273)(K986P_V987P_K986P_V987P_S13I_W152C_L452R_D614G)
aggagagggcgcuuggcuugcaaggacccugagcugcggcauugaagcacacccaacccaacucgacugaagucagccucacugaaccggaucugagaaucuucucucucugggcuugccagggcucuccgaaccuagcuagcauccucuucaauuccaacuagaaagcuuaccauguucguguuccuggugcugcugccccuggugagcauccagugcgugaaccugaccacccggacccagcugccaccagccuacaccaacagcuucacccggggcgucuacuaccccgacaagguguuccggagcagcguccugcacagcacccaggaccuguuccugcccuucuucagcaacgugaccugguuccacgccauccacgugagcggcaccaacggcaccaagcgguucgacaaccccgugcugcccuucaacgacggcguguacuucgccagcaccgagaagagcaacaucauccggggcuggaucuucggcaccacccuggacagcaagacccagagccugcugaucgugaauaacgccaccaacguggugaucaaggugugcgaguuccaguucugcaacgaccccuuccugggcguguacuaccacaagaacaacaagagcugcauggagagcgaguuccggguguacagcagcgccaacaacugcaccuucgaguacgugagccagcccuuccugauggaccuggagggcaagcagggcaacuucaagaaccugcgggaguucguguucaagaacaucgacggcuacuucaagaucuacagcaagcacaccccaaucaaccuggugcgggaucugccccagggcuucucagcccuggagccccugguggaccugcccaucggcaucaacaucacccgguuccagacccugcuggcccugcaccggagcuaccugaccccaggcgacagcagcagcggguggacagcaggcgcggcugcuuacuacgugggcuaccugcagccccggaccuuccugcugaaguacaacgagaacggcaccaucaccgacgccguggacugcgcccuggacccucugagcgagaccaagugcacccugaagagcuucaccguggagaagggcaucuaccagaccagcaacuuccgggugcagcccaccgagagcaucgugcgguuccccaacaucaccaaccugugccccuucggcgagguguucaacgccacccgguucgccagcguguacgccuggaaccggaagcggaucagcaacugcguggccgacuacagcgugcuguacaacagcgccagcuucagcaccuucaagugcuacggcgugagccccaccaagcugaacgaccugugcuucaccaacguguacgccgacagcuucgugauccguggcgacgaggugcggcagaucgcacccggccagacaggcaagaucgccgacuacaacuacaagcugcccgacgacuucaccggcugcgugaucgccuggaacagcaacaaccucgacagcaaggugggcggcaacuacaacuaccgcuaccggcuguuccggaagagcaaccugaagcccuucgagcgggacaucagcaccgagaucuaccaagccggcuccaccccuugcaacggcguggagggcuucaacugcuacuucccucugcagagcuacggcuuccagcccaccaacggcgugggcuaccagcccuaccgggugguggugcugagcuucgagcugcugcacgccccagccaccguguguggccccaagaagagcaccaaccuggugaagaacaagugcgugaacuucaacuucaacggccuuaccggcaccggcgugcugaccgagagcaacaagaaauuccugcccuuucagcaguucggccgggacaucgccgacaccaccgacgcugugcgggauccccagacccuggagauccuggacaucaccccuugcagcuucggcggcgugagcgugaucaccccaggcaccaacaccagcaaccagguggccgugcuguaccagggcgugaacugcaccgaggugcccguggccauccacgccgaccagcugacacccaccuggcgggucuacagcaccggcagcaacguguuccagacccgggccgguugccugaucggcgccgagcacgugaacaacagcuacgagugcgacauccccaucggcgccggcaucugugccagcuaccagacccagaccaauucaccccggagggcaaggagcguggccagccagagcaucaucgccuacaccaugagccugggcgccgagaacagcguggccuacagcaacaacagcaucgccauccccaccaacuucaccaucagcgugaccaccgagauucugcccgugagcaugaccaagaccagcguggacugcaccauguacaucugcggcgacagcaccgagugcagcaaccugcugcugcaguacggcagcuucugcacccagcugaaccgggcccugaccggcaucgccguggagcaggacaagaacacccaggagguguucgcccaggugaagcagaucuacaagaccccucccaucaaggacuucggcggcuucaacuucagccagauccugcccgaccccagcaagcccagcaagcggagcuucaucgaggaccugcuguucaacaaggugacccuagccgacgccggcuucaucaagcaguacggcgacugccucggcgacauagccgcccgggaccugaucugcgcccagaaguucaacggccugaccgugcugccuccccugcugaccgacgagaugaucgcccaguacaccagcgcccuguuagccggaaccaucaccagcggcuggacuuucggcgcuggagccgcucugcagauccccuucgccaugcagauggccuaccgguucaacggcaucggcgugacccagaacgugcuguacgagaaccagaagcugaucgccaaccaguucaacagcgccaucggcaagauccaggacagccugagcagcaccgcuagcgcccugggcaagcugcaggacguggugaaccagaacgcccaggcccugaacacccuggugaagcagcugagcagcaacuucggcgccaucagcagcgugcugaacgacauccugagccggcuggacccucccgaggccgaggugcagaucgaccggcugaucacuggccggcugcagagccugcagaccuacgugacccagcagcugauccgggccgccgagauucgggccagcgccaaccuggccgccaccaagaugagcgagugcgugcugggccagagcaagcggguggacuucugcggcaagggcuaccaccugaugagcuuuccccagagcgcaccccacggagugguguuccugcacgugaccuacgugcccgcccaggagaagaacuucaccaccgccccagccaucugccacgacggcaaggcccacuuuccccgggagggcguguucgugagcaacggcacccacugguucgugacccagcggaacuucuacgagccccagaucaucaccaccgacaacaccuucgugagcggcaacugcgacguggugaucggcaucgugaacaacaccguguacgauccccugcagcccgagcuggacagcuucaaggaggagcuggacaaguacuucaagaaucacaccagccccgacguggaccugggcgacaucagcggcaucaacgccagcguggugaacauccagaaggagaucgaucggcugaacgagguggccaagaaccugaacgagagccugaucgaccugcaggagcugggcaaguacgagcaguacaucaaguggcccugguacaucuggcugggcuucaucgccggccugaucgccaucgugauggugaccaucaugcugugcugcaugaccagcugcugcagcugccugaagggcuguugcagcugcggcagcugcugcaaguucgacgaggacgacagcgagcccgugcugaagggcgugaagcugcacuacaccugaggacuagucccuguucccagagcccacuuuuuuuucuuuuuuugaaauaaaauagccugucuuucagaucuaaaaaaaaaaaaaaaaaaaaaaaaaaaaaaaaaaaaaaaaaaaaaaaaaaaaaaaaaaaaaaaaaaaaaaaaaaaaaaaaaaaaaaaaaaaaaaaaaaaa

SEQ ID NO: 25111 - RNA, 4167 nt, Artificial Sequence
  SARS-CoV-2/Wuhan/WIV05/2019__EPI_ISL_402128 spike protein mRNA gc (1-1273)(K986P_V987P)
aggagagggcgcuuggcuugcaaggacccugagcugcggcauugaagcacacccaacccaacucgacugaagucagccucacugaaccggaucugagaaucuucucucucugggcuugccagggcucuccgaaccuagcuagcauccucuucaauuccaacuagaaagcuuaccauguucguguuccuggugcugcugccccuggugagcagccagugcgugaaccugaccacccggacccagcugcccccugccuacaccaacagcuucacccggggcguguacuaccccgacaagguguuccggagcagcgugcugcacagcacccaggaccuguuccugcccuucuucagcaacgugaccugguuccacgccauccacgugagcggcaccaacggcaccaagcgguucgacaacccagugcugcccuucaacgacggcguguacuucgccagcaccgagaagucaaacaucauccggggcuggaucuucggcaccacccuggacagcaagacacagagccugcugaucgugaacaacgccaccaacguggugaucaaggugugcgaguuucaguucugcaacgaccccuuccugggcguguacuaccacaagaacaacaagagcuggauggagagcgaguuccgggucuacagcagcgcuaacaauugcaccuucgaguacgugagccagcccuuccugauggaccucgagggcaagcagggcaacuucaagaaccugcgggaguucguguucaagaacaucgauggcuacuucaagaucuacagcaagcacacccccaucaaccuggugcgggaccugccccagggauucagcgcccuggagccucugguggaccugcccaucggcaucaacaucaccagguuccagacccugcuggcccugcaccggagcuaccugacccccggcgacagcagcagcggcuggaccgccggcgccgccgcauacuacgugggcuaccugcagccacggaccuuccugcugaaguacaacgagaacggcaccaucaccgacgccguggacugcgcccuggacccccugagcgagaccaagugcacccuaaagagcuucaccguggagaagggcaucuaccagaccagcaacuuccgggugcagcccacugagagcaucgugcgguuccccaacauuaccaaccugugucccuucggcgagguguucaacgccacccgguucgccagcguguacgccuggaaccggaagcggaucagcaacugcguggccgacuacagcgugcuguacaacagcgccagcuucagcaccuucaagugcuacggcgugagcccuaccaagcugaacgaccugugcuucaccaacguguacgcugacagcuucgugauccggggcgacgaggugcggcagaucgcccccggccagaccggcaagaucgccgacuacaacuacaagcugcccgacgacuucaccggcugcgugaucgccuggaacagcaacaaccuggacagcaaggugggcggcaacuacaacuaccuguaccggcuguuccguaagagcaaccugaagccauucgagcgggacaucagcaccgagaucuaccaggccggcagcacccccugcaacgguguggagggcuuuaacugcuacuucccccugcagagcuacggcuuccagcccaccaacggcgugggcuaccagcccuaccgggugguggugcugagcuucgagcugcugcacgcccccgccaccgugugcggcccuaaaaagagcaccaaccuggugaagaacaagugcgugaacuucaauuucaacggccugaccggcaccggcgugcugaccgagagcaacaagaaguuccugcccuuccagcaguucggccgggauaucgccgacaccaccgacgcagugcgggacccccagacccuggagauccuggacaucaccccaugcagcuucggcggcgugagcgucaucacccccggcacaaacaccagcaaccagguggccgugcuguaccaggacgugaacugcaccgaggugcccguggccauccacgccgaccagcugacccccaccuggcggguguacagcaccggaagcaacguguuccagacccgggccggcugccugaucggcgccgagcacgugaacaacuccuacgagugcgacauccccaucggcgcuggcaucugcgccagcuaccagacccagaccaacagcccccggcgggcccggagcguggccagccagagcaucaucgccuacaccaugagcuuaggcgccgagaacagcguggccuacagcaacaacagcaucgcgaucccuaccaacuucaccaucagcgugaccaccgagauacugcccgugagcaugaccaagaccagcguggacuguaccauguacaucugcggcgacagcaccgagugcagcaaccugcugcugcaguacggcagcuucugcacccagcugaaccgggcccugaccggcaucgccguggagcaggacaagaacacccaagagguguucgcccaggugaagcagaucuacaagacucccccaaucaaggacuucggcggcuucaacuucagccagauccugcccgaccccagcaagcccagcaagcggagcuucaucgaggaccugcuguucaacaaggugacccuggccgacgccggcuucaucaagcaguacggcgauugccugggcgacaucgccgcucgggaccugaucugcgcccagaaguucaacgggcugaccgugcugcccccucugcugaccgacgagaugaucgcccaguacaccagcgcccugcuugccggcaccaucaccagcggcuggaccuucggcgccggcgcagcccugcagauccccuucgccaugcagauggccuaccgguucaacggcaucggcgugacccagaacgugcuguacgagaaccagaagcugaucgccaaccaguucaacagcgccaucggcaagauccaggacagccugagcagcaccgccagcgcccugggcaagcugcaggacguggugaaccagaacgcucaggcccugaacacccuggugaagcagcugagcagcaacuucggcgccaucagcucagugcugaaugacauccugagcaggcuggaucccccagaggccgaggugcagaucgaccggcugaucaccggccggcugcagagccugcagaccuacgugacccagcagcugauccgggccgccgagauccgggccagcgccaaccuggcagccaccaagaugagcgagugcgugcugggccagagcaagcggguggacuuuugcggcaagggcuaccaccugaugagcuucccccagagcgcuccccacggcgugguguuccuccacgugacauacguccccgcccaggagaagaacuucaccaccgcccccgccauuugccacgacggcaaggcccacuucccccgggagggcguguucgugagcaacggaacccacugguucgugacccagcggaacuucuacgagccucagaucaucaccaccgacaacaccuucgugagcggcaacugcgacguggugaucggcaucgugaacaacaccguguacgacccccugcagcccgagcuggacagcuucaaggaggagcuggacaaguacuucaagaaccacaccagcccagacguggaccugggcgacaucagcggcaucaacgccagcguggugaacauccagaaggagaucgaccggcugaacgagguggccaagaaccugaacgagagccugaucgaccugcaggagcugggcaaguacgagcaguacaucaaguggcccugguacaucuggcugggcuucaucgccggccugaucgccaucgugauggugaccaucaugcugugcugcaugaccagcugcuguagcugccugaagggcugcugcagcugcggcagcugcugcaaguucgacgaggacgacagcgagcccgugcugaagggcgugaagcugcacuacaccugaggacuagucccuguucccagagcccacuuuuuuuucuuuuuuugaaauaaaauagccugucuuucagaucuaaaaaaaaaaaaaaaaaaaaaaaaaaaaaaaaaaaaaaaaaaaaaaaaaaaaaaaaaaaaaaaaaaaaaaaaaaaaaaaaaaaaaaaaaaaaaaaaaaaa

SEQ ID NO: 25112 - RNA, 4167 nt, Artificial Sequence
  SARS-CoV-2/Wuhan/WIV05/2019__EPI_ISL_402128 spike protein mRNA gc (1-1273)(K986P_V987P_ D614G)
aggagagggcgcuuggcuugcaaggacccugagcugcggcauugaagcacacccaacccaacucgacugaagucagccucacugaaccggaucugagaaucuucucucucugggcuugccagggcucuccgaaccuagcuagcauccucuucaauuccaacuagaaagcuuaccauguucguguuccuggugcugcugccccuggugagcagccagugcgugaaccugaccacccggacccagcugcccccugccuacaccaacagcuucacccggggcguguacuaccccgacaagguguuccggagcagcgugcugcacagcacccaggaccuguuccugcccuucuucagcaacgugaccugguuccacgccauccacgugagcggcaccaacggcaccaagcgguucgacaacccagugcugcccuucaacgacggcguguacuucgccagcaccgagaagucaaacaucauccggggcuggaucuucggcaccacccuggacagcaagacacagagccugcugaucgugaacaacgccaccaacguggugaucaaggugugcgaguuucaguucugcaacgaccccuuccugggcguguacuaccacaagaacaacaagagcuggauggagagcgaguuccgggucuacagcagcgcuaacaauugcaccuucgaguacgugagccagcccuuccugauggaccucgagggcaagcagggcaacuucaagaaccugcgggaguucguguucaagaacaucgauggcuacuucaagaucuacagcaagcacacccccaucaaccuggugcgggaccugccccagggauucagcgcccuggagccucugguggaccugcccaucggcaucaacaucaccagguuccagacccugcuggcccugcaccggagcuaccugacccccggcgacagcagcagcggcuggaccgccggcgccgccgcauacuacgugggcuaccugcagccacggaccuuccugcugaaguacaacgagaacggcaccaucaccgacgccguggacugcgcccuggacccccugagcgagaccaagugcacccuaaagagcuucaccguggagaagggcaucuaccagaccagcaacuuccgggugcagcccacugagagcaucgugcgguuccccaacauuaccaaccugugucccuucggcgagguguucaacgccacccgguucgccagcguguacgccuggaaccggaagcggaucagcaacugcguggccgacuacagcgugcuguacaacagcgccagcuucagcaccuucaagugcuacggcgugagcccuaccaagcugaacgaccugugcuucaccaacguguacgcugacagcuucgugauccggggcgacgaggugcggcagaucgcccccggccagaccggcaagaucgccgacuacaacuacaagcugcccgacgacuucaccggcugcgugaucgccuggaacagcaacaaccuggacagcaaggugggcggcaacuacaacuaccuguaccggcuguuccguaagagcaaccugaagccauucgagcgggacaucagcaccgagaucuaccaggccggcagcacccccugcaacgguguggagggcuuuaacugcuacuucccccugcagagcuacggcuuccagcccaccaacggcgugggcuaccagcccuaccgggugguggugcugagcuucgagcugcugcacgcccccgccaccgugugcggcccuaaaaagagcaccaaccuggugaagaacaagugcgugaacuucaauuucaacggccugaccggcaccggcgugcugaccgagagcaacaagaaguuccugcccuuccagcaguucggccgggauaucgccgacaccaccgacgcagugcgggacccccagacccuggagauccuggacaucaccccaugcagcuucggcggcgugagcgucaucacccccggcacaaacaccagcaaccagguggccgugcuguaccagggagugaacugcaccgaggugcccguggccauccacgccgaccagcugacccccaccuggcggguguacagcaccggcagcaacguguuccagacccgggccggcugccugaucggcgccgagcacgugaacaacuccuacgagugcgacauccccaucggcgcuggcaucugcgccagcuaccagacccagaccaacagcccccggcgggcccggagcguggccagccagagcaucaucgccuacaccaugagcuuaggcgccgagaacagcguggccuacagcaacaacagcaucgcgaucccuaccaacuucaccaucagcgugaccaccgagauacugcccgugagcaugaccaagaccagcguggacuguaccauguacaucugcggcgacagcaccgagugcagcaaccugcugcugcaguacggcagcuucugcacccagcugaaccgggcccugaccggcaucgccguggagcaggacaagaacacccaagagguguucgcccaggugaagcagaucuacaagacucccccaaucaaggacuucggcggcuucaacuucagccagauccugcccgaccccagcaagcccagcaagcggagcuucaucgaggaccugcuguucaacaaggugacccuggccgacgccggcuucaucaagcaguacggcgacugccugggggauaucgccgcucgggaccugaucugcgcccagaaguucaacggccugaccgugcugcccccucugcugaccgacgagaugaucgcccaguacaccagcgcccugcuugccggcaccaucaccagcggcuggaccuucggcgccggcgcagcccugcagauccccuucgccaugcagauggccuaccgguucaacggcaucggcgugacccagaacgugcuguacgagaaccagaagcugaucgccaaccaguucaacagcgccaucggcaagauccaggacagccugagcagcaccgccagcgcccugggcaagcugcaggacguggugaaccagaacgcucaggcccugaacacccuggugaagcagcugagcagcaacuucggcgccaucagcucagugcugaaugacauccugagcaggcuggaucccccagaggccgaggugcagaucgaccggcugaucaccggccggcugcagagccugcagaccuacgugacccagcagcugauccgggccgccgagauccgggccagcgccaaccuggcagccaccaagaugagcgagugcgugcugggccagagcaagcggguggacuuuugcggcaagggcuaccaccugaugagcuucccccagagcgcuccccacggcgugguguuccuccacgugacauacguccccgcccaggagaagaacuucaccaccgcccccgccauuugccacgacggcaaggcccacuucccccgggagggaguguucgugagcaacggcacccacugguucgugacccagcggaacuucuacgagccucagaucaucaccaccgacaacaccuucgugagcggcaacugcgacguggugaucggcaucgugaacaacaccguguacgacccccugcagcccgagcuggacagcuucaaggaggagcuggacaaguacuucaagaaccacaccagcccagacguggaccugggcgacaucagcggcaucaacgccagcguggugaacauccagaaggagaucgaccggcugaacgagguggccaagaaccugaacgagagccugaucgaccugcaggagcugggcaaguacgagcaguacaucaaguggcccugguacaucuggcugggcuucaucgccggccugaucgccaucgugauggugaccaucaugcugugcugcaugaccagcugcuguagcugccugaagggcugcugcagcugcggcagcugcugcaaguucgacgaggacgacagcgagcccgugcugaagggcgugaagcugcacuacaccugaggacuagucccuguucccagagcccacuuuuuuuucuuuuuuugaaauaaaauagccugucuuucagaucuaaaaaaaaaaaaaaaaaaaaaaaaaaaaaaaaaaaaaaaaaaaaaaaaaaaaaaaaaaaaaaaaaaaaaaaaaaaaaaaaaaaaaaaaaaaaaaaaaaaa

SEQ ID NO: 25113 - RNA, 4167 nt, Artificial Sequence
  SARS-CoV-2/Wuhan/WIV05/2019__EPI_ISL_402128 spike protein mRNA gc (1-1273)(K986P_V987P_A222V_D614G)
aggagagggcgcuuggcuugcaaggacccugagcugcggcauugaagcacacccaacccaacucgacugaagucagccucacugaaccggaucugagaaucuucucucucugggcuugccagggcucuccgaaccuagcuagcauccucuucaauuccaacuagaaagcuuaccauguucguguuccuggugcugcugccccuggugagcagccagugcgugaaccugaccacccggacccagcugcccccugccuacaccaacagcuucacccggggcguguacuaccccgacaagguguuccggagcagcgugcugcacagcacccaggaccuguuccugcccuucuucagcaacgugaccugguuccacgccauccacgugagcggcaccaacggcaccaagcgguucgacaacccagugcugcccuucaacgacggcguguacuucgccagcaccgagaagucaaacaucauccggggcuggaucuucggcaccacccuggacagcaagacacagagccugcugaucgugaacaacgccaccaacguggugaucaaggugugcgaguuucaguucugcaacgaccccuuccugggcguguacuaccacaagaacaacaagagcuggauggagagcgaguuccgggucuacagcagcgcuaacaauugcaccuucgaguacgugagccagcccuuccugauggaccucgagggcaagcagggcaacuucaagaaccugcgggaguucguguucaagaacaucgauggcuacuucaagaucuacagcaagcacacccccaucaaccuggugcgggaccugccccagggauucagcgugcuggagccucugguggaccugcccaucggcaucaacaucaccagguuccagacccugcuggcccugcaccggagcuaccugacccccggcgacagcagcagcggcuggaccgccggcgccgccgccuacuacgugggcuaccugcagccacggaccuuccugcugaaguacaacgagaacggcaccaucaccgacgcaguggacugcgcccuggacccccugagcgagaccaagugcacccuaaagagcuucaccguggagaagggcaucuaccagaccagcaacuuccgggugcagcccacugagagcaucgugcgguuccccaacauuaccaaccugugucccuucggcgagguguucaacgccacccgguucgccagcguguacgccuggaaccggaagcggaucagcaacugcguggccgacuacagcgugcuguacaacagcgccagcuucagcaccuucaagugcuacggcgugagcccuaccaagcugaacgaccugugcuucaccaacguguacgccgacagcuucgugauccggggcgacgaggugcggcagaucgcucccggccagaccggcaagaucgccgacuacaacuacaagcugcccgacgacuucaccggcugcgugaucgccuggaacagcaacaaccuggacagcaaggugggcggcaacuacaacuaccuguaccggcuguuccguaagagcaaccugaagccauucgagcgggacaucagcaccgagaucuaccaggccggcagcacccccugcaacgguguggagggcuuuaacugcuacuucccccugcagagcuacggcuuccagcccaccaacggcgugggcuaccagcccuaccgggugguggugcugagcuucgagcugcugcacgcccccgccaccgugugcggcccuaaaaagagcaccaaccuggugaagaacaagugcgugaacuucaauuucaacggccugaccggcaccggcgugcugaccgagagcaacaagaaguuccugcccuuccagcaguucggccgggauaucgccgacaccaccgacgccgugcgggacccccagacccuggagauccuggacaucaccccaugcagcuucggcggcgucagcgugaucacccccggcacaaacaccagcaaccagguggcagugcuguaccagggagugaacugcaccgaggugcccguggccauccacgccgaccagcugacccccaccuggcggguguacagcaccggcagcaacguguuccagacccgggccggcugccugaucggcgccgagcacgugaacaacuccuacgagugcgacauccccaucggcgccggcaucugcgcuagcuaccagacccagaccaacagcccccggcgggcccggagcguggccagccagagcaucaucgccuacaccaugagcuuaggcgccgagaacagcguggccuacagcaacaacagcaucgccaucccuaccaacuucaccaucagcgugaccaccgagauacugcccgugagcaugaccaagaccagcguggacuguaccauguacaucugcggcgacagcaccgagugcagcaaccugcugcugcaguacggcagcuucugcacccagcugaaccgggcgcugaccggcaucgccguggagcaggacaagaacacccaagagguguucgcccaggugaagcagaucuacaagacucccccaaucaaggacuucggcggcuucaacuucagccagauccugcccgaccccagcaagcccagcaagcggagcuucaucgaggaccugcuguucaacaaggugacccuggccgacgccggcuucaucaagcaguacggcgacugccugggggauaucgccgcccgggaccugaucugcgcucagaaguucaacggccugaccgugcugcccccucugcugaccgacgagaugaucgcccaguacaccagcgcccugcuugccggcaccaucaccagcggcuggaccuucggcgccggcgccgcacugcagauccccuucgccaugcagauggccuaccgguucaacggcaucggcgugacccagaacgugcuguacgagaaccagaagcugaucgccaaccaguucaacagcgccaucggcaagauccaggacagccugagcagcaccgccagcgcccugggcaagcugcaggacguggugaaccagaacgcccaggcucugaacacccuggugaagcagcugagcagcaacuucggcgccaucagcucagugcugaaugacauccugagcaggcuggaucccccagaggccgaggugcagaucgaccggcugaucaccggccggcugcagagccugcagaccuacgugacccagcagcugauccgggccgccgagauccgggccagcgccaaccuggccgcaaccaagaugagcgagugcgugcugggccagagcaagcggguggacuuuugcggcaagggcuaccaccugaugagcuucccccagagcgcuccccacggcgugguguuccuccacgucacauacgugcccgcccaggagaagaacuucaccaccgcccccgccauuugccacgacggcaaggcccacuucccccgggagggaguguucgugagcaacggcacccacugguucgugacccagcggaacuucuacgagccucagaucaucaccaccgacaacaccuucgugagcggcaacugcgacguggugaucggcaucgugaacaacaccguguacgacccccugcagcccgagcuggacagcuucaaggaggagcuggacaaguacuucaagaaccacaccagcccagacguggaccugggcgacaucagcggcaucaacgccagcguggugaacauccagaaggagaucgaccggcugaacgagguggccaagaaccugaacgagagccugaucgaccugcaggagcugggcaaguacgagcaguacaucaaguggcccugguacaucuggcugggcuucaucgccggccugaucgccaucgugauggugaccaucaugcugugcugcaugaccagcugcuguagcugccugaagggcugcugcagcugcggcagcugcugcaaguucgacgaggacgacagcgagcccgugcugaagggcgugaagcugcacuacaccugaggacuagucccuguucccagagcccacuuuuuuuucuuuuuuugaaauaaaauagccugucuuucagaucuaaaaaaaaaaaaaaaaaaaaaaaaaaaaaaaaaaaaaaaaaaaaaaaaaaaaaaaaaaaaaaaaaaaaaaaaaaaaaaaaaaaaaaaaaaaaaaaaaaaa

SEQ ID NO: 25114 - RNA, 4167 nt, Artificial Sequence
  SARS-CoV-2/Wuhan/WIV05/2019__EPI_ISL_402128 spike protein mRNA gc (1-1273)(K986P_V987P_N439K_D614G)
aggagagggcgcuuggcuugcaaggacccugagcugcggcauugaagcacacccaacccaacucgacugaagucagccucacugaaccggaucugagaaucuucucucucugggcuugccagggcucuccgaaccuagcuagcauccucuucaauuccaacuagaaagcuuaccauguucguguuccuggugcugcugccccuggugagcagccagugcgugaaccugaccacccggacccagcugcccccugccuacaccaacagcuucacccggggcguguacuaccccgacaagguguuccggagcagcgugcugcacagcacccaggaccuguuccugcccuucuucagcaacgugaccugguuccacgccauccacgugagcggcaccaacggcaccaagcgguucgacaacccagugcugcccuucaacgacggcguguacuucgccagcaccgagaagucaaacaucauccggggcuggaucuucggcaccacccuggacagcaagacacagagccugcugaucgugaacaacgccaccaacguggugaucaaggugugcgaguuucaguucugcaacgaccccuuccugggcguguacuaccacaagaacaacaagagcuggauggagagcgaguuccgggucuacagcagcgcuaacaauugcaccuucgaguacgugagccagcccuuccugauggaccucgagggcaagcagggcaacuucaagaaccugcgggaguucguguucaagaacaucgauggcuacuucaagaucuacagcaagcacacccccaucaaccuggugcgggaccugccccagggauucagcgcccuggagccucugguggaccugcccaucggcaucaacaucaccagguuccagacccugcuggcccugcaccggagcuaccugacccccggcgacagcagcagcggcuggaccgccggcgccgccgcauacuacgugggcuaccugcagccacggaccuuccugcugaaguacaacgagaacggcaccaucaccgacgccguggacugcgcccuggacccccugagcgagaccaagugcacccuaaagagcuucaccguggagaagggcaucuaccagaccagcaacuuccgggugcagcccacugagagcaucgugcgguuccccaacauuaccaaccugugucccuucggcgagguguucaacgccacccgguucgccagcguguacgccuggaaccggaagcggaucagcaacugcguggccgacuacagcgugcuguacaacagcgccagcuucagcaccuucaagugcuacggcgugagcccuaccaagcugaacgaccugugcuucaccaacguguacgcugacagcuucgugauccggggcgacgaggugcggcagaucgcccccggccagaccggcaagaucgccgacuacaacuacaagcugcccgacgacuucaccggcugcgugaucgccuggaacagcaagaaccuggacagcaaggugggcggcaacuacaacuaccuguaccggcuguuccguaagagcaaccugaagccauucgagcgggacaucagcaccgagaucuaccaggccggcagcacccccugcaacgguguggagggcuuuaacugcuacuucccccugcagagcuacggcuuccagcccaccaacggcgugggcuaccagcccuaccgggugguggugcugagcuucgagcugcugcacgcccccgccaccgugugcggcccuaaaaagagcaccaaccuggugaagaacaagugcgugaacuucaacuucaauggccugaccggcaccggcgugcugaccgagagcaacaagaaguuccugcccuuccagcaguucggccgggauaucgccgacaccaccgacgcagugcgggacccccagacccuggagauccuggacaucaccccaugcagcuucggcggcgugagcgucaucacccccggcacaaacaccagcaaccagguggccgugcuguaccagggagugaacugcaccgaggugcccguggccauccacgccgaccagcugacccccaccuggcggguguacagcaccggcagcaacguguuccagacccgggccggcugccugaucggcgccgagcacgugaacaacuccuacgagugcgacauccccaucggcgcuggcaucugcgccagcuaccagacccagaccaacagcccccggcgggcccggagcguggccagccagagcaucaucgccuacaccaugagcuuaggcgccgagaacagcguggccuacagcaacaacagcaucgcgaucccuaccaacuucaccaucagcgugaccaccgagauacugcccgugagcaugaccaagaccagcguggacuguaccauguacaucugcggcgacagcaccgagugcagcaaccugcugcugcaguacggcagcuucugcacccagcugaaccgggcccugaccggcaucgccguggagcaggacaagaacacccaagagguguucgcccaggugaagcagaucuacaagacucccccaaucaaggacuucggcggcuucaacuucagccagauccugcccgaccccagcaagcccagcaagcggagcuucaucgaggaccugcuguucaacaaggugacccuggccgacgccggcuucaucaagcaguacggcgacugccugggggauaucgccgcucgggaccugaucugcgcccagaaguucaacggccugaccgugcugcccccucugcugaccgacgagaugaucgcccaguacaccagcgcccugcuugccggcaccaucaccagcggcuggaccuucggcgccggcgcagcccugcagauccccuucgccaugcagauggccuaccgguucaacggcaucggcgugacccagaacgugcuguacgagaaccagaagcugaucgccaaccaguucaacagcgccaucggcaagauccaggacagccugagcagcaccgccagcgcccugggcaagcugcaggacguggugaaccagaacgcucaggcccugaacacccuggugaagcagcugagcagcaacuucggcgccaucagcucagugcugaacgacauccugagcaggcuggaucccccagaggccgaggugcagaucgaccggcugaucaccggccggcugcagagccugcagaccuacgugacccagcagcugauccgggccgccgagauccgggccagcgccaaucuggcagccaccaagaugagcgagugcgugcugggccagagcaagcggguggacuuuugcggcaagggcuaccaccugaugagcuucccccagagcgcuccccacggcgugguguuccuccacgugacauacguccccgcccaggagaagaacuucaccaccgcccccgccauuugccacgacggcaaggcccacuucccccgggagggaguguucgugagcaacggcacccacugguucgugacccagcggaacuucuacgagccucagaucaucaccaccgacaacaccuucgugagcggcaacugcgacguggugaucggcaucgugaacaacaccguguacgacccccugcagcccgagcuggacagcuucaaggaggagcuggacaaguacuucaagaaccacaccagcccagacguggaccugggcgacaucagcggcaucaacgccagcguggugaacauccagaaggagaucgaccggcugaacgagguggccaagaaccugaacgagagccugaucgaccugcaggagcugggcaaguacgagcaguacaucaaguggcccugguacaucuggcugggcuucaucgccggccugaucgccaucgugauggugaccaucaugcugugcugcaugaccagcugcuguagcugccugaagggcugcugcagcugcggcagcugcugcaaguucgacgaggacgacagcgagcccgugcugaagggcgugaagcugcacuacaccugaggacuagucccuguucccagagcccacuuuuuuuucuuuuuuugaaauaaaauagccugucuuucagaucuaaaaaaaaaaaaaaaaaaaaaaaaaaaaaaaaaaaaaaaaaaaaaaaaaaaaaaaaaaaaaaaaaaaaaaaaaaaaaaaaaaaaaaaaaaaaaaaaaaaa

SEQ ID NO: 25115 - RNA, 4167 nt, Artificial Sequence
  SARS-CoV-2/Wuhan/WIV05/2019__EPI_ISL_402128 spike protein mRNA gc (1-1273)(K986P_V987P_S477N_D614G)
aggagagggcgcuuggcuugcaaggacccugagcugcggcauugaagcacacccaacccaacucgacugaagucagccucacugaaccggaucugagaaucuucucucucugggcuugccagggcucuccgaaccuagcuagcauccucuucaauuccaacuagaaagcuuaccauguucguguuccuggugcugcugccccuggugagcagccagugcgugaaccugaccacccggacccagcugcccccugccuacaccaacagcuucacccggggcguguacuaccccgacaagguguuccggagcagcgugcugcacagcacccaggaccuguuccugcccuucuucagcaacgugaccugguuccacgccauccacgugagcggcaccaacggcaccaagcgguucgacaacccagugcugcccuucaacgacggcguguacuucgccagcaccgagaagucaaacaucauccggggcuggaucuucggcaccacccuggacagcaagacacagagccugcugaucgugaacaacgccaccaacguggugaucaaggugugcgaguuucaguucugcaacgaccccuuccugggcguguacuaccacaagaacaacaagagcuggauggagagcgaguuccgggucuacagcagcgcuaacaauugcaccuucgaguacgugagccagcccuuccugauggaccucgagggcaagcagggcaacuucaagaaccugcgggaguucguguucaagaacaucgauggcuacuucaagaucuacagcaagcacacccccaucaaccuggugcgggaccugccccagggauucagcgcccuggagccucugguggaccugcccaucggcaucaacaucaccagguuccagacccugcuggcccugcaccggagcuaccugacccccggcgacagcagcagcggcuggaccgccggcgccgccgcauacuacgugggcuaccugcagccacggaccuuccugcugaaguacaacgagaacggcaccaucaccgacgccguggacugcgcccuggacccccugagcgagaccaagugcacccuaaagagcuucaccguggagaagggcaucuaccagaccagcaacuuccgggugcagcccacugagagcaucgugcgguuccccaacauuaccaaccugugucccuucggcgagguguucaacgccacccgguucgccagcguguacgccuggaaccggaagcggaucagcaacugcguggccgacuacagcgugcuguacaacagcgccagcuucagcaccuucaagugcuacggcgugagcccuaccaagcugaacgaccugugcuucaccaacguguacgcugacagcuucgugauccggggcgacgaggugcggcagaucgcccccggccagaccggcaagaucgccgacuacaacuacaagcugcccgacgacuucaccggcugcgugaucgccuggaacagcaacaaccuggacagcaaggugggcggcaacuacaacuaccuguaccggcuguuccguaagagcaaccugaagccauucgagcgggacaucagcaccgagaucuaccaggccggcaacacccccugcaacgguguggagggcuuuaacugcuacuucccccugcagagcuacggcuuccagcccaccaacggcgugggcuaccagcccuaccgggugguggugcugagcuucgagcugcugcacgcccccgccaccgugugcggcccuaaaaagagcaccaaccuggugaagaacaagugcgugaauuucaacuucaacggccugaccggcaccggcgugcugaccgagagcaacaagaaguuccugcccuuccagcaguucggccgggauaucgccgacaccaccgacgcagugcgggacccccagacccuggagauccuggacaucaccccaugcagcuucggcggcgugagcgucaucacccccggcacaaacaccagcaaccagguggccgugcuguaccagggagugaacugcaccgaggugcccguggccauccacgccgaccagcugacccccaccuggcggguguacagcaccggcagcaacguguuccagacccgggccggcugccugaucggcgccgagcacgugaacaacagcuacgagugcgacauccccaucggcgcuggcaucugcgccuccuaccagacccagaccaacagcccccggcgggcccggagcguggccagccagagcaucaucgccuacaccaugagcuuaggcgccgagaacagcguggccuacagcaacaacagcaucgcgaucccuaccaacuucaccaucagcgugaccaccgagauacugcccgugagcaugaccaagaccagcguggacuguaccauguacaucugcggcgacagcaccgagugcagcaaccugcugcugcaguacggcagcuucugcacccagcugaaccgggcccugaccggcaucgccguggagcaggacaagaacacccaagagguguucgcccaggugaagcagaucuacaagacucccccaaucaaggacuucggcggcuucaacuucagccagauccugcccgaccccagcaagcccagcaagcggagcuucaucgaggaccugcuguucaacaaggugacccuggccgacgccggcuucaucaagcaguacggcgacugccugggggauaucgccgcucgggaccugaucugcgcccagaaguucaacggccugaccgugcugcccccucugcugaccgacgagaugaucgcccaguacaccagcgcccugcuugccggcaccaucaccagcggcuggaccuucggcgccggcgcagcccugcagauccccuucgccaugcagauggccuaccgguucaacggcaucggcgugacccagaacgugcuguacgagaaccagaagcugaucgccaaccaguucaacagcgccaucggcaagauccaggacagccugagcagcaccgccagcgcccugggcaagcugcaggacguggugaaccagaacgcucaggcccugaacacccuggugaagcagcugagcagcaauuucggcgccaucagcagcgugcugaacgacauccugucaaggcuggaucccccagaggccgaggugcagaucgaccggcugaucaccggccggcugcagagccugcagaccuacgugacccagcagcugauccgggccgccgagauccgggccagcgccaaccuggcagccaccaagaugagcgagugcgugcugggccagagcaagcggguggacuuuugcggcaagggcuaccaccugaugagcuucccccagagcgcuccccacggcgugguguuccuccacgugacauacguccccgcccaggagaagaacuucaccaccgcccccgccauuugccacgacggcaaggcccacuucccccgggagggaguguucgugagcaacggcacccacugguucgugacccagcggaacuucuacgagccucagaucaucaccaccgacaacaccuucgugagcggcaacugcgacguggugaucggcaucgugaacaacaccguguacgacccccugcagcccgagcuggacagcuucaaggaggagcuggacaaguacuucaagaaccacaccagcccagacguggaccugggcgacaucagcggcaucaacgccagcguggugaacauccagaaggagaucgaccggcugaacgagguggccaagaaccugaacgagagccugaucgaccugcaggagcugggcaaguacgagcaguacaucaaguggcccugguacaucuggcugggcuucaucgccggccugaucgccaucgugauggugaccaucaugcugugcugcaugaccagcugcuguagcugccugaagggcugcugcagcugcggcagcugcugcaaguucgacgaggacgacagcgagcccgugcugaagggcgugaagcugcacuacaccugaggacuagucccuguucccagagcccacuuuuuuuucuuuuuuugaaauaaaauagccugucuuucagaucuaaaaaaaaaaaaaaaaaaaaaaaaaaaaaaaaaaaaaaaaaaaaaaaaaaaaaaaaaaaaaaaaaaaaaaaaaaaaaaaaaaaaaaaaaaaaaaaaaaaa

SEQ ID NO: 25116 - RNA, 4167 nt, Artificial Sequence
  SARS-CoV-2/Wuhan/WIV05/2019__EPI_ISL_402128 spike protein mRNA gc (1-1273)(K986P_V987P_N501Y_D614G)
aggagagggcgcuuggcuugcaaggacccugagcugcggcauugaagcacacccaacccaacucgacugaagucagccucacugaaccggaucugagaaucuucucucucugggcuugccagggcucuccgaaccuagcuagcauccucuucaauuccaacuagaaagcuuaccauguucguguuccuggugcugcugccccuggugagcagccagugcgugaaccugaccacccggacccagcugcccccugccuacaccaacagcuucacccggggcguguacuaccccgacaagguguuccggagcagcgugcugcacagcacccaggaccuguuccugcccuucuucagcaacgugaccugguuccacgccauccacgugagcggcaccaacggcaccaagcgguucgacaacccagugcugcccuucaacgacggcguguacuucgccagcaccgagaagucaaacaucauccggggcuggaucuucggcaccacccuggacagcaagacacagagccugcugaucgugaacaacgccaccaacguggugaucaaggugugcgaguuucaguucugcaacgaccccuuccugggcguguacuaccacaagaacaacaagagcuggauggagagcgaguuccgggucuacagcagcgcuaacaauugcaccuucgaguacgugagccagcccuuccugauggaccucgagggcaagcagggcaacuucaagaaccugcgggaguucguguucaagaacaucgauggcuacuucaagaucuacagcaagcacacccccaucaaccuggugcgggaccugccccagggauucagcgcccuggagccucugguggaccugcccaucggcaucaacaucaccagguuccagacccugcuggcccugcaccggagcuaccugacccccggcgacagcagcagcggcuggaccgccggcgccgccgcauacuacgugggcuaccugcagccacggaccuuccugcugaaguacaacgagaacggcaccaucaccgacgccguggacugcgcccuggacccccugagcgagaccaagugcacccuaaagagcuucaccguggagaagggcaucuaccagaccagcaacuuccgggugcagcccacugagagcaucgugcgguuccccaacauuaccaaccugugucccuucggcgagguguucaacgccacccgguucgccagcguguacgccuggaaccggaagcggaucagcaacugcguggccgacuacagcgugcuguacaacagcgccagcuucagcaccuucaagugcuacggcgugagcccuaccaagcugaacgaccugugcuucaccaacguguacgcugacagcuucgugauccggggcgacgaggugcggcagaucgcccccggccagaccggcaagaucgccgacuacaacuacaagcugcccgacgacuucaccggcugcgugaucgccuggaacagcaacaaccuggacagcaaggugggcggcaacuacaacuaccuguaccggcuguuccguaagagcaaccugaagccauucgagcgggacaucagcaccgagaucuaccaggccggcagcacccccugcaacgguguggagggcuuuaacugcuacuucccccugcagagcuacggcuuccagcccaccuacggcgugggcuaccagcccuaccgggugguggugcugagcuucgagcugcugcacgcccccgccaccgugugcggcccuaaaaagagcaccaaccuggugaagaacaagugcgugaacuucaacuucaauggccugaccggcaccggcgugcugaccgagagcaacaagaaguuccugcccuuccagcaguucggccgggauaucgccgacaccaccgacgcagugcgggacccccagacccuggagauccuggacaucaccccaugcagcuucggcggcgugagcgucaucacccccggcacaaacaccagcaaccagguggccgugcuguaccagggagugaacugcaccgaggugcccguggccauccacgccgaccagcugacccccaccuggcggguguacagcaccggcagcaacguguuccagacccgggccggcugccugaucggcgccgagcacgugaacaacuccuacgagugcgacauccccaucggcgcuggcaucugcgccagcuaccagacccagaccaacagcccccggcgggcccggagcguggccagccagagcaucaucgccuacaccaugagcuuaggcgccgagaacagcguggccuacagcaacaacagcaucgcgaucccuaccaacuucaccaucagcgugaccaccgagauacugcccgugagcaugaccaagaccagcguggacuguaccauguacaucugcggcgacagcaccgagugcagcaaccugcugcugcaguacggcagcuucugcacccagcugaaccgggcccugaccggcaucgccguggagcaggacaagaacacccaagagguguucgcccaggugaagcagaucuacaagacucccccaaucaaggacuucggcggcuucaacuucagccagauccugcccgaccccagcaagcccagcaagcggagcuucaucgaggaccugcuguucaacaaggugacccuggccgacgccggcuucaucaagcaguacggcgacugccugggggauaucgccgcucgggaccugaucugcgcccagaaguucaacggccugaccgugcugcccccucugcugaccgacgagaugaucgcccaguacaccagcgcccugcuugccggcaccaucaccagcggcuggaccuucggcgccggcgcagcccugcagauccccuucgccaugcagauggccuaccgguucaacggcaucggcgugacccagaacgugcuguacgagaaccagaagcugaucgccaaccaguucaacagcgccaucggcaagauccaggacagccugagcagcaccgccagcgcccugggcaagcugcaggacguggugaaccagaacgcucaggcccugaacacccuggugaagcagcugagcagcaacuucggcgccaucagcucagugcugaacgacauccugagcaggcuggaucccccagaggccgaggugcagaucgaccggcugaucaccggccggcugcagagccugcagaccuacgugacccagcagcugauccgggccgccgagauccgggccagcgccaaucuggcagccaccaagaugagcgagugcgugcugggccagagcaagcggguggacuuuugcggcaagggcuaccaccugaugagcuucccccagagcgcuccccacggcgugguguuccuccacgugacauacguccccgcccaggagaagaacuucaccaccgcccccgccauuugccacgacggcaaggcccacuucccccgggagggaguguucgugagcaacggcacccacugguucgugacccagcggaacuucuacgagccucagaucaucaccaccgacaacaccuucgugagcggcaacugcgacguggugaucggcaucgugaacaacaccguguacgacccccugcagcccgagcuggacagcuucaaggaggagcuggacaaguacuucaagaaccacaccagcccagacguggaccugggcgacaucagcggcaucaacgccagcguggugaacauccagaaggagaucgaccggcugaacgagguggccaagaaccugaacgagagccugaucgaccugcaggagcugggcaaguacgagcaguacaucaaguggcccugguacaucuggcugggcuucaucgccggccugaucgccaucgugauggugaccaucaugcugugcugcaugaccagcugcuguagcugccugaagggcugcugcagcugcggcagcugcugcaaguucgacgaggacgacagcgagcccgugcugaagggcgugaagcugcacuacaccugaggacuagucccuguucccagagcccacuuuuuuuucuuuuuuugaaauaaaauagccugucuuucagaucuaaaaaaaaaaaaaaaaaaaaaaaaaaaaaaaaaaaaaaaaaaaaaaaaaaaaaaaaaaaaaaaaaaaaaaaaaaaaaaaaaaaaaaaaaaaaaaaaaaaa

SEQ ID NO: 25117 - RNA, 4161 nt, Artificial Sequence
  SARS-CoV-2/Wuhan/WIV05/2019__EPI_ISL_402128 spike protein mRNA gc (1-1273)(K986P_V987P_H69del_V70del_D614G)
aggagagggcgcuuggcuugcaaggacccugagcugcggcauugaagcacacccaacccaacucgacugaagucagccucacugaaccggaucugagaaucuucucucucugggcuugccagggcucuccgaaccuagcuagcauccucuucaauuccaacuagaaagcuuaccauguucguguuccuggugcugcugccccuggugagcagccagugcgugaaccugaccacccggacccagcugcccccugccuacaccaacagcuucacccggggcguguacuaccccgacaagguguuccggagcagcgugcugcacagcacccaggaccuguuccugcccuucuucagcaacgugaccugguuccacgccaucagcggcaccaacggcaccaagcgguucgacaacccagugcugcccuucaacgacggcguguacuucgccagcaccgagaagucaaacaucauccggggcuggaucuucggcaccacccuggacagcaagacacagagccugcugaucgugaacaacgccaccaacguggugaucaaggugugcgaguuucaguucugcaacgaccccuuccugggcguguacuaccacaagaacaacaagagcuggauggagagcgaguuccggguguacagcagcgcuaacaauugcaccuucgaguacgucagccagcccuuccugauggaccucgagggcaagcagggcaacuucaagaaccugcgggaguucguguucaagaacaucgauggcuacuucaagaucuacagcaagcacacccccaucaaccuggugcgggaccugccccagggauucagcgcccuggagccucugguggaccugcccaucggcaucaacaucaccagguuccagacccugcuggcccugcaccggagcuaccugacccccggcgacagcagcagcggcuggaccgccggcgccgccgcauacuacgugggcuaccugcagccacggaccuuccugcugaaguacaacgagaacggcaccaucaccgacgccguggacugcgcccuggacccccugagcgagaccaagugcacccuaaagagcuucaccguggagaagggcaucuaccagaccagcaacuuccgggugcagcccacugagagcaucgugcgguuccccaacauuaccaaccugugucccuucggcgagguguucaacgccacccgguucgccagcguguacgccuggaaccggaagcggaucagcaacugcguggccgacuacagcgugcuguacaacagcgccagcuucagcaccuucaagugcuacggcgugagcccuaccaagcugaacgaccugugcuucaccaacguguacgcugacagcuucgugauccggggcgacgaggugcggcagaucgcccccggccagaccggcaagaucgccgacuacaacuacaagcugcccgacgacuucaccggcugcgugaucgccuggaacagcaacaaccuggacagcaaggugggcggcaacuacaacuaccuguaccggcuguuccguaagagcaaccugaagccauucgagcgggacaucagcaccgagaucuaccaggccggcagcacccccugcaacgguguggagggcuuuaacugcuacuucccccugcagagcuacggcuuccagcccaccaacggcgugggcuaccagcccuaccgggugguggugcugagcuucgagcugcugcacgcccccgccaccgugugcggcccuaaaaagagcaccaaccuggugaagaacaagugcgugaacuucaauuucaacggccugaccggcaccggcgugcugaccgagagcaacaagaaguuccugcccuuccagcaguucggccgggauaucgccgacaccaccgacgcagugcgggacccccagacccuggagauccuggacaucaccccaugcagcuucggcggcgugagcgugaucacccccggcacaaacaccagcaaccaggucgccgugcuguaccagggagugaacugcaccgaggugcccguggccauccacgccgaccagcugacccccaccuggcggguguacagcaccggcagcaacguguuccagacccgggccggcugccugaucggcgccgagcacgugaacaacuccuacgagugcgacauccccaucggcgcuggcaucugcgccagcuaccagacccagaccaacagcccccggcgggcccggagcguggccagccagagcaucaucgccuacaccaugagcuuaggcgccgagaacagcguggccuacagcaacaacagcaucgcgaucccuaccaacuucaccaucagcgugaccaccgagauacugcccgugagcaugaccaagaccagcguggacuguaccauguacaucugcggcgacagcaccgagugcagcaaccugcugcugcaguacggcagcuucugcacccagcugaaccgggcccugaccggcaucgccguggagcaggacaagaacacccaagagguguucgcccaggugaagcagaucuacaagacucccccaaucaaggacuucggcggcuucaacuucagccagauccugcccgaccccagcaagcccagcaagcggagcuucaucgaggaccugcuguucaacaaggugacccuggccgacgccggcuucaucaagcaguacggcgacugccugggggauaucgccgcucgggaccugaucugcgcccagaaguucaacggccugaccgugcugcccccucugcugaccgacgagaugaucgcccaguacaccagcgcccugcuugccggcaccaucaccagcggcuggaccuucggcgccggcgcagcccugcagauccccuucgccaugcagauggccuaccgguucaacggcaucggcgugacccagaacgugcuguacgagaaccagaagcugaucgccaaccaguucaacagcgccaucggcaagauccaggacagccugagcagcaccgccagcgcccugggcaagcugcaggacguggugaaccagaacgcucaggcccugaacacccuggugaagcagcugagcagcaacuucggcgccaucagcucagugcugaaugacauccugagcaggcuggaucccccagaggccgaggugcagaucgaccggcugaucaccggccggcugcagagccugcagaccuacgugacccagcagcugauccgggccgccgagauccgggccagcgccaaccuggcagccaccaagaugagcgagugcgugcugggccagagcaagcggguggacuuuugcggcaagggcuaccaccugaugagcuucccccagagcgcuccccacggcgugguguuccuccacgugacauacgugcccgcccaggagaagaacuucaccaccgcccccgccauuugccacgacggcaaggcccacuucccccgggagggagucuucgugagcaacggcacccacugguucgugacccagcggaacuucuacgagccucagaucaucaccaccgacaacaccuucgugagcggcaacugcgacguggugaucggcaucgugaacaacaccguguacgacccccugcagcccgagcuggacagcuucaaggaggagcuggacaaguacuucaagaaccacaccagcccagacguggaccugggcgacaucagcggcaucaacgccagcguggugaacauccagaaggagaucgaccggcugaacgagguggccaagaaccugaacgagagccugaucgaccugcaggagcugggcaaguacgagcaguacaucaaguggcccugguacaucuggcugggcuucaucgccggccugaucgccaucgugauggugaccaucaugcugugcugcaugaccagcugcuguagcugccugaagggcugcugcagcugcggcagcugcugcaaguucgacgaggacgacagcgagcccgugcugaagggcgugaagcugcacuacaccugaggacuagucccuguucccagagcccacuuuuuuuucuuuuuuugaaauaaaauagccugucuuucagaucuaaaaaaaaaaaaaaaaaaaaaaaaaaaaaaaaaaaaaaaaaaaaaaaaaaaaaaaaaaaaaaaaaaaaaaaaaaaaaaaaaaaaaaaaaaaaaaaaaaaa

SEQ ID NO: 25118 - RNA, 4167 nt, Artificial Sequence
  SARS-CoV-2/Wuhan/WIV05/2019__EPI_ISL_402128 spike protein mRNA gc (1-1273)(K986P_V987P_Y453F_D614G)
aggagagggcgcuuggcuugcaaggacccugagcugcggcauugaagcacacccaacccaacucgacugaagucagccucacugaaccggaucugagaaucuucucucucugggcuugccagggcucuccgaaccuagcuagcauccucuucaauuccaacuagaaagcuuaccauguucguguuccuggugcugcugccccuggugagcagccagugcgugaaccugaccacccggacccagcugcccccugccuacaccaacagcuucacccggggcguguacuaccccgacaagguguuccggagcagcgugcugcacagcacccaggaccuguuccugcccuucuucagcaacgugaccugguuccacgccauccacgugagcggcaccaacggcaccaagcgguucgacaacccagugcugcccuucaacgacggcguguacuucgccagcaccgagaagucaaacaucauccggggcuggaucuucggcaccacccuggacagcaagacacagagccugcugaucgugaacaacgccaccaacguggugaucaaggugugcgaguuucaguucugcaacgaccccuuccugggcguguacuaccacaagaacaacaagagcuggauggagagcgaguuccgggucuacagcagcgcuaacaauugcaccuucgaguacgugagccagcccuuccugauggaccucgagggcaagcagggcaacuucaagaaccugcgggaguucguguucaagaacaucgauggcuacuucaagaucuacagcaagcacacccccaucaaccuggugcgggaccugccccagggauucagcgcccuggagccucugguggaccugcccaucggcaucaacaucaccagguuccagacccugcuggcccugcaccggagcuaccugacccccggcgacagcagcagcggcuggaccgccggcgccgccgcauacuacgugggcuaccugcagccacggaccuuccugcugaaguacaacgagaacggcaccaucaccgacgccguggacugcgcccuggacccccugagcgagaccaagugcacccuaaagagcuucaccguggagaagggcaucuaccagaccagcaacuuccgggugcagcccacugagagcaucgugcgguuccccaacauuaccaaccugugucccuucggcgagguguucaacgccacccgguucgccagcguguacgccuggaaccggaagcggaucagcaacugcguggccgacuacagcgugcuguacaacagcgccagcuucagcaccuucaagugcuacggcgugagcccuaccaagcugaacgaccugugcuucaccaacguguacgcugacagcuucgugauccggggcgacgaggugcggcagaucgcccccggccagaccggcaagaucgccgacuacaacuacaagcugcccgacgacuucaccggcugcgugaucgccuggaacagcaacaaccuggacagcaaggugggcggcaacuacaacuaccuguuccggcuguuccguaagagcaaccugaagccauuugagcgggacaucagcaccgagaucuaccaggccggcagcacccccugcaacgguguggagggcuucaacugcuacuucccccugcagagcuacggcuuccagcccaccaacggcgugggcuaccagcccuaccgggugguggugcugagcuucgagcugcugcacgcccccgccaccgugugcggcccuaaaaagagcaccaaccuggugaagaacaagugcgugaacuucaauuucaacggccugaccggcaccggcgugcugaccgagagcaacaagaaguuccugcccuuccagcaguucggccgggauaucgccgacaccaccgacgcagugcgggacccccagacccuggagauccuggacaucaccccaugcagcuucggcggcgugagcgucaucacccccggcacaaacaccagcaaccagguggccgugcuguaccagggagugaacugcaccgaggugcccguggccauccacgccgaccagcugacccccaccuggcggguguacagcaccggcagcaacguguuccagacccgggccggcugccugaucggcgccgagcacgugaacaacuccuacgagugcgacauccccaucggcgcuggcaucugcgccagcuaccagacccagaccaacagcccccggcgggcccggagcguggccagccagagcaucaucgccuacaccaugagcuuaggcgccgagaacagcguggccuacagcaacaacagcaucgcgaucccuaccaacuucaccaucagcgugaccaccgagauacugcccgugagcaugaccaagaccagcguggacuguaccauguacaucugcggcgacagcaccgagugcagcaaccugcugcugcaguacggcagcuucugcacccagcugaaccgggcccugaccggcaucgccguggagcaggacaagaacacccaagagguguucgcccaggugaagcagaucuacaagacucccccaaucaaggacuucggcggcuucaacuucagccagauccugcccgaccccagcaagcccagcaagcggagcuucaucgaggaccugcuguucaacaaggugacccuggccgacgccggcuucaucaagcaguacggcgacugccugggggauaucgccgcucgggaccugaucugcgcccagaaguucaacggccugaccgugcugcccccucugcugaccgacgagaugaucgcccaguacaccagcgcccugcuugccggcaccaucaccagcggcuggaccuucggcgccggcgcagcccugcagauccccuucgccaugcagauggccuaccgguucaacggcaucggcgugacccagaacgugcuguacgagaaccagaagcugaucgccaaccaguucaacagcgccaucggcaagauccaggacagccugagcagcaccgccagcgcccugggcaagcugcaggacguggugaaccagaacgcucaggcccugaacacccuggugaagcagcugagcagcaacuuuggcgccaucagcucagugcugaaugacauccugagcaggcuggaucccccagaggccgaggugcagaucgaccggcugaucaccggccggcugcagagccugcagaccuacgugacccagcagcugauccgggccgccgagauccgggccagcgccaaccuggcagccaccaagaugagcgagugcgugcugggccagagcaagcggguggacuucugcggcaagggcuaccaccugaugagcuucccccagagcgcuccccacggcgugguguuccuccacgugacauacguccccgcccaggagaagaacuucaccaccgcccccgccauuugccacgacggcaaggcccacuucccccgggagggaguguucgugagcaacggcacccacugguucgugacccagcggaacuucuacgagccucagaucaucaccaccgacaacaccuucgugagcggcaacugcgacguggugaucggcaucgugaacaacaccguguacgacccccugcagcccgagcuggacagcuucaaggaggagcuggacaaguacuucaagaaccacaccagcccagacguggaccugggcgacaucagcggcaucaacgccagcguggugaacauccagaaggagaucgaccggcugaacgagguggccaagaaccugaacgagagccugaucgaccugcaggagcugggcaaguacgagcaguacaucaaguggcccugguacaucuggcugggcuucaucgccggccugaucgccaucgugauggugaccaucaugcugugcugcaugaccagcugcuguagcugccugaagggcugcugcagcugcggcagcugcugcaaguucgacgaggacgacagcgagcccgugcugaagggcgugaagcugcacuacaccugaggacuagucccuguucccagagcccacuuuuuuuucuuuuuuugaaauaaaauagccugucuuucagaucuaaaaaaaaaaaaaaaaaaaaaaaaaaaaaaaaaaaaaaaaaaaaaaaaaaaaaaaaaaaaaaaaaaaaaaaaaaaaaaaaaaaaaaaaaaaaaaaaaaaa

SEQ ID NO: 25119 - RNA, 4167 nt, Artificial Sequence
  SARS-CoV-2/Wuhan/WIV05/2019__EPI_ISL_402128 spike protein mRNA gc (1-1273)(K986P_V987P_D614G_I692V)
aggagagggcgcuuggcuugcaaggacccugagcugcggcauugaagcacacccaacccaacucgacugaagucagccucacugaaccggaucugagaaucuucucucucugggcuugccagggcucuccgaaccuagcuagcauccucuucaauuccaacuagaaagcuuaccauguucguguuccuggugcugcugccccuggugagcagccagugcgugaaccugaccacccggacccagcugcccccugccuacaccaacagcuucacccggggcguguacuaccccgacaagguguuccggagcagcgugcugcacagcacccaggaccuguuccugcccuucuucagcaacgugaccugguuccacgccauccacgugagcggcaccaacggcaccaagcgguucgacaacccagugcugcccuucaacgacggcguguacuucgccagcaccgagaagucaaacaucauccggggcuggaucuucggcaccacccuggacagcaagacacagagccugcugaucgugaacaacgccaccaacguggugaucaaggugugcgaguuucaguucugcaacgaccccuuccugggcguguacuaccacaagaacaacaagagcuggauggagagcgaguuccgggucuacagcagcgcuaacaauugcaccuucgaguacgugagccagcccuuccugauggaccucgagggcaagcagggcaacuucaagaaccugcgggaguucguguucaagaacaucgauggcuacuucaagaucuacagcaagcacacccccaucaaccuggugcgggaccugccccagggauucagcgcccuggagccucugguggaccugcccaucggcaucaacaucaccagguuccagacccugcuggcccugcaccggagcuaccugacccccggcgacagcagcagcggcuggaccgccggcgccgccgcauacuacgugggcuaccugcagccacggaccuuccugcugaaguacaacgagaacggcaccaucaccgacgccguggacugcgcccuggacccccugagcgagaccaagugcacccuaaagagcuucaccguggagaagggcaucuaccagaccagcaacuuccgggugcagcccacugagagcaucgugcgguuccccaacauuaccaaccugugucccuucggcgagguguucaacgccacccgguucgccagcguguacgccuggaaccggaagcggaucagcaacugcguggccgacuacagcgugcuguacaacagcgccagcuucagcaccuucaagugcuacggcgugagcccuaccaagcugaacgaccugugcuucaccaacguguacgcugacagcuucgugauccggggcgacgaggugcggcagaucgcccccggccagaccggcaagaucgccgacuacaacuacaagcugcccgacgacuucaccggcugcgugaucgccuggaacagcaacaaccuggacagcaaggugggcggcaacuacaacuaccuguaccggcuguuccguaagagcaaccugaagccauucgagcgggacaucagcaccgagaucuaccaggccggcagcacccccugcaacgguguggagggcuuuaacugcuacuucccccugcagagcuacggcuuccagcccaccaacggcgugggcuaccagcccuaccgggugguggugcugagcuucgagcugcugcacgcccccgccaccgugugcggcccuaaaaagagcaccaaccuggugaagaacaagugcgugaacuucaauuucaacggccugaccggcaccggcgugcugaccgagagcaacaagaaguuccugcccuuccagcaguucggccgggauaucgccgacaccaccgacgcagugcgggacccccagacccuggagauccuggacaucaccccaugcagcuucggcggcgugagcgucaucacccccggcacaaacaccagcaaccagguggccgugcuguaccagggagugaacugcaccgaggugcccguggccauccacgccgaccagcugacccccaccuggcggguguacagcaccggcagcaacguguuccagacccgggccggcugccugaucggcgccgagcacgugaacaacuccuacgagugcgacauccccaucggcgcuggcaucugcgccagcuaccagacccagaccaacagcccccggcgggcccggagcguggccagccagagcgugaucgccuacaccaugagcuuaggcgccgagaacagcguggccuacagcaacaacagcaucgcgaucccuaccaacuucaccaucagcgugaccaccgagauccugcccgugagcaugaccaagaccagcguggacuguaccauguacauaugcggcgacagcaccgagugcagcaaccugcugcugcaguacggcagcuucugcacccagcugaaccgggcccugaccggcaucgccguggagcaggacaagaacacccaagagguguucgcccaggugaagcagaucuacaagacucccccaaucaaggacuucggcggcuucaacuucagccagauccugcccgaccccagcaagcccagcaagcggagcuucaucgaggaccugcuguucaacaaggugacccuggccgacgccggcuucaucaagcaguacggcgacugccugggggauaucgccgcucgggaccugaucugcgcccagaaguucaacggccugaccgugcugcccccucugcugaccgacgagaugaucgcccaguacaccagcgcccugcuugccggcaccaucaccagcggcuggaccuucggcgccggcgcagcccugcagauccccuucgccaugcagauggccuaccgguucaacggcaucggcgugacccagaacgugcuguacgagaaccagaagcugaucgccaaccaguucaacagcgccaucggcaagauccaggacagccugagcagcaccgccagcgcccugggcaagcugcaggacguggugaaccagaacgcucaggcccugaacacccuggugaagcagcugagcagcaacuucggcgccaucagcucagugcugaaugacauccugagcaggcuggaucccccagaggccgaggugcagaucgaccggcugaucaccggccggcugcagagccugcagaccuacgugacccagcagcugauccgggccgccgagauccgggccagcgccaaccuggcagccaccaagaugagcgagugcgugcugggccagagcaagcggguggacuuuugcggcaagggcuaccaccugaugagcuucccccagagcgcuccccacggcgugguguuccuccacgucacauacgugcccgcccaggagaagaacuucaccaccgcccccgccaucugccacgacggcaaggcccacuucccccgggagggaguguucgugagcaacggcacccacugguucgugacccagcggaacuucuacgagccucagauuaucaccaccgacaacaccuucgugagcggcaacugcgacguggugaucggcaucgugaacaacaccguguacgacccccugcagcccgagcuggacagcuucaaggaggagcuggacaaguacuucaagaaccacaccagcccagacguggaccugggcgacaucagcggcaucaacgccagcguggugaacauccagaaggagaucgaccggcugaacgagguggccaagaaccugaacgagagccugaucgaccugcaggagcugggcaaguacgagcaguacaucaaguggcccugguacaucuggcugggcuucaucgccggccugaucgccaucgugauggugaccaucaugcugugcugcaugaccagcugcuguagcugccugaagggcugcugcagcugcggcagcugcugcaaguucgacgaggacgacagcgagcccgugcugaagggcgugaagcugcacuacaccugaggacuagucccuguucccagagcccacuuuuuuuucuuuuuuugaaauaaaauagccugucuuucagaucuaaaaaaaaaaaaaaaaaaaaaaaaaaaaaaaaaaaaaaaaaaaaaaaaaaaaaaaaaaaaaaaaaaaaaaaaaaaaaaaaaaaaaaaaaaaaaaaaaaaa

SEQ ID NO: 25120 - RNA, 4167 nt, Artificial Sequence
  SARS-CoV-2/Wuhan/WIV05/2019__EPI_ISL_402128 spike protein mRNA gc (1-1273)(K986P_V987P_D614G_M1229I)
aggagagggcgcuuggcuugcaaggacccugagcugcggcauugaagcacacccaacccaacucgacugaagucagccucacugaaccggaucugagaaucuucucucucugggcuugccagggcucuccgaaccuagcuagcauccucuucaauuccaacuagaaagcuuaccauguucguguuccuggugcugcugccccuggugagcagccagugcgugaaccugaccacccggacccagcugcccccugccuacaccaacagcuucacccggggcguguacuaccccgacaagguguuccggagcagcgugcugcacagcacccaggaccuguuccugcccuucuucagcaacgugaccugguuccacgccauccacgugagcggcaccaacggcaccaagcgguucgacaacccagugcugcccuucaacgacggcguguacuucgccagcaccgagaagucaaacaucauccggggcuggaucuucggcaccacccuggacagcaagacacagagccugcugaucgugaacaacgccaccaacguggugaucaaggugugcgaguuucaguucugcaacgaccccuuccugggcguguacuaccacaagaacaacaagagcuggauggagagcgaguuccgggucuacagcagcgcuaacaauugcaccuucgaguacgugagccagcccuuccugauggaccucgagggcaagcagggcaacuucaagaaccugcgggaguucguguucaagaacaucgauggcuacuucaagaucuacagcaagcacacccccaucaaccuggugcgggaccugccccagggauucagcgcccuggagccucugguggaccugcccaucggcaucaacaucaccagguuccagacccugcuggcccugcaccggagcuaccugacccccggcgacagcagcagcggcuggaccgccggcgccgccgcauacuacgugggcuaccugcagccacggaccuuccugcugaaguacaacgagaacggcaccaucaccgacgccguggacugcgcccuggacccccugagcgagaccaagugcacccuaaagagcuucaccguggagaagggcaucuaccagaccagcaacuuccgggugcagcccacugagagcaucgugcgguuccccaacauuaccaaccugugucccuucggcgagguguucaacgccacccgguucgccagcguguacgccuggaaccggaagcggaucagcaacugcguggccgacuacagcgugcuguacaacagcgccagcuucagcaccuucaagugcuacggcgugagcccuaccaagcugaacgaccugugcuucaccaacguguacgcugacagcuucgugauccggggcgacgaggugcggcagaucgcccccggccagaccggcaagaucgccgacuacaacuacaagcugcccgacgacuucaccggcugcgugaucgccuggaacagcaacaaccuggacagcaaggugggcggcaacuacaacuaccuguaccggcuguuccguaagagcaaccugaagccauucgagcgggacaucagcaccgagaucuaccaggccggcagcacccccugcaacgguguggagggcuuuaacugcuacuucccccugcagagcuacggcuuccagcccaccaacggcgugggcuaccagcccuaccgggugguggugcugagcuucgagcugcugcacgcccccgccaccgugugcggcccuaaaaagagcaccaaccuggugaagaacaagugcgugaacuucaauuucaacggccugaccggcaccggcgugcugaccgagagcaacaagaaguuccugcccuuccagcaguucggccgggauaucgccgacaccaccgacgcagugcgggacccccagacccuggagauccuggacaucaccccaugcagcuucggcggcgugagcgucaucacccccggcacaaacaccagcaaccagguggccgugcuguaccagggagugaacugcaccgaggugcccguggccauccacgccgaccagcugacccccaccuggcggguguacagcaccggcagcaacguguuccagacccgggccggcugccugaucggcgccgagcacgugaacaacuccuacgagugcgacauccccaucggcgcuggcaucugcgccagcuaccagacccagaccaacagcccccggcgggcccggagcguggccagccagagcaucaucgccuacaccaugagcuuaggcgccgagaacagcguggccuacagcaacaacagcaucgcgaucccuaccaacuucaccaucagcgugaccaccgagauacugcccgugagcaugaccaagaccagcguggacuguaccauguacaucugcggcgacagcaccgagugcagcaaccugcugcugcaguacggcagcuucugcacccagcugaaccgggcccugaccggcaucgccguggagcaggacaagaacacccaagagguguucgcccaggugaagcagaucuacaagacucccccaaucaaggacuucggcggcuucaacuucagccagauccugcccgaccccagcaagcccagcaagcggagcuucaucgaggaccugcuguucaacaaggugacccuggccgacgccggcuucaucaagcaguacggcgacugccugggggauaucgccgcucgggaccugaucugcgcccagaaguucaacggccugaccgugcugcccccucugcugaccgacgagaugaucgcccaguacaccagcgcccugcuugccggcaccaucaccagcggcuggaccuucggcgccggcgcagcccugcagauccccuucgccaugcagauggccuaccgguucaacggcaucggcgugacccagaacgugcuguacgagaaccagaagcugaucgccaaccaguucaacagcgccaucggcaagauccaggacagccugagcagcaccgccagcgcccugggcaagcugcaggacguggugaaccagaacgcucaggcccugaacacccuggugaagcagcugagcagcaacuucggcgccaucagcucagugcugaaugacauccugagcaggcuggaucccccagaggccgaggugcagaucgaccggcugaucaccggccggcugcagagccugcagaccuacgugacccagcagcugauccgggccgccgagauccgggccagcgccaaccuggcagccaccaagaugagcgagugcgugcugggccagagcaagcggguggacuuuugcggcaagggcuaccaccugaugagcuucccccagagcgcuccccacggcgugguguuccuccacgugacauacguccccgcccaggagaagaacuucaccaccgcccccgccauuugccacgacggcaaggcccacuucccccgggagggaguguucgugagcaacggcacccacugguucgugacccagcggaacuucuacgagccucagaucaucaccaccgacaacaccuucgugagcggcaacugcgacguggugaucggcaucgugaacaacaccguguacgacccccugcagcccgagcuggacagcuucaaggaggagcuggacaaguacuucaagaaccacaccagcccagacguggaccugggcgacaucagcggcaucaacgccagcguggugaacauccagaaggagaucgaccggcugaacgagguggccaagaaccugaacgagagccugaucgaccugcaggagcugggcaaguacgagcaguacaucaaguggcccugguacaucuggcugggcuucaucgccggccugaucgccaucgugaucgugaccaucaugcugugcugcaugaccagcugcuguagcugccugaagggcugcugcagcugcggcagcugcugcaaguucgacgaggacgacagcgagcccgugcugaagggcgugaagcugcacuacaccugaggacuagucccuguucccagagcccacuuuuuuuucuuuuuuugaaauaaaauagccugucuuucagaucuaaaaaaaaaaaaaaaaaaaaaaaaaaaaaaaaaaaaaaaaaaaaaaaaaaaaaaaaaaaaaaaaaaaaaaaaaaaaaaaaaaaaaaaaaaaaaaaaaaaa

SEQ ID NO: 25121 - RNA, 4161 nt, Artificial Sequence
  SARS-CoV-2/Wuhan/WIV05/2019__EPI_ISL_402128 spike protein mRNA gc (1-1273)(K986P_V987P_H69del_V70del_A222V_Y453F_S477N_D614G_I692V)
aggagagggcgcuuggcuugcaaggacccugagcugcggcauugaagcacacccaacccaacucgacugaagucagccucacugaaccggaucugagaaucuucucucucugggcuugccagggcucuccgaaccuagcuagcauccucuucaauuccaacuagaaagcuuaccauguucguguuccuggugcugcugccccuggugagcagccagugcgugaaccugaccacccggacccagcugcccccugccuacaccaacagcuucacccggggcguguacuaccccgacaagguguuccggagcagcgugcugcacagcacccaggaccuguuccugcccuucuucagcaacgugaccugguuccacgccaucagcggcaccaacggcaccaagcgguucgacaacccagugcugcccuucaacgacggcguguacuucgccagcaccgagaagucaaacaucauccggggcuggaucuucggcaccacccuggacagcaagacacagagccugcugaucgugaacaacgccaccaacguggugaucaaggugugcgaguuucaguucugcaacgaccccuuccugggcguguacuaccacaagaacaacaagagcuggauggagagcgaguuccggguguacagcagcgcuaacaauugcaccuucgaguacgucagccagcccuuccugauggaccucgagggcaagcagggcaacuucaagaaccugcgggaguucguguucaagaacaucgauggcuacuucaagaucuacagcaagcacacccccaucaaccuggugcgggaccugccccagggauucagcgugcuggagccucugguggaccugcccaucggcaucaacaucaccagguuccagacccugcuggcccugcaccggagcuaccugacccccggcgacagcagcagcggcuggaccgccggcgccgccgccuacuacgugggcuaccugcagccacggaccuuccugcugaaguacaacgagaacggcaccaucaccgacgcaguggacugcgcccuggacccccugagcgagaccaagugcacccuaaagagcuucaccguggagaagggcaucuaccagaccagcaacuuccgggugcagcccacugagagcaucgugcgguuccccaacauuaccaaccugugucccuucggcgagguguucaacgccacccgguucgccagcguguacgccuggaaccggaagcggaucagcaacugcguggccgacuacagcgugcuguacaacagcgccagcuucagcaccuucaagugcuacggcgugagcccuaccaagcugaacgaccugugcuucaccaacguguacgccgacagcuucgugauccggggcgacgaggugcggcagaucgcucccggccagaccggcaagaucgccgacuacaacuacaagcugcccgacgacuucaccggcugcgugaucgccuggaacagcaacaaccuggacagcaaggugggcggcaacuacaacuaccuguuccggcuguuccguaagagcaaccugaagccauuugagcgggacaucagcaccgagaucuaccaggccggcaacacccccugcaacgguguggagggcuucaacugcuacuucccccugcagagcuacggcuuccagcccaccaacggcgugggcuaccagcccuaccgggugguggugcugagcuucgagcugcugcacgcccccgccaccgugugcggcccuaaaaagagcaccaaccuggugaagaacaagugcgugaauuucaacuucaacggccugaccggcaccggcgugcugaccgagagcaacaagaaguuccugcccuuccagcaguucggccgggauaucgccgacaccaccgacgccgugcgggacccccagacccuggagauccuggacaucaccccaugcagcuucggcggcgugagcgucaucacccccggcacaaacaccagcaaccagguggcagugcuguaccagggagugaacugcaccgaggugcccguggccauccacgccgaccagcugacccccaccuggcggguguacagcaccggcagcaacguguuccagacccgggccggcugccugaucggcgccgagcacgugaacaacagcuacgagugcgacauccccaucggcgccggcaucugcgcuuccuaccagacccagaccaacagcccccggcgggcccggagcguggccagccagagcgugaucgccuacaccaugagcuuaggcgccgagaacagcguggccuacagcaacaacagcaucgccaucccuaccaacuucaccaucagcgugaccaccgagauccugcccgugagcaugaccaagaccagcguggacuguaccauguacauaugcggcgacagcaccgagugcagcaaccugcugcugcaguacggcagcuucugcacccagcugaaccgggcgcugaccggcaucgccguggagcaggacaagaacacccaagagguguucgcccaggugaagcagaucuacaagacucccccaaucaaggacuucggcggcuucaacuucagccagauccugcccgaccccagcaagcccagcaagcggagcuucaucgaggaccugcuguucaacaaggugacccuggccgacgccggcuucaucaagcaguacggcgacugccugggggauaucgccgcccgggaccugaucugcgcucagaaguucaacggccugaccgugcugcccccucugcugaccgacgagaugaucgcccaguacaccagcgcccugcuugccggcaccaucaccagcggcuggaccuucggcgccggcgccgcacugcagauccccuucgccaugcagauggccuaccgguucaacggcaucggcgugacccagaacgugcuguacgagaaccagaagcugaucgccaaccaguucaacagcgccaucggcaagauccaggacagccugagcagcaccgccagcgcccugggcaagcugcaggacguggugaaccagaacgcccaggcucugaacacccuggugaagcagcugagcagcaauuuuggcgccaucagcagcgugcugaacgacauccugucaaggcuggaucccccagaggccgaggugcagaucgaccggcugaucaccggccggcugcagagccugcagaccuacgugacccagcagcugauccgggccgccgagauccgggccagcgccaaccuggccgcaaccaagaugagcgagugcgugcugggccagagcaagcggguggacuucugcggcaagggcuaccaccugaugagcuucccccagagcgcuccccacggcgugguguuccuccacgucacauacgugcccgcccaggagaagaacuucaccaccgcccccgccaucugccacgacggcaaggcccacuucccccgggagggaguguucgugagcaacggcacccacugguucgugacccagcggaacuucuacgagccucagauuaucaccaccgacaacaccuucgugagcggcaacugcgacguggugaucggcaucgugaacaacaccguguacgacccccugcagcccgagcuggacagcuucaaggaggagcuggacaaguacuucaagaaccacaccagcccagacguggaccugggcgacaucagcggcaucaacgccagcguggugaacauccagaaggagaucgaccggcugaacgagguggccaagaaccugaacgagagccugaucgaccugcaggagcugggcaaguacgagcaguacaucaaguggcccugguacaucuggcugggcuucaucgccggccugaucgccaucgugauggugaccaucaugcugugcugcaugaccagcugcuguagcugccugaagggcugcugcagcugcggcagcugcugcaaguucgacgaggacgacagcgagcccgugcugaagggcgugaagcugcacuacaccugaggacuagucccuguucccagagcccacuuuuuuuucuuuuuuugaaauaaaauagccugucuuucagaucuaaaaaaaaaaaaaaaaaaaaaaaaaaaaaaaaaaaaaaaaaaaaaaaaaaaaaaaaaaaaaaaaaaaaaaaaaaaaaaaaaaaaaaaaaaaaaaaaaaaa

SEQ ID NO: 25122 - RNA, 4161 nt, Artificial Sequence
  SARS-CoV-2/Wuhan/WIV05/2019__EPI_ISL_402128 spike protein mRNA gc (1-1273)(K986P_V987P_H69del_V70del_Y453F_D614G_I692V_M1229I)
aggagagggcgcuuggcuugcaaggacccugagcugcggcauugaagcacacccaacccaacucgacugaagucagccucacugaaccggaucugagaaucuucucucucugggcuugccagggcucuccgaaccuagcuagcauccucuucaauuccaacuagaaagcuuaccauguucguguuccuggugcugcugccccuggugagcagccagugcgugaaccugaccacccggacccagcugcccccugccuacaccaacagcuucacccggggcguguacuaccccgacaagguguuccggagcagcgugcugcacagcacccaggaccuguuccugcccuucuucagcaacgugaccugguuccacgccaucagcggcaccaacggcaccaagcgguucgacaacccagugcugcccuucaacgacggcguguacuucgccagcaccgagaagucaaacaucauccggggcuggaucuucggcaccacccuggacagcaagacacagagccugcugaucgugaacaacgccaccaacguggugaucaaggugugcgaguuucaguucugcaacgaccccuuccugggcguguacuaccacaagaacaacaagagcuggauggagagcgaguuccggguguacagcagcgcuaacaauugcaccuucgaguacgucagccagcccuuccugauggaccucgagggcaagcagggcaacuucaagaaccugcgggaguucguguucaagaacaucgauggcuacuucaagaucuacagcaagcacacccccaucaaccuggugcgggaccugccccagggauucagcgcccuggagccucugguggaccugcccaucggcaucaacaucaccagguuccagacccugcuggcccugcaccggagcuaccugacccccggcgacagcagcagcggcuggaccgccggcgccgccgcauacuacgugggcuaccugcagccacggaccuuccugcugaaguacaacgagaacggcaccaucaccgacgccguggacugcgcccuggacccccugagcgagaccaagugcacccuaaagagcuucaccguggagaagggcaucuaccagaccagcaacuuccgggugcagcccacugagagcaucgugcgguuccccaacauuaccaaccugugucccuucggcgagguguucaacgccacccgguucgccagcguguacgccuggaaccggaagcggaucagcaacugcguggccgacuacagcgugcuguacaacagcgccagcuucagcaccuucaagugcuacggcgugagcccuaccaagcugaacgaccugugcuucaccaacguguacgcugacagcuucgugauccggggcgacgaggugcggcagaucgcccccggccagaccggcaagaucgccgacuacaacuacaagcugcccgacgacuucaccggcugcgugaucgccuggaacagcaacaaccuggacagcaaggugggcggcaacuacaacuaccuguuccggcuguuccguaagagcaaccugaagccauuugagcgggacaucagcaccgagaucuaccaggccggcagcacccccugcaacgguguggagggcuucaacugcuacuucccccugcagagcuacggcuuccagcccaccaacggcgugggcuaccagcccuaccgggugguggugcugagcuucgagcugcugcacgcccccgccaccgugugcggcccuaaaaagagcaccaaccuggugaagaacaagugcgugaacuucaauuucaacggccugaccggcaccggcgugcugaccgagagcaacaagaaguuccugcccuuccagcaguucggccgggauaucgccgacaccaccgacgcagugcgggacccccagacccuggagauccuggacaucaccccaugcagcuucggcggcgugagcgugaucacccccggcacaaacaccagcaaccaggucgccgugcuguaccagggagugaacugcaccgaggugcccguggccauccacgccgaccagcugacccccaccuggcggguguacagcaccggcagcaacguguuccagacccgggccggcugccugaucggcgccgagcacgugaacaacuccuacgagugcgacauccccaucggcgcuggcaucugcgccagcuaccagacccagaccaacagcccccggcgggcccggagcguggccagccagagcgugaucgccuacaccaugagcuuaggcgccgagaacagcguggccuacagcaacaacagcaucgcgaucccuaccaacuucaccaucagcgugaccaccgagauccugcccgugagcaugaccaagaccagcguggacuguaccauguacauaugcggcgacagcaccgagugcagcaaccugcugcugcaguacggcagcuucugcacccagcugaaccgggcccugaccggcaucgccguggagcaggacaagaacacccaagagguguucgcccaggugaagcagaucuacaagacucccccaaucaaggacuucggcggcuucaacuucagccagauccugcccgaccccagcaagcccagcaagcggagcuucaucgaggaccugcuguucaacaaggugacccuggccgacgccggcuucaucaagcaguacggcgacugccugggggauaucgccgcucgggaccugaucugcgcccagaaguucaacggccugaccgugcugcccccucugcugaccgacgagaugaucgcccaguacaccagcgcccugcuugccggcaccaucaccagcggcuggaccuucggcgccggcgcagcccugcagauccccuucgccaugcagauggccuaccgguucaacggcaucggcgugacccagaacgugcuguacgagaaccagaagcugaucgccaaccaguucaacagcgccaucggcaagauccaggacagccugagcagcaccgccagcgcccugggcaagcugcaggacguggugaaccagaacgcucaggcccugaacacccuggugaagcagcugagcagcaacuuuggcgccaucagcucagugcugaaugacauccugagcaggcuggaucccccagaggccgaggugcagaucgaccggcugaucaccggccggcugcagagccugcagaccuacgugacccagcagcugauccgggccgccgagauccgggccagcgccaaccuggcagccaccaagaugagcgagugcgugcugggccagagcaagcggguggacuucugcggcaagggcuaccaccugaugagcuucccccagagcgcuccccacggcgugguguuccuccacgugacauacguccccgcccaggagaagaacuucaccaccgcccccgccaucugccacgacggcaaggcccacuucccccgggagggaguguucgugagcaacggcacccacugguucgugacccagcggaacuucuacgagccucagauuaucaccaccgacaacaccuucgugagcggcaacugcgacguggugaucggcaucgugaacaacaccguguacgacccccugcagcccgagcuggacagcuucaaggaggagcuggacaaguacuucaagaaccacaccagcccagacguggaccugggcgacaucagcggcaucaacgccagcguggugaacauccagaaggagaucgaccggcugaacgagguggccaagaaccugaacgagagccugaucgaccugcaggagcugggcaaguacgagcaguacaucaaguggcccugguacaucuggcugggcuucaucgccggccugaucgccaucgugaucgugaccaucaugcugugcugcaugaccagcugcuguagcugccugaagggcugcugcagcugcggcagcugcugcaaguucgacgaggacgacagcgagcccgugcugaagggcgugaagcugcacuacaccugaggacuagucccuguucccagagcccacuuuuuuuucuuuuuuugaaauaaaauagccugucuuucagaucuaaaaaaaaaaaaaaaaaaaaaaaaaaaaaaaaaaaaaaaaaaaaaaaaaaaaaaaaaaaaaaaaaaaaaaaaaaaaaaaaaaaaaaaaaaaaaaaaaaaa

SEQ ID NO: 25123 - RNA, 4158 nt, Artificial Sequence
  SARS-CoV-2/Wuhan/WIV05/2019__EPI_ISL_402128 spike protein mRNA gc (1-1273)(K986P_V987P_K986P_V987P_H69del_V70del_Y144del_N501Y_A570 D_D614G_P681H_T716I_S982A_D1118H)
aggagagggcgcuuggcuugcaaggacccugagcugcggcauugaagcacacccaacccaacucgacugaagucagccucacugaaccggaucugagaaucuucucucucugggcuugccagggcucuccgaaccuagcuagcauccucuucaauuccaacuagaaagcuuaccauguucguguuccuggugcugcugccccuggugagcagccagugcgugaaccugaccacccggacccagcugcccccugccuacaccaacagcuucacccggggcguguacuaccccgacaagguguuccggagcagcgugcugcacagcacccaggaccuguuccugcccuucuucagcaacgugaccugguuccacgccaucagcggcaccaacggcaccaagcgguucgacaacccagugcugcccuucaacgacggcguguacuucgccagcaccgagaagucaaacaucauccggggcuggaucuucggcaccacccuggacagcaagacacagagccugcugaucgugaacaacgccaccaacguggugaucaaggugugcgaguuucaguucugcaacgaccccuuccugggcguguaccacaagaacaacaagagcuggauggagagcgaguuccggguguacagcagcgcuaacaauugcaccuucgaguacgucagccagcccuuccugauggaccucgagggcaagcagggcaacuucaagaaccugcgggaguucguguucaagaacaucgauggcuacuucaagaucuacagcaagcacacccccaucaaccuggugcgggaccugccccagggauucagcgcccuggagccucugguggaccugcccaucggcaucaacaucaccagguuccagacccugcuggcccugcaccggagcuaccugacccccggcgacagcagcagcggcuggaccgccggcgccgccgcauacuacgugggcuaccugcagccacggaccuuccugcugaaguacaacgagaacggcaccaucaccgacgccguggacugcgcccuggacccccugagcgagaccaagugcacccuaaagagcuucaccguggagaagggcaucuaccagaccagcaacuuccgggugcagcccacugagagcaucgugcgguuccccaacauuaccaaccugugucccuucggcgagguguucaacgccacccgguucgccagcguguacgccuggaaccggaagcggaucagcaacugcguggccgacuacagcgugcuguacaacagcgccagcuucagcaccuucaagugcuacggcgugagcccuaccaagcugaacgaccugugcuucaccaacguguacgcugacagcuucgugauccggggcgacgaggugcggcagaucgcccccggccagaccggcaagaucgccgacuacaacuacaagcugcccgacgacuucaccggcugcgugaucgccuggaacagcaacaaccuggacagcaaggugggcggcaacuacaacuaccuguaccggcuguuccguaagagcaaccugaagccauucgagcgggacaucagcaccgagaucuaccaggccggcagcacccccugcaacgguguggagggcuuuaacugcuacuucccccugcagagcuacggcuuccagcccaccuacggcgugggcuaccagcccuaccgggugguggugcugagcuucgagcugcugcacgcccccgccaccgugugcggcccuaaaaagagcaccaaccuggugaagaacaagugcgugaacuucaacuucaauggccugaccggcaccggcgugcugaccgagagcaacaagaaguuccugcccuuccagcaguucggccgggauaucgacgacaccaccgacgccgugcgggacccccagacccuggagauccuggacaucaccccaugcagcuucggcggcgugagcgugaucacccccggcacaaacaccagcaaccaggucgcagugcuguaccagggagugaacugcaccgaggugcccguggccauccacgccgaccagcugacccccaccuggcggguguacagcaccggcagcaacguguuccagacccgggccggcugccugaucggcgccgagcacgugaacaacuccuacgagugcgacauccccaucggcgccggcaucugcgcuagcuaccagacccagaccaacagccaccggcgggcccggagcguggccagccagagcaucaucgccuacaccaugagcuuaggcgccgagaacagcguggccuacagcaacaacagcaucgccauccccaucaacuucaccauaagcgugaccaccgagauccugccugugagcaugaccaagaccagcguggacuguaccauguacaucugcggcgacagcaccgagugcagcaaccugcugcugcaguacggcagcuucugcacccagcugaaccgggcgcugaccggcaucgccguggagcaggacaagaacacccaagagguguucgcccaggugaagcagaucuacaagaccccacccaucaaggacuucggcggcuucaacuucagccagauccugcccgaccccagcaagcccagcaagcggagcuucaucgaggaccugcuguucaacaaggugacucuggccgacgccggcuucaucaagcaguacggcgauugccugggggacaucgccgcccgggaccugaucugcgcucagaaguucaacggccugaccgugcugccuccccugcugaccgacgagaugaucgcccaguacaccagcgcccugcuugccggcaccaucaccagcggcuggaccuucggcgccggcgccgcacugcagauccccuucgccaugcagauggccuaccgguucaacggcaucggcgugacccagaacgugcuguacgagaaccagaagcugaucgccaaccaguucaacagcgccaucggcaagauccaggacagccugagcagcaccgccagcgcccugggcaagcugcaggacguggugaaccagaacgcccaggcucugaacacccuggugaagcagcugagcagcaacuucggcgccaucagcucagugcugaacgacauccuggccaggcuggacccacccgaggccgaggugcagaucgaccggcugaucaccggccggcugcagagccugcagaccuacgugacccagcagcugauccgggccgccgagauucgggccagcgccaaucuggcagccaccaagaugagcgagugcgugcugggccagagcaagcggguggacuuuugcggcaagggcuaccaccugaugagcuucccccagagcgcuccccacggcgugguguuccuccacgugaccuacgugcccgcccaggagaagaacuucacaaccgcccccgccaucugccacgacggcaaggcccacuucccccgggagggagucuucgugagcaacggcacccacugguucgugacccagcggaacuucuacgagccccagaucaucaccacccacaacaccuucgugagcggcaacugcgacguggugaucggcaucgugaacaacaccguguacgacccucugcagcccgagcuggacagcuucaaggaggagcuggacaaguacuucaagaaccacaccagccccgacguggaucugggcgacaucagcggcaucaacgccagcguggugaacauccagaaggagaucgaccggcugaacgagguggccaagaaccugaacgagagccugaucgaccugcaggagcugggcaaguacgagcaguacaucaaguggccaugguacaucuggcugggcuucaucgccggccugaucgccaucgugauggugaccaucaugcugugcugcaugaccagcugcuguagcugccugaagggcugcugcagcugcggcagcugcugcaaguucgacgaggacgacagcgagcccgugcugaagggcgugaagcugcacuacaccugaggacuagucccuguucccagagcccacuuuuuuuucuuuuuuugaaauaaaauagccugucuuucagaucuaaaaaaaaaaaaaaaaaaaaaaaaaaaaaaaaaaaaaaaaaaaaaaaaaaaaaaaaaaaaaaaaaaaaaaaaaaaaaaaaaaaaaaaaaaaaaaaaaaaa

SEQ ID NO: 25124 - RNA, 4167 nt, Artificial Sequence
  SARS-CoV-2/Wuhan/WIV05/2019__EPI_ISL_402128 spike protein mRNA gc (1-1273)(K986P_V987P_K986P_V987P_K417N_E484K_N501Y_D614G)
aggagagggcgcuuggcuugcaaggacccugagcugcggcauugaagcacacccaacccaacucgacugaagucagccucacugaaccggaucugagaaucuucucucucugggcuugccagggcucuccgaaccuagcuagcauccucuucaauuccaacuagaaagcuuaccauguucguguuccuggugcugcugccccuggugagcagccagugcgugaaccugaccacccggacccagcugcccccugccuacaccaacagcuucacccggggcguguacuaccccgacaagguguuccggagcagcgugcugcacagcacccaggaccuguuccugcccuucuucagcaacgugaccugguuccacgccauccacgugagcggcaccaacggcaccaagcgguucgacaacccagugcugcccuucaacgacggcguguacuucgccagcaccgagaagucaaacaucauccggggcuggaucuucggcaccacccuggacagcaagacacagagccugcugaucgugaacaacgccaccaacguggugaucaaggugugcgaguuucaguucugcaacgaccccuuccugggcguguacuaccacaagaacaacaagagcuggauggagagcgaguuccgggucuacagcagcgcuaacaauugcaccuucgaguacgugagccagcccuuccugauggaccucgagggcaagcagggcaacuucaagaaccugcgggaguucguguucaagaacaucgauggcuacuucaagaucuacagcaagcacacccccaucaaccuggugcgggaccugccccagggauucagcgcccuggagccucugguggaccugcccaucggcaucaacaucaccagguuccagacccugcuggcccugcaccggagcuaccugacccccggcgacagcagcagcggcuggaccgccggcgccgccgcauacuacgugggcuaccugcagccacggaccuuccugcugaaguacaacgagaacggcaccaucaccgacgccguggacugcgcccuggacccccugagcgagaccaagugcacccuaaagagcuucaccguggagaagggcaucuaccagaccagcaacuuccgggugcagcccacugagagcaucgugcgguuccccaacauuaccaaccugugucccuucggcgagguguucaacgccacccgguucgccagcguguacgccuggaaccggaagcggaucagcaacugcguggccgacuacagcgugcuguacaacagcgccagcuucagcaccuucaagugcuacggcgugagcccuaccaagcugaacgaccugugcuucaccaacguguacgcugacagcuucgugauccggggcgacgaggugcggcagaucgcccccggccagaccggcaacaucgccgacuacaacuacaagcugcccgacgacuucaccggcugcgugaucgccuggaacagcaacaaccuggacagcaaggugggcggcaacuacaacuaccuguaccggcuguuccguaagagcaaccugaagccauucgagcgggacaucagcaccgagaucuaccaggccggcagcacccccugcaacggugugaagggcuuuaacugcuacuucccccugcagagcuacggcuuccagcccaccuacggcgugggcuaccagcccuaccgggugguggugcugagcuucgagcugcugcacgcccccgccaccgugugcggcccuaaaaagagcaccaaccuggugaagaacaagugcgugaacuucaauuucaacggccugaccggcaccggcgugcugaccgagagcaacaagaaguuccugcccuuccagcaguucggccgggauaucgccgacaccaccgacgcagugcgggacccccagacccuggagauccuggacaucaccccaugcagcuucggcggcgugagcgucaucacccccggcacaaacaccagcaaccagguggccgugcuguaccagggagugaacugcaccgaggugcccguggccauccacgccgaccagcugacccccaccuggcggguguacagcaccggcagcaacguguuccagacccgggccggcugccugaucggcgccgagcacgugaacaacuccuacgagugcgacauccccaucggcgcuggcaucugcgccagcuaccagacccagaccaacagcccccggcgggcccggagcguggccagccagagcaucaucgccuacaccaugagcuuaggcgccgagaacagcguggccuacagcaacaacagcaucgcgaucccuaccaacuucaccaucagcgugaccaccgagauacugcccgugagcaugaccaagaccagcguggacuguaccauguacaucugcggcgacagcaccgagugcagcaaccugcugcugcaguacggcagcuucugcacccagcugaaccgggcccugaccggcaucgccguggagcaggacaagaacacccaagagguguucgcccaggugaagcagaucuacaagacucccccaaucaaggacuucggcggcuucaacuucagccagauccugcccgaccccagcaagcccagcaagcggagcuucaucgaggaccugcuguucaacaaggugacccuggccgacgccggcuucaucaagcaguacggcgacugccugggggauaucgccgcucgggaccugaucugcgcccagaaguucaacggccugaccgugcugcccccucugcugaccgacgagaugaucgcccaguacaccagcgcccugcuugccggcaccaucaccagcggcuggaccuucggcgccggcgcagcccugcagauccccuucgccaugcagauggccuaccgguucaacggcaucggcgugacccagaacgugcuguacgagaaccagaagcugaucgccaaccaguucaacagcgccaucggcaagauccaggacagccugagcagcaccgccagcgcccugggcaagcugcaggacguggugaaccagaacgcucaggcccugaacacccuggugaagcagcugagcagcaacuucggcgccaucagcucagugcugaaugacauccugagcaggcuggaucccccagaggccgaggugcagaucgaccggcugaucaccggccggcugcagagccugcagaccuacgugacccagcagcugauccgggccgccgagauccgggccagcgccaaccuggcagccaccaagaugagcgagugcgugcugggccagagcaagcggguggacuuuugcggcaagggcuaccaccugaugagcuucccccagagcgcuccccacggcgugguguuccuccacgugacauacguccccgcccaggagaagaacuucaccaccgcccccgccauuugccacgacggcaaggcccacuucccccgggagggaguguucgugagcaacggcacccacugguucgugacccagcggaacuucuacgagccucagaucaucaccaccgacaacaccuucgugagcggcaacugcgacguggugaucggcaucgugaacaacaccguguacgacccccugcagcccgagcuggacagcuucaaggaggagcuggacaaguacuucaagaaccacaccagcccagacguggaccugggcgacaucagcggcaucaacgccagcguggugaacauccagaaggagaucgaccggcugaacgagguggccaagaaccugaacgagagccugaucgaccugcaggagcugggcaaguacgagcaguacaucaaguggcccugguacaucuggcugggcuucaucgccggccugaucgccaucgugauggugaccaucaugcugugcugcaugaccagcugcuguagcugccugaagggcugcugcagcugcggcagcugcugcaaguucgacgaggacgacagcgagcccgugcugaagggcgugaagcugcacuacaccugaggacuagucccuguucccagagcccacuuuuuuuucuuuuuuugaaauaaaauagccugucuuucagaucuaaaaaaaaaaaaaaaaaaaaaaaaaaaaaaaaaaaaaaaaaaaaaaaaaaaaaaaaaaaaaaaaaaaaaaaaaaaaaaaaaaaaaaaaaaaaaaaaaaaa

SEQ ID NO: 25125 - RNA, 4158 nt, Artificial Sequence
  SARS-CoV-2/Wuhan/WIV05/2019__EPI_ISL_402128 spike protein mRNA gc (1-1273)(K986P_V987P_K986P_V987P_L18F_D80A_D215G_L242del_A243del_ L244del_R246I_K417N_E484K_N501Y_D614G_A701V)
aggagagggcgcuuggcuugcaaggacccugagcugcggcauugaagcacacccaacccaacucgacugaagucagccucacugaaccggaucugagaaucuucucucucugggcuugccagggcucuccgaaccuagcuagcauccucuucaauuccaacuagaaagcuuaccauguucguguuccuggugcugcugccccuggugagcagccagugcgugaacuucaccacccggacccagcugcccccugccuacaccaacagcuucacccggggcguguacuaccccgacaagguguuccggagcagcgugcugcacagcacccaggaccuguuccugcccuucuucagcaacgugaccugguuccacgccauccacgugagcggcaccaacggcaccaagcgguucgccaacccagugcugcccuucaacgacggcguguacuucgccagcaccgagaagucaaacaucauccggggcuggaucuuuggcaccacccuggacagcaagacacagagccugcugaucgugaacaacgcuaccaacguggugaucaaggugugcgaguuccaguucugcaacgaccccuuccugggcguguacuaccacaagaacaacaagagcuggauggagagcgaguuccgggucuacagcagcgccaacaauugcaccuucgaguacgugagccagcccuuccugauggaccuggagggcaagcagggcaacuucaagaaccuccgggaguucguguucaagaacaucgacggcuacuucaagaucuacagcaagcacacccccaucaaccuggugcggggacugccccagggcuucagcgcccuggagccucugguggaucugcccaucggcaucaacaucaccagguuccagacccugcacaucagcuaccugacccccggcgacagcagcagcggcuggaccgccggcgccgccgcauacuacgugggcuaccugcagccacggaccuuccugcugaaguacaacgagaacggcaccaucaccgacgccguggacugcgcccuggacccccugagcgagaccaagugcacccuuaagagcuucaccguggagaagggcaucuaccagaccagcaacuuccgggugcagcccacugagagcauugugcgguuccccaacaucaccaaccugugucccuucggcgagguguucaacgccacccgguucgccagcguguacgccuggaaccggaagcggaucagcaacugcguggccgacuacagcgugcuguacaacagcgccagcuucagcaccuucaagugcuacggcgugagcccuaccaagcugaacgaccugugcuucaccaacguguacgcugacagcuucgugauccggggcgacgaggugcggcagaucgcccccggccagaccggcaacaucgccgacuacaacuacaagcugcccgacgacuucaccggcugcgugaucgccuggaacagcaacaaccuggacagcaaggugggcggcaacuacaacuaccuguaccggcuauuccguaagagcaaccugaagccauuugagcgggacaucagcaccgagaucuaccaggccgguagcacccccugcaacggcgugaagggcuucaacugcuacuucccccugcagagcuacggcuuccagcccaccuacggcgugggcuaccagcccuaccgggugguggugcugagcuucgagcugcugcacgcccccgccaccgugugcggcccuaaaaagagcaccaaccuggugaagaacaagugcgugaacuucaauuucaacggccugaccggcaccggcgugcugaccgagagcaacaagaaguuccugcccuuccagcaguucggccgggacaucgccgacaccaccgaugcagugcgggacccccagacccuggagauccuggacaucaccccaugcagcuucggcggcgugagcgucaucacccccggaacaaacaccagcaaccagguggccgugcuguaccagggcgugaacugcaccgaggugcccguggccauccacgccgaccagcugacccccaccuggcggguguacagcaccggcagcaacguguuccagacccgggccggcugccugaucggcgccgagcacgugaacaacuccuacgagugcgacauccccaucggcgcuggcaucugcgccagcuaccagacccagaccaacagcccccggcgggcccggagcguggccagccagagcaucaucgccuacaccaugagccugggcguggagaacagcguggccuacagcaacaacagcaucgccaucccuaccaacuucaccauaagcgugaccaccgagauccugcccgugagcaugaccaagaccagcguggacuguaccauguacaucugcggcgacagcaccgagugcagcaaccuguuacugcaguacggcagcuucugcacccagcugaaccgggcgcugaccggcaucgccguggagcaggacaagaacacccaagagguguucgcccaggugaagcagaucuacaagacucccccaaucaaggacuucggcggcuucaacuucagccagauccugcccgaccccagcaagcccagcaagcggagcuucaucgaggaccugcuguucaacaaggugacccuggccgacgccggcuucaucaagcaguacggggacugccugggcgacaucgccgcccgggaccugaucugcgcucagaaguucaacggccugaccgugcugcccccucugcugaccgaugagaugaucgcccaguacaccagcgcccugcuggccggcaccaucaccagcggcuggaccuucggcgccggcgccgcacugcagauccccuucgccaugcagauggccuaccgguucaacggcaucggcgugacccagaacgugcuguacgagaaccagaagcugaucgccaaccaguucaacagcgccaucggcaagauccaggacagccugagcagcaccgccagcgcccugggcaagcugcaggacguggugaaccagaacgcccaggcucugaacacccuggugaagcagcugagcagcaacuuuggcgccaucagcucagugcugaaugacauccugagccggcuggaucccccagaggccgaggugcagaucgacaggcugaucaccggccggcugcagagccugcagaccuacgugacccagcagcugauccgggccgccgagauucgggccagcgccaaccuggccgcaaccaagaugagcgagugcgugcugggccagagcaagcggguggacuucugcggcaagggcuaccaccugaugagcuucccccagagcgcuccccacggcgugguguuccugcacgucacauacgugcccgcccaggagaagaacuucaccaccgcccccgccaucugccacgacggaaaggcccacuucccccgggagggcguguucgugagcaacggcacccacugguucgugacccagcggaacuucuacgagccucagaucaucaccaccgacaacaccuucgugagcggcaacugcgacguggugaucggcaucgugaacaacaccguguacgacccccugcagcccgagcuggacagcuucaaggaggagcucgacaaguacuucaagaaccacaccagcccagacguggaccugggcgacaucagcggcaucaacgccagcguggugaacauccagaaggagaucgaccggcugaacgagguggccaagaaccugaacgagagccugaucgaccugcaggagcugggcaaguacgagcaguacaucaaguggcccugguacaucuggcugggcuucaucgccggccugaucgccaucgugauggugaccaucaugcugugcugcaugaccagcugcuguagcugccugaagggcugcugcagcugcggcagcugcugcaaguucgacgaggacgacagcgagcccgugcugaagggcgugaagcugcacuacaccugaggacuagucccuguucccagagcccacuuuuuuuucuuuuuuugaaauaaaauagccugucuuucagaucuaaaaaaaaaaaaaaaaaaaaaaaaaaaaaaaaaaaaaaaaaaaaaaaaaaaaaaaaaaaaaaaaaaaaaaaaaaaaaaaaaaaaaaaaaaaaaaaaaaaa

SEQ ID NO: 25126 - RNA, 4167 nt, Artificial Sequence
  SARS-CoV-2/Wuhan/WIV05/2019__EPI_ISL_402128 spike protein mRNA gc (1-1273)(K986P_V987P_K986P_V987P_E484K_D614G)
aggagagggcgcuuggcuugcaaggacccugagcugcggcauugaagcacacccaacccaacucgacugaagucagccucacugaaccggaucugagaaucuucucucucugggcuugccagggcucuccgaaccuagcuagcauccucuucaauuccaacuagaaagcuuaccauguucguguuccuggugcugcugccccuggugagcagccagugcgugaaccugaccacccggacccagcugcccccugccuacaccaacagcuucacccggggcguguacuaccccgacaagguguuccggagcagcgugcugcacagcacccaggaccuguuccugcccuucuucagcaacgugaccugguuccacgccauccacgugagcggcaccaacggcaccaagcgguucgacaacccagugcugcccuucaacgacggcguguacuucgccagcaccgagaagucaaacaucauccggggcuggaucuucggcaccacccuggacagcaagacacagagccugcugaucgugaacaacgccaccaacguggugaucaaggugugcgaguuucaguucugcaacgaccccuuccugggcguguacuaccacaagaacaacaagagcuggauggagagcgaguuccgggucuacagcagcgcuaacaauugcaccuucgaguacgugagccagcccuuccugauggaccucgagggcaagcagggcaacuucaagaaccugcgggaguucguguucaagaacaucgauggcuacuucaagaucuacagcaagcacacccccaucaaccuggugcgggaccugccccagggauucagcgcccuggagccucugguggaccugcccaucggcaucaacaucaccagguuccagacccugcuggcccugcaccggagcuaccugacccccggcgacagcagcagcggcuggaccgccggcgccgccgcauacuacgugggcuaccugcagccacggaccuuccugcugaaguacaacgagaacggcaccaucaccgacgccguggacugcgcccuggacccccugagcgagaccaagugcacccuaaagagcuucaccguggagaagggcaucuaccagaccagcaacuuccgggugcagcccacugagagcaucgugcgguuccccaacauuaccaaccugugucccuucggcgagguguucaacgccacccgguucgccagcguguacgccuggaaccggaagcggaucagcaacugcguggccgacuacagcgugcuguacaacagcgccagcuucagcaccuucaagugcuacggcgugagcccuaccaagcugaacgaccugugcuucaccaacguguacgcugacagcuucgugauccggggcgacgaggugcggcagaucgcccccggccagaccggcaagaucgccgacuacaacuacaagcugcccgacgacuucaccggcugcgugaucgccuggaacagcaacaaccuggacagcaaggugggcggcaacuacaacuaccuguaccggcuguuccguaagagcaaccugaagccauucgagcgggacaucagcaccgagaucuaccaggccggcagcacccccugcaacggugugaagggcuuuaacugcuacuucccccugcagagcuacggcuuccagcccaccaacggcgugggcuaccagcccuaccgggugguggugcugagcuucgagcugcugcacgcccccgccaccgugugcggcccuaaaaagagcaccaaccuggugaagaacaagugcgugaacuucaauuucaacggccugaccggcaccggcgugcugaccgagagcaacaagaaguuccugcccuuccagcaguucggccgggauaucgccgacaccaccgacgcagugcgggacccccagacccuggagauccuggacaucaccccaugcagcuucggcggcgugagcgucaucacccccggcacaaacaccagcaaccagguggccgugcuguaccagggagugaacugcaccgaggugcccguggccauccacgccgaccagcugacccccaccuggcggguguacagcaccggcagcaacguguuccagacccgggccggcugccugaucggcgccgagcacgugaacaacuccuacgagugcgacauccccaucggcgcuggcaucugcgccagcuaccagacccagaccaacagcccccggcgggcccggagcguggccagccagagcaucaucgccuacaccaugagcuuaggcgccgagaacagcguggccuacagcaacaacagcaucgcgaucccuaccaacuucaccaucagcgugaccaccgagauacugcccgugagcaugaccaagaccagcguggacuguaccauguacaucugcggcgacagcaccgagugcagcaaccugcugcugcaguacggcagcuucugcacccagcugaaccgggcccugaccggcaucgccguggagcaggacaagaacacccaagagguguucgcccaggugaagcagaucuacaagacucccccaaucaaggacuucggcggcuucaacuucagccagauccugcccgaccccagcaagcccagcaagcggagcuucaucgaggaccugcuguucaacaaggugacccuggccgacgccggcuucaucaagcaguacggcgacugccugggggauaucgccgcucgggaccugaucugcgcccagaaguucaacggccugaccgugcugcccccucugcugaccgacgagaugaucgcccaguacaccagcgcccugcuugccggcaccaucaccagcggcuggaccuucggcgccggcgcagcccugcagauccccuucgccaugcagauggccuaccgguucaacggcaucggcgugacccagaacgugcuguacgagaaccagaagcugaucgccaaccaguucaacagcgccaucggcaagauccaggacagccugagcagcaccgccagcgcccugggcaagcugcaggacguggugaaccagaacgcucaggcccugaacacccuggugaagcagcugagcagcaacuucggcgccaucagcucagugcugaaugacauccugagcaggcuggaucccccagaggccgaggugcagaucgaccggcugaucaccggccggcugcagagccugcagaccuacgugacccagcagcugauccgggccgccgagauccgggccagcgccaaccuggcagccaccaagaugagcgagugcgugcugggccagagcaagcggguggacuuuugcggcaagggcuaccaccugaugagcuucccccagagcgcuccccacggcgugguguuccuccacgugacauacguccccgcccaggagaagaacuucaccaccgcccccgccauuugccacgacggcaaggcccacuucccccgggagggaguguucgugagcaacggcacccacugguucgugacccagcggaacuucuacgagccucagaucaucaccaccgacaacaccuucgugagcggcaacugcgacguggugaucggcaucgugaacaacaccguguacgacccccugcagcccgagcuggacagcuucaaggaggagcuggacaaguacuucaagaaccacaccagcccagacguggaccugggcgacaucagcggcaucaacgccagcguggugaacauccagaaggagaucgaccggcugaacgagguggccaagaaccugaacgagagccugaucgaccugcaggagcugggcaaguacgagcaguacaucaaguggcccugguacaucuggcugggcuucaucgccggccugaucgccaucgugauggugaccaucaugcugugcugcaugaccagcugcuguagcugccugaagggcugcugcagcugcggcagcugcugcaaguucgacgaggacgacagcgagcccgugcugaagggcgugaagcugcacuacaccugaggacuagucccuguucccagagcccacuuuuuuuucuuuuuuugaaauaaaauagccugucuuucagaucuaaaaaaaaaaaaaaaaaaaaaaaaaaaaaaaaaaaaaaaaaaaaaaaaaaaaaaaaaaaaaaaaaaaaaaaaaaaaaaaaaaaaaaaaaaaaaaaaaaaa

SEQ ID NO: 25127 - RNA, 4167 nt, Artificial Sequence
  SARS-CoV-2/Wuhan/WIV05/2019__EPI_ISL_402128 spike protein mRNA gc (1-1273)(K986P_V987P_K986P_V987P_L18F_T20N_P26S_D138Y_R190S_K417T _E484K_N501Y_D614G_H655Y_T1027I)
aggagagggcgcuuggcuugcaaggacccugagcugcggcauugaagcacacccaacccaacucgacugaagucagccucacugaaccggaucugagaaucuucucucucugggcuugccagggcucuccgaaccuagcuagcauccucuucaauuccaacuagaaagcuuaccauguucguguuccuggugcugcugccccuggugagcagccagugcgugaacuucaccaaccggacccagcugcccagcgccuacaccaacagcuucacccggggcguguacuacccugacaagguguuccggagcagcgugcugcacagcacccaggaccuguuccugcccuucuucagcaacgugaccugguuccacgccauccacgugagcggcaccaacggcaccaagcgguucgacaaccccgugcugccauucaacgacggcguguacuucgccagcaccgagaagucaaacaucauccggggcuggaucuuuggcaccacccuggacagcaagacccagagccugcugaucgugaacaacgccacaaacguggugaucaaggugugcgaguuccaguucugcaacuaccccuuccugggcguguacuaccacaagaacaacaagagcuggauggagagcgaguuccgggucuacagcagcgcuaauaacugcaccuucgaguacgugagccagcccuuccugauggaccuggagggcaagcagggcaacuucaagaaccucagcgaguucguguucaagaacaucgacggcuacuucaagaucuacagcaagcacacccccaucaaccuggugcgggaucugccccagggauucagcgcccuggagccccugguggaccugccuaucggcaucaacaucacccgguuccagacccugcuggcccugcacaggagcuaccugacccccggcgacagcagcagcggcuggaccgccggcgccgccgcauacuacgugggcuaccugcagccccggaccuuccugcugaaguacaacgagaacggcaccaucaccgacgccguggacugcgcccuggacccacugagcgagaccaagugcacccuaaagagcuucaccguggagaagggcaucuaccagaccagcaacuuccgggugcagcccaccgagagcaucgugcgguuccccaacauuacuaaccugugucccuucggcgagguguucaacgccacccgguucgccagcguguacgccuggaaccggaagcggaucagcaacugcguggccgacuacagcgugcuguacaacagcgccagcuucagcaccuucaagugcuacggcgugagccccaccaagcugaacgaccugugcuucaccaacguguacgcugacagcuucgugauccggggcgacgaggugcggcagaucgccccuggccagaccggcaccaucgccgacuacaacuacaagcugcccgacgacuucaccggcugcgugaucgccuggaacagcaacaaccuggacagcaaggugggcggcaacuacaacuaccuguaccggcuguuccguaagagcaaccugaagcccuuugagcgggacaucagcaccgagaucuaccaggccggcagcaccccaugcaacggugugaagggcuucaacugcuacuucccccugcagagcuacggcuuccagcccaccuacggcgugggcuaccagcccuaccgggugguggugcugagcuucgagcugcugcacgcccccgccaccgugugcggccccaaaaagagcaccaaccuggugaagaacaagugcgugaacuucaauuucaacggccugaccggcaccggcgugcugaccgagagcaacaagaaguuccugccuuuccagcaguucggccgggacaucgccgauaccaccgacgcagugcgggacccccagacccuggagauccuggacaucacccccugcagcuucggcggcgugagcgucaucaccccaggcacaaacaccagcaaccagguggccgugcuguaccagggagugaacugcaccgaggugcccguggccauccacgccgaccagcugacccccaccuggcggguguacuccaccggcagcaacguguuccagacccgggccggcugccugaucggcgccgaguacgugaacaacagcuacgagugcgacauccccaucggcgcuggcaucugcgccagcuaccagacccagaccaacagcccccggcgggcccggagcguggccagccagagcaucaucgccuacaccaugagccugggcgccgagaacagcguggccuacagcaacaacagcaucgcgauccccaccaacuucaccaucagcgugaccaccgagauauuaccugugagcaugaccaagaccagcguggacuguaccauguacaucugcggcgacagcaccgagugcagcaaccugcugcugcaguacggcagcuucugcacccagcugaaccgggcccugaccggcaucgccguggagcaggacaagaacacccaagagguguucgcccaggugaagcagaucuacaagacuccacccaucaaggacuucggcggcuucaacuucagccagauccugcccgaccccagcaagcccagcaagcggagcuucaucgaggaccugcuguucaacaaggugacccuggccgacgccggcuucaucaagcaguacggcgacugccugggggacaucgccgcucgggaucugaucugcgcccagaaguucaacggccugaccgugcugccuccccugcugaccgacgagaugaucgcccaguacaccagcgcccugcuggccggcaccaucaccagcggcuggaccuucggcgccggcgcagcccuucagauccccuucgccaugcagauggccuaccgguucaacggcaucggcgugacccagaacgugcuguacgagaaccagaagcugaucgccaaccaguucaacagcgccaucggcaagauccaggacagccugagcagcaccgccagcgcccugggcaagcugcaggacguggugaaccagaacgcucaggcccugaacacccuggugaagcagcugagcucaaacuuuggcgccaucagcagcgugcugaaugacauccugagccggcuggacccacccgaggccgaggugcagaucgacaggcugaucaccggccggcugcagagccugcagaccuacgugacccagcagcugauccgggccgccgagauccgggccagcgccaaccuggcagccauuaagaugagcgagugcgugcugggccagagcaagcggguggacuucugcggcaagggcuaccaccugaugagcuucccccagagcgcuccccacggcgugguguuccugcacgugaccuacguccccgcccaggagaagaacuucacaaccgcccccgccaucugccacgacggcaaggcccacuucccccgggagggaguguucgugagcaacggcacccacugguucgugacccagcggaacuucuacgagccccagaucaucaccaccgacaacaccuucgugagcggcaacugcgacguggugaucggcaucgugaacaacaccguguacgacccucuccagcccgagcuggacagcuucaaggaggagcuggacaaguacuucaagaaccacaccagccccgacguggaccugggcgauaucagcggcaucaacgccagcguggugaacauccagaaggagaucgaccggcugaacgagguggccaagaaccugaacgagagccugaucgaccugcaggagcugggcaaguacgagcaguacaucaaguggccaugguacaucuggcugggcuucaucgccggccugaucgccaucgugauggugaccaucaugcugugcugcaugaccagcugcuguagcugccugaagggcugcugcagcugcggcagcugcugcaaguucgacgaggacgacagcgagcccgugcugaagggcgugaagcugcacuacaccugaggacuagucccuguucccagagcccacuuuuuuuucuuuuuuugaaauaaaauagccugucuuucagaucuaaaaaaaaaaaaaaaaaaaaaaaaaaaaaaaaaaaaaaaaaaaaaaaaaaaaaaaaaaaaaaaaaaaaaaaaaaaaaaaaaaaaaaaaaaaaaaaaaaaa

SEQ ID NO: 25128 - RNA, 4167 nt, Artificial Sequence
  SARS-CoV-2/Wuhan/WIV05/2019__EPI_ISL_402128 spike protein mRNA gc (1-1273)(K986P_V987P_K986P_V987P_S13I_W152C_L452R_D614G)
aggagagggcgcuuggcuugcaaggacccugagcugcggcauugaagcacacccaacccaacucgacugaagucagccucacugaaccggaucugagaaucuucucucucugggcuugccagggcucuccgaaccuagcuagcauccucuucaauuccaacuagaaagcuuaccauguucguguuccuggugcugcugccccuggugagcauccagugcgugaaccugaccacccggacccagcugcccccugccuacaccaacagcuucacccggggcguguacuaccccgacaagguguuccggagcagcgugcugcacagcacccaggaccuguuccugcccuucuucagcaacgugaccugguuccacgccauccacgugagcggcaccaacggcaccaagcgguucgacaacccagugcugcccuucaacgacggcguguacuucgccagcaccgagaagucaaacaucauccggggcuggaucuucggcaccacccuggacagcaagacacagagccugcugaucgugaacaacgccaccaacguggugaucaaggugugcgaguuucaguucugcaacgaccccuuccugggcguguacuaccacaagaacaacaagagcugcauggagagcgaguuccgggucuacagcagcgcuaacaauugcaccuucgaguacgugagccagcccuuccugauggaccucgagggcaagcagggcaacuucaagaaccugcgggaguucguguucaagaacaucgauggcuacuucaagaucuacagcaagcacacccccaucaaccuggugcgggaccugccccagggauucagcgcccuggagccucugguggaccugcccaucggcaucaacaucaccagguuccagacccugcuggcccugcaccggagcuaccugacccccggcgacagcagcagcggcuggaccgccggcgccgccgcauacuacgugggcuaccugcagccacggaccuuccugcugaaguacaacgagaacggcaccaucaccgacgccguggacugcgcccuggacccccugagcgagaccaaguguacccuaaagagcuucaccguggagaagggcaucuaccagaccagcaacuuccgggugcagcccacugagagcauugugcgguuccccaacaucaccaaccugugccccuucggcgagguguucaacgccacccgguucgccagcguguacgccuggaaccggaagcggaucagcaacugcguggccgacuacagcgugcuguacaacagcgccagcuucagcaccuucaagugcuacggcgugagcccuaccaagcugaacgaccugugcuucaccaacguguacgcugacagcuucgugauccggggcgacgaggugcggcagaucgcccccggccagaccggcaagaucgccgacuacaacuacaagcugcccgacgacuucaccggcugcgugaucgccuggaacagcaacaaccuggacagcaaggugggcggcaacuacaacuaccgguaccggcuguuccguaagagcaaccugaagccauucgagcgggacaucagcaccgagaucuaccaggccggcagcacccccugcaacgguguggagggcuuuaacugcuacuucccccugcagagcuacggcuuccagcccaccaacggcgugggcuaccagcccuaccgggugguggugcugagcuucgagcugcugcacgcccccgccaccgugugcggcccuaaaaagagcaccaaccuggugaagaacaagugcgugaacuucaauuucaacggccugaccggcaccggcgugcugaccgagagcaacaagaaguuccugcccuuccagcaguucggccgggauaucgccgacaccaccgacgcagugcgggacccccagacccuggagauccuggacaucaccccaugcagcuucggcggcgugagcgucaucacccccggcacaaacaccagcaaccagguggccgugcuguaccagggagugaacugcaccgaggugcccguggccauccacgccgaccagcugacccccaccuggcggguguacagcaccggcagcaacguguuccagacccgggccggcugccugaucggcgccgagcacgugaacaacagcuacgagugcgacauccccaucggcgcuggcaucugugccuccuaccagacccagaccaacagcccccggcgggcccggagcguggccagccagagcaucaucgccuacaccaugagccugggcgccgagaacagcguggccuacagcaacaacagcaucgcgaucccuaccaacuucaccauaagcgugaccaccgagaucuuacccgugagcaugaccaagaccagcguggacugcaccauguacaucugcggcgacagcaccgagugcagcaaccugcugcugcaguacggcagcuucugcacccagcugaaccgggcccugaccggcaucgccguggagcaggacaagaacacccaagagguguucgcccaggugaagcagaucuacaagacucccccaaucaaggacuucggcggcuucaacuucagccagauccugcccgaccccagcaagcccagcaagcggagcuucaucgaggaccugcuguucaacaaggugacccuggccgacgccggcuucaucaagcaguacggcgacugccugggggauaucgccgcucgggaccugaucugcgcccagaaguucaacggccugaccgugcugcccccucugcugaccgacgagaugaucgcccaguacaccagcgcccugcuggccggcaccaucaccagcggcuggaccuucggcgccggcgcagcccuucagauccccuucgccaugcagauggccuacagguucaacggcaucggcgugacccagaacgugcuguacgagaaccagaagcugaucgccaaccaguucaacagcgccaucggcaagauccaggacagccugagcagcaccgccagcgcccugggcaagcugcaggacguggugaaccagaacgcucaggcccugaacacccuggugaagcagcugagcagcaacuucggcgccaucagcagcgugcugaaugacauccugucacggcuggaucccccagaggccgaggugcagaucgaccggcugaucaccggccggcugcagagccugcagaccuacgugacccagcagcugauccgggccgccgagauucgggccagcgccaaccuggcagccaccaagaugagcgagugcgugcugggccagagcaagcggguggacuuuugcggcaagggcuaccaccugaugagcuucccccagagcgcuccccacggcgugguguuccugcacgugacauacguccccgcccaggagaagaacuucaccaccgcccccgccaucugccacgacggcaaggcccacuucccccgggagggaguguucgugagcaacggcacccacugguucgugacccagcggaacuucuacgagccucagaucaucaccaccgacaacaccuucgugagcggcaacugcgacguggugaucggcaucgugaacaacaccguguacgacccccuccagcccgagcuggacagcuucaaggaggagcuggacaaguacuucaagaaccacaccagcccagacguggaccugggcgacaucagcggcaucaacgccagcguggugaacauccagaaggagaucgaccggcugaacgagguggccaagaaccugaacgagagccugaucgaccugcaggagcugggcaaguacgagcaguacaucaaguggcccugguacaucuggcugggcuucaucgccggccugaucgccaucgugauggugaccaucaugcugugcugcaugaccagcuguugcagcugccugaagggcugcugcagcugcggcagcugcugcaaguucgacgaggacgacagcgagcccgugcugaagggcgugaagcugcacuacaccugaggacuagucccuguucccagagcccacuuuuuuuucuuuuuuugaaauaaaauagccugucuuucagaucuaaaaaaaaaaaaaaaaaaaaaaaaaaaaaaaaaaaaaaaaaaaaaaaaaaaaaaaaaaaaaaaaaaaaaaaaaaaaaaaaaaaaaaaaaaaaaaaaaaaa

SEQ ID NO: 25129 - RNA, 4167 nt, Artificial Sequence
  SARS-CoV-2/Wuhan/WIV05/2019__EPI_ISL_402128 spike protein mRNA gc mod (1-1273)(K986P_V987P)
aggagagggcgcuuggcuugcaaggacccugagcugcggcauugaagcacacccaacccaacucgacugaagucagccucacugaaccggaucugagaaucuucucucucugggcuugccagggcucuccgaaccuagcuagcauccucuucaauuccaacuagaaagcuuaccauguucguguuucuggugcugcugccccugguguccagccagugugugaaccugaccaccagaacacagcugccuccagccuacaccaacagcuucaccagaggcguguacuaccccgacaagguguucagauccagcgugcugcacucuacccaggaccuguuccugccuuucuucagcaacgugaccugguuccacgccauccacguguccggcaccaauggcaccaagagauucgacaaccccgugcugcccuucaacgacgggguguacuuugccagcaccgagaaguccaacaucaucagaggcuggaucuucggcaccacacuggacagcaagacccagagccugcugaucgugaacaacgccaccaacguggucaucaaagugugcgaguuccaguucugcaacgaccccuuccugggcgucuacuaccacaagaacaacaagagcuggauggaaagcgaguuccggguguacagcagcgccaacaacugcaccuucgaguacgugucccagccuuuccugauggaccuggaaggcaagcagggcaacuucaagaaccugcgcgaguucguguucaagaacaucgacggcuacuucaaaaucuacagcaagcacaccccuaucaaccucgugcgggaucugccucagggcuucucugcucuggaaccccugguggaucugcccaucggcaucaacaucacccgguuucagacacugcuggcccugcacagaagcuaccugacaccuggcgauagcagcagcggauggacagcuggugccgccgcuuacuaugugggcuaccugcagccuagaaccuuccugcugaaguacaacgagaacggcaccaucaccgacgccguggauugugcucuggauccucugagcgagacaaagugcacccugaaguccuucaccguggaaaagggcaucuaccagaccagcaacuuccgggugcagcccaccgaauccaucgugcgguuccccaauaucaccaaucugugccccuucggcgagguguucaaugccaccagauucgccucuguguacgccuggaaccggaagcggaucagcaauugcguggccgacuacuccgugcuguacaacuccgccagcuucagcaccuucaagugcuacggcguguccccuaccaagcugaacgaccugugcuucacaaacguguacgccgacagcuucgugauccggggagaugaagugcggcagauugccccuggacagacaggcaagaucgccgacuacaacuacaagcugcccgacgacuucaccggcugugugauugccuggaacagcaacaaccuggacuccaaagucggcggcaacuacaauuaccuguaccggcuguuccggaaguccaaucugaagcccuucgagcgggacaucagcaccgaaaucuaucaggccggcagcaccccuugcaacggcguggaaggcuucaacugcuacuucccacugcaguccuacggcuuucagcccacaaauggcgugggcuaucagcccuacagagugguggugcugagcuucgaacugcugcaugcuccugccacagugugcggcccuaagaaaagcaccaaucucgugaagaacaaaugcgugaacuucaacuucaacggccugaccggcaccggcgugcugacagagagcaacaagaaguuccugccauuccagcaguuuggccgggauaucgccgauaccacagacgccguuagagauccccagacacuggaaauccuggacaucaccccaugcagcuucggcggagugucugugaucaccccuggcaccaacaccagcaaucagguggcagugcuguaccaggacgugaacuguaccgaagugcccguggccauucacgccgaucagcugacaccuacauggcggguguacuccaccggcagcaauguguuucagaccagagccggcugucugaucggagccgagcacgugaacaauagcuacgagugcgacauccccaucggcgcuggcaucugugccagcuaccagacacagacaaacagccccagacgggcuagaagcguggccagccagagcaucauugccuacacaaugucucugggcgccgagaacagcguggccuacuccaacaacucuaucgcuauccccaccaacuucaccaucagcgugaccaccgagauccugccuguguccaugaccaagaccagcguggacugcaccauguacaucugcggcgauuccaccgagugcuccaaccugcugcugcaguacggcagcuucugcacccagcugaauagagcccugacagggaucgccguggaacaggacaagaacacccaagagguguucgcccaagugaagcaaaucuacaagaccccuccuaucaaggacuucggcggcuucaauuucagccagauucugcccgauccuagcaagcccagcaagcggagcuucaucgaggaccugcuguucaacaaagugacacuggccgacgccggcuucaucaagcaguauggcgauugucugggcgacauugccgccagggaucugauuugcgcccagaaguuuaacggacugacagugcugccuccucugcugaccgaugagaugaucgcccaguacacaucugcccugcuggccggcacaaucacaagcggcuggacauuuggagcuggcgccgcucugcagauccccuuugcuaugcagauggccuaccgguucaacggcaucggagugacccagaaugugcuguacgagaaccagaagcugaucgccaaccaguucaacagcgccaucggcaagauccaggacagccugagcagcacagcaagcgcccugggaaagcugcaggacguggucaaccagaaugcccaggcacugaacacccuggucaagcagcuguccuccaacuucggcgccaucagcucugugcugaacgauauccugagcagacuggacccuccugaggccgaggugcagaucgacagacugaucacaggcagacugcagagccuccagacauacgugacccagcagcugaucagagccgccgagauuagagccucugccaaucuggccgccaccaagaugucugagugugugcugggccagagcaagagaguggacuuuugcggcaagggcuaccaccugaugagcuucccucagucugccccucacggcgugguguuucugcacgugacauaugugcccgcucaagagaagaauuucaccaccgcuccagccaucugccacgacggcaaagcccacuuuccuagagaaggcguguucguguccaacggcacccauugguucgugacacagcggaacuucuacgagccccagaucaucaccaccgacaacaccuucgugucuggcaacugcgacguugugaucggcauugugaacaauaccguguacgacccucugcagcccgagcuggacagcuucaaagaggaacuggacaaguacuuuaagaaccacacaagccccgacguggaccugggcgauaucagcggaaucaaugccagcgucgugaacauccagaaagagaucgaccggcugaacgagguggccaagaaucugaacgagagccugaucgaccugcaagaacuggggaaguacgagcaguacaucaaguggcccugguacaucuggcugggcuuuaucgccggacugauugccaucgugauggucacaaucaugcuguguugcaugaccagcugcuguagcugccugaagggcuguuguagcuguggcagcugcugcaaguucgacgaggacgauucugagcccgugcugaagggcgugaaacugcacuacaccugaggacuagucccuguucccagagcccacuuuuuuuucuuuuuuugaaauaaaauagccugucuuucagaucuaaaaaaaaaaaaaaaaaaaaaaaaaaaaaaaaaaaaaaaaaaaaaaaaaaaaaaaaaaaaaaaaaaaaaaaaaaaaaaaaaaaaaaaaaaaaaaaaaaaa

SEQ ID NO: 25130 - RNA, 4167 nt, Artificial Sequence
  SARS-CoV-2/Wuhan/WIV05/2019__EPI_ISL_402128 spike protein mRNA gc mod (1-1273)(K986P_V987P_ D614G)
aggagagggcgcuuggcuugcaaggacccugagcugcggcauugaagcacacccaacccaacucgacugaagucagccucacugaaccggaucugagaaucuucucucucugggcuugccagggcucuccgaaccuagcuagcauccucuucaauuccaacuagaaagcuuaccauguucguguuucuggugcugcugccccugguguccagccagugugugaaccugaccaccagaacacagcugccuccagccuacaccaacagcuucaccagaggcguguacuaccccgacaagguguucagauccagcgugcugcacucuacccaggaccuguuccugccuuucuucagcaacgugaccugguuccacgccauccacguguccggcaccaauggcaccaagagauucgacaaccccgugcugcccuucaacgacgggguguacuuugccagcaccgagaaguccaacaucaucagaggcuggaucuucggcaccacacuggacagcaagacccagagccugcugaucgugaacaacgccaccaacguggucaucaaagugugcgaguuccaguucugcaacgaccccuuccugggcgucuacuaccacaagaacaacaagagcuggauggaaagcgaguuccggguguacagcagcgccaacaacugcaccuucgaguacgugucccagccuuuccugauggaccuggaaggcaagcagggcaacuucaagaaccugcgcgaguucguguucaagaacaucgacggcuacuucaaaaucuacagcaagcacaccccuaucaaccucgugcgggaucugccucagggcuucucugcucuggaaccccugguggaucugcccaucggcaucaacaucacccgguuucagacacugcuggcccugcacagaagcuaccugacaccuggcgauagcagcagcggauggacagcuggugccgccgcuuacuaugugggcuaccugcagccuagaaccuuccugcugaaguacaacgagaacggcaccaucaccgacgccguggauugugcucuggauccucugagcgagacaaagugcacccugaaguccuucaccguggaaaagggcaucuaccagaccagcaacuuccgggugcagcccaccgaauccaucgugcgguuccccaauaucaccaaucugugccccuucggcgagguguucaaugccaccagauucgccucuguguacgccuggaaccggaagcggaucagcaauugcguggccgacuacuccgugcuguacaacuccgccagcuucagcaccuucaagugcuacggcguguccccuaccaagcugaacgaccugugcuucacaaacguguacgccgacagcuucgugauccggggagaugaagugcggcagauugccccuggacagacaggcaagaucgccgacuacaacuacaagcugcccgacgacuucaccggcugugugauugccuggaacagcaacaaccuggacuccaaagucggcggcaacuacaauuaccuguaccggcuguuccggaaguccaaucugaagcccuucgagcgggacaucagcaccgaaaucuaucaggccggcagcaccccuugcaacggcguggaaggcuucaacugcuacuucccacugcaguccuacggcuuucagcccacaaauggcgugggcuaucagcccuacagagugguggugcugagcuucgaacugcugcaugcuccugccacagugugcggcccuaagaaaagcaccaaucucgugaagaacaaaugcgugaacuucaacuucaacggccugaccggcaccggcgugcugacagagagcaacaagaaguuccugccauuccagcaguuuggccgggauaucgccgauaccacagacgccguuagagauccccagacacuggaaauccuggacaucaccccaugcagcuucggcggagugucugugaucaccccuggcaccaacaccagcaaucagguggcagugcuguaccagggcgugaacuguaccgaagugcccguggccauucacgccgaucagcugacaccuacauggcggguguacuccaccggcagcaauguguuucagaccagagccggcugucugaucggagccgagcacgugaacaauagcuacgagugcgacauccccaucggcgcuggcaucugugccagcuaccagacacagacaaacagccccagacgggcuagaagcguggccagccagagcaucauugccuacacaaugucucugggcgccgagaacagcguggccuacuccaacaacucuaucgcuauccccaccaacuucaccaucagcgugaccaccgagauccugccuguguccaugaccaagaccagcguggacugcaccauguacaucugcggcgauuccaccgagugcuccaaccugcugcugcaguacggcagcuucugcacccagcugaauagagcccugacagggaucgccguggaacaggacaagaacacccaagagguguucgcccaagugaagcaaaucuacaagaccccuccuaucaaggacuucggcggcuucaauuucagccagauucugcccgauccuagcaagcccagcaagcggagcuucaucgaggaccugcuguucaacaaagugacacuggccgacgccggcuucaucaagcaguauggcgauugucugggcgacauugccgccagggaucugauuugcgcccagaaguuuaacggacugacagugcugccuccucugcugaccgaugagaugaucgcccaguacacaucugcccugcuggccggcacaaucacaagcggcuggacauuuggagcuggcgccgcucugcagauccccuuugcuaugcagauggccuaccgguucaacggcaucggagugacccagaaugugcuguacgagaaccagaagcugaucgccaaccaguucaacagcgccaucggcaagauccaggacagccugagcagcacagcaagcgcccugggaaagcugcaggacguggucaaccagaaugcccaggcacugaacacccuggucaagcagcuguccuccaacuucggcgccaucagcucugugcugaacgauauccugagcagacuggacccuccugaggccgaggugcagaucgacagacugaucacaggcagacugcagagccuccagacauacgugacccagcagcugaucagagccgccgagauuagagccucugccaaucuggccgccaccaagaugucugagugugugcugggccagagcaagagaguggacuuuugcggcaagggcuaccaccugaugagcuucccucagucugccccucacggcgugguguuucugcacgugacauaugugcccgcucaagagaagaauuucaccaccgcuccagccaucugccacgacggcaaagcccacuuuccuagagaaggcguguucguguccaacggcacccauugguucgugacacagcggaacuucuacgagccccagaucaucaccaccgacaacaccuucgugucuggcaacugcgacguugugaucggcauugugaacaauaccguguacgacccucugcagcccgagcuggacagcuucaaagaggaacuggacaaguacuuuaagaaccacacaagccccgacguggaccugggcgauaucagcggaaucaaugccagcgucgugaacauccagaaagagaucgaccggcugaacgagguggccaagaaucugaacgagagccugaucgaccugcaagaacuggggaaguacgagcaguacaucaaguggcccugguacaucuggcugggcuuuaucgccggacugauugccaucgugauggucacaaucaugcuguguugcaugaccagcugcuguagcugccugaagggcuguuguagcuguggcagcugcugcaaguucgacgaggacgauucugagcccgugcugaagggcgugaaacugcacuacaccugaggacuagucccuguucccagagcccacuuuuuuuucuuuuuuugaaauaaaauagccugucuuucagaucuaaaaaaaaaaaaaaaaaaaaaaaaaaaaaaaaaaaaaaaaaaaaaaaaaaaaaaaaaaaaaaaaaaaaaaaaaaaaaaaaaaaaaaaaaaaaaaaaaaaa

SEQ ID NO: 25131 - RNA, 4167 nt, Artificial Sequence
  SARS-CoV-2/Wuhan/WIV05/2019__EPI_ISL_402128 spike protein mRNA gc mod (1-1273)(K986P_V987P_A222V_D614G)
aggagagggcgcuuggcuugcaaggacccugagcugcggcauugaagcacacccaacccaacucgacugaagucagccucacugaaccggaucugagaaucuucucucucugggcuugccagggcucuccgaaccuagcuagcauccucuucaauuccaacuagaaagcuuaccauguucguguuucuggugcugcugccccugguguccagccagugugugaaccugaccaccagaacacagcugccuccagccuacaccaacagcuucaccagaggcguguacuaccccgacaagguguucagauccagcgugcugcacucuacccaggaccuguuccugccuuucuucagcaacgugaccugguuccacgccauccacguguccggcaccaauggcaccaagagauucgacaaccccgugcugcccuucaacgacgggguguacuuugccagcaccgagaaguccaacaucaucagaggcuggaucuucggcaccacacuggacagcaagacccagagccugcugaucgugaacaacgccaccaacguggucaucaaagugugcgaguuccaguucugcaacgaccccuuccugggcgucuacuaccacaagaacaacaagagcuggauggaaagcgaguuccggguguacagcagcgccaacaacugcaccuucgaguacgugucccagccuuuccugauggaccuggaaggcaagcagggcaacuucaagaaccugcgcgaguucguguucaagaacaucgacggcuacuucaaaaucuacagcaagcacaccccuaucaaccucgugcgggaucugccucagggcuucucugugcuggaaccccugguggaucugcccaucggcaucaacaucacccgguuucagacacugcuggcccugcacagaagcuaccugacaccuggcgauagcagcagcggauggacagcuggugccgccgcuuacuaugugggcuaccugcagccuagaaccuuccugcugaaguacaacgagaacggcaccaucaccgacgccguggauugugcucuggauccucugagcgagacaaagugcacccugaaguccuucaccguggaaaagggcaucuaccagaccagcaacuuccgggugcagcccaccgaauccaucgugcgguuccccaauaucaccaaucugugccccuucggcgagguguucaaugccaccagauucgccucuguguacgccuggaaccggaagcggaucagcaauugcguggccgacuacuccgugcuguacaacuccgccagcuucagcaccuucaagugcuacggcguguccccuaccaagcugaacgaccugugcuucacaaacguguacgccgacagcuucgugauccggggagaugaagugcggcagauugccccuggacagacaggcaagaucgccgacuacaacuacaagcugcccgacgacuucaccggcugugugauugccuggaacagcaacaaccuggacuccaaagucggcggcaacuacaauuaccuguaccggcuguuccggaaguccaaucugaagcccuucgagcgggacaucagcaccgaaaucuaucaggccggcagcaccccuugcaacggcguggaaggcuucaacugcuacuucccacugcaguccuacggcuuucagcccacaaauggcgugggcuaucagcccuacagagugguggugcugagcuucgaacugcugcaugcuccugccacagugugcggcccuaagaaaagcaccaaucucgugaagaacaaaugcgugaacuucaacuucaacggccugaccggcaccggcgugcugacagagagcaacaagaaguuccugccauuccagcaguuuggccgggauaucgccgauaccacagacgccguuagagauccccagacacuggaaauccuggacaucaccccaugcagcuucggcggagugucugugaucaccccuggcaccaacaccagcaaucagguggcagugcuguaccagggcgugaacuguaccgaagugcccguggccauucacgccgaucagcugacaccuacauggcggguguacuccaccggcagcaauguguuucagaccagagccggcugucugaucggagccgagcacgugaacaauagcuacgagugcgacauccccaucggcgcuggcaucugugccagcuaccagacacagacaaacagccccagacgggcuagaagcguggccagccagagcaucauugccuacacaaugucucugggcgccgagaacagcguggccuacuccaacaacucuaucgcuauccccaccaacuucaccaucagcgugaccaccgagauccugccuguguccaugaccaagaccagcguggacugcaccauguacaucugcggcgauuccaccgagugcuccaaccugcugcugcaguacggcagcuucugcacccagcugaauagagcccugacagggaucgccguggaacaggacaagaacacccaagagguguucgcccaagugaagcaaaucuacaagaccccuccuaucaaggacuucggcggcuucaauuucagccagauucugcccgauccuagcaagcccagcaagcggagcuucaucgaggaccugcuguucaacaaagugacacuggccgacgccggcuucaucaagcaguauggcgauugucugggcgacauugccgccagggaucugauuugcgcccagaaguuuaacggacugacagugcugccuccucugcugaccgaugagaugaucgcccaguacacaucugcccugcuggccggcacaaucacaagcggcuggacauuuggagcuggcgccgcucugcagauccccuuugcuaugcagauggccuaccgguucaacggcaucggagugacccagaaugugcuguacgagaaccagaagcugaucgccaaccaguucaacagcgccaucggcaagauccaggacagccugagcagcacagcaagcgcccugggaaagcugcaggacguggucaaccagaaugcccaggcacugaacacccuggucaagcagcuguccuccaacuucggcgccaucagcucugugcugaacgauauccugagcagacuggacccuccugaggccgaggugcagaucgacagacugaucacaggcagacugcagagccuccagacauacgugacccagcagcugaucagagccgccgagauuagagccucugccaaucuggccgccaccaagaugucugagugugugcugggccagagcaagagaguggacuuuugcggcaagggcuaccaccugaugagcuucccucagucugccccucacggcgugguguuucugcacgugacauaugugcccgcucaagagaagaauuucaccaccgcuccagccaucugccacgacggcaaagcccacuuuccuagagaaggcguguucguguccaacggcacccauugguucgugacacagcggaacuucuacgagccccagaucaucaccaccgacaacaccuucgugucuggcaacugcgacguugugaucggcauugugaacaauaccguguacgacccucugcagcccgagcuggacagcuucaaagaggaacuggacaaguacuuuaagaaccacacaagccccgacguggaccugggcgauaucagcggaaucaaugccagcgucgugaacauccagaaagagaucgaccggcugaacgagguggccaagaaucugaacgagagccugaucgaccugcaagaacuggggaaguacgagcaguacaucaaguggcccugguacaucuggcugggcuuuaucgccggacugauugccaucgugauggucacaaucaugcuguguugcaugaccagcugcuguagcugccugaagggcuguuguagcuguggcagcugcugcaaguucgacgaggacgauucugagcccgugcugaagggcgugaaacugcacuacaccugaggacuagucccuguucccagagcccacuuuuuuuucuuuuuuugaaauaaaauagccugucuuucagaucuaaaaaaaaaaaaaaaaaaaaaaaaaaaaaaaaaaaaaaaaaaaaaaaaaaaaaaaaaaaaaaaaaaaaaaaaaaaaaaaaaaaaaaaaaaaaaaaaaaaa

SEQ ID NO: 25132 - RNA, 4167 nt, Artificial Sequence
  SARS-CoV-2/Wuhan/WIV05/2019__EPI_ISL_402128 spike protein mRNA gc mod (1-1273)(K986P_V987P_N439K_D614G)
aggagagggcgcuuggcuugcaaggacccugagcugcggcauugaagcacacccaacccaacucgacugaagucagccucacugaaccggaucugagaaucuucucucucugggcuugccagggcucuccgaaccuagcuagcauccucuucaauuccaacuagaaagcuuaccauguucguguuucuggugcugcugccccugguguccagccagugugugaaccugaccaccagaacacagcugccuccagccuacaccaacagcuucaccagaggcguguacuaccccgacaagguguucagauccagcgugcugcacucuacccaggaccuguuccugccuuucuucagcaacgugaccugguuccacgccauccacguguccggcaccaauggcaccaagagauucgacaaccccgugcugcccuucaacgacgggguguacuuugccagcaccgagaaguccaacaucaucagaggcuggaucuucggcaccacacuggacagcaagacccagagccugcugaucgugaacaacgccaccaacguggucaucaaagugugcgaguuccaguucugcaacgaccccuuccugggcgucuacuaccacaagaacaacaagagcuggauggaaagcgaguuccggguguacagcagcgccaacaacugcaccuucgaguacgugucccagccuuuccugauggaccuggaaggcaagcagggcaacuucaagaaccugcgcgaguucguguucaagaacaucgacggcuacuucaaaaucuacagcaagcacaccccuaucaaccucgugcgggaucugccucagggcuucucugcucuggaaccccugguggaucugcccaucggcaucaacaucacccgguuucagacacugcuggcccugcacagaagcuaccugacaccuggcgauagcagcagcggauggacagcuggugccgccgcuuacuaugugggcuaccugcagccuagaaccuuccugcugaaguacaacgagaacggcaccaucaccgacgccguggauugugcucuggauccucugagcgagacaaagugcacccugaaguccuucaccguggaaaagggcaucuaccagaccagcaacuuccgggugcagcccaccgaauccaucgugcgguuccccaauaucaccaaucugugccccuucggcgagguguucaaugccaccagauucgccucuguguacgccuggaaccggaagcggaucagcaauugcguggccgacuacuccgugcuguacaacuccgccagcuucagcaccuucaagugcuacggcguguccccuaccaagcugaacgaccugugcuucacaaacguguacgccgacagcuucgugauccggggagaugaagugcggcagauugccccuggacagacaggcaagaucgccgacuacaacuacaagcugcccgacgacuucaccggcugugugauugccuggaacagcaagaaccuggacuccaaagucggcggcaacuacaauuaccuguaccggcuguuccggaaguccaaucugaagcccuucgagcgggacaucagcaccgaaaucuaucaggccggcagcaccccuugcaacggcguggaaggcuucaacugcuacuucccacugcaguccuacggcuuucagcccacaaauggcgugggcuaucagcccuacagagugguggugcugagcuucgaacugcugcaugcuccugccacagugugcggcccuaagaaaagcaccaaucucgugaagaacaaaugcgugaacuucaacuucaacggccugaccggcaccggcgugcugacagagagcaacaagaaguuccugccauuccagcaguuuggccgggauaucgccgauaccacagacgccguuagagauccccagacacuggaaauccuggacaucaccccaugcagcuucggcggagugucugugaucaccccuggcaccaacaccagcaaucagguggcagugcuguaccagggcgugaacuguaccgaagugcccguggccauucacgccgaucagcugacaccuacauggcggguguacuccaccggcagcaauguguuucagaccagagccggcugucugaucggagccgagcacgugaacaauagcuacgagugcgacauccccaucggcgcuggcaucugugccagcuaccagacacagacaaacagccccagacgggcuagaagcguggccagccagagcaucauugccuacacaaugucucugggcgccgagaacagcguggccuacuccaacaacucuaucgcuauccccaccaacuucaccaucagcgugaccaccgagauccugccuguguccaugaccaagaccagcguggacugcaccauguacaucugcggcgauuccaccgagugcuccaaccugcugcugcaguacggcagcuucugcacccagcugaauagagcccugacagggaucgccguggaacaggacaagaacacccaagagguguucgcccaagugaagcaaaucuacaagaccccuccuaucaaggacuucggcggcuucaauuucagccagauucugcccgauccuagcaagcccagcaagcggagcuucaucgaggaccugcuguucaacaaagugacacuggccgacgccggcuucaucaagcaguauggcgauugucugggcgacauugccgccagggaucugauuugcgcccagaaguuuaacggacugacagugcugccuccucugcugaccgaugagaugaucgcccaguacacaucugcccugcuggccggcacaaucacaagcggcuggacauuuggagcuggcgccgcucugcagauccccuuugcuaugcagauggccuaccgguucaacggcaucggagugacccagaaugugcuguacgagaaccagaagcugaucgccaaccaguucaacagcgccaucggcaagauccaggacagccugagcagcacagcaagcgcccugggaaagcugcaggacguggucaaccagaaugcccaggcacugaacacccuggucaagcagcuguccuccaacuucggcgccaucagcucugugcugaacgauauccugagcagacuggacccuccugaggccgaggugcagaucgacagacugaucacaggcagacugcagagccuccagacauacgugacccagcagcugaucagagccgccgagauuagagccucugccaaucuggccgccaccaagaugucugagugugugcugggccagagcaagagaguggacuuuugcggcaagggcuaccaccugaugagcuucccucagucugccccucacggcgugguguuucugcacgugacauaugugcccgcucaagagaagaauuucaccaccgcuccagccaucugccacgacggcaaagcccacuuuccuagagaaggcguguucguguccaacggcacccauugguucgugacacagcggaacuucuacgagccccagaucaucaccaccgacaacaccuucgugucuggcaacugcgacguugugaucggcauugugaacaauaccguguacgacccucugcagcccgagcuggacagcuucaaagaggaacuggacaaguacuuuaagaaccacacaagccccgacguggaccugggcgauaucagcggaaucaaugccagcgucgugaacauccagaaagagaucgaccggcugaacgagguggccaagaaucugaacgagagccugaucgaccugcaagaacuggggaaguacgagcaguacaucaaguggcccugguacaucuggcugggcuuuaucgccggacugauugccaucgugauggucacaaucaugcuguguugcaugaccagcugcuguagcugccugaagggcuguuguagcuguggcagcugcugcaaguucgacgaggacgauucugagcccgugcugaagggcgugaaacugcacuacaccugaggacuagucccuguucccagagcccacuuuuuuuucuuuuuuugaaauaaaauagccugucuuucagaucuaaaaaaaaaaaaaaaaaaaaaaaaaaaaaaaaaaaaaaaaaaaaaaaaaaaaaaaaaaaaaaaaaaaaaaaaaaaaaaaaaaaaaaaaaaaaaaaaaaaa

SEQ ID NO: 25133 - RNA, 4167 nt, Artificial Sequence
  SARS-CoV-2/Wuhan/WIV05/2019__EPI_ISL_402128 spike protein mRNA gc mod (1-1273)(K986P_V987P_S477N_D614G)
aggagagggcgcuuggcuugcaaggacccugagcugcggcauugaagcacacccaacccaacucgacugaagucagccucacugaaccggaucugagaaucuucucucucugggcuugccagggcucuccgaaccuagcuagcauccucuucaauuccaacuagaaagcuuaccauguucguguuucuggugcugcugccccugguguccagccagugugugaaccugaccaccagaacacagcugccuccagccuacaccaacagcuucaccagaggcguguacuaccccgacaagguguucagauccagcgugcugcacucuacccaggaccuguuccugccuuucuucagcaacgugaccugguuccacgccauccacguguccggcaccaauggcaccaagagauucgacaaccccgugcugcccuucaacgacgggguguacuuugccagcaccgagaaguccaacaucaucagaggcuggaucuucggcaccacacuggacagcaagacccagagccugcugaucgugaacaacgccaccaacguggucaucaaagugugcgaguuccaguucugcaacgaccccuuccugggcgucuacuaccacaagaacaacaagagcuggauggaaagcgaguuccggguguacagcagcgccaacaacugcaccuucgaguacgugucccagccuuuccugauggaccuggaaggcaagcagggcaacuucaagaaccugcgcgaguucguguucaagaacaucgacggcuacuucaaaaucuacagcaagcacaccccuaucaaccucgugcgggaucugccucagggcuucucugcucuggaaccccugguggaucugcccaucggcaucaacaucacccgguuucagacacugcuggcccugcacagaagcuaccugacaccuggcgauagcagcagcggauggacagcuggugccgccgcuuacuaugugggcuaccugcagccuagaaccuuccugcugaaguacaacgagaacggcaccaucaccgacgccguggauugugcucuggauccucugagcgagacaaagugcacccugaaguccuucaccguggaaaagggcaucuaccagaccagcaacuuccgggugcagcccaccgaauccaucgugcgguuccccaauaucaccaaucugugccccuucggcgagguguucaaugccaccagauucgccucuguguacgccuggaaccggaagcggaucagcaauugcguggccgacuacuccgugcuguacaacuccgccagcuucagcaccuucaagugcuacggcguguccccuaccaagcugaacgaccugugcuucacaaacguguacgccgacagcuucgugauccggggagaugaagugcggcagauugccccuggacagacaggcaagaucgccgacuacaacuacaagcugcccgacgacuucaccggcugugugauugccuggaacagcaacaaccuggacuccaaagucggcggcaacuacaauuaccuguaccggcuguuccggaaguccaaucugaagcccuucgagcgggacaucagcaccgaaaucuaucaggccggcaacaccccuugcaacggcguggaaggcuucaacugcuacuucccacugcaguccuacggcuuucagcccacaaauggcgugggcuaucagcccuacagagugguggugcugagcuucgaacugcugcaugcuccugccacagugugcggcccuaagaaaagcaccaaucucgugaagaacaaaugcgugaacuucaacuucaacggccugaccggcaccggcgugcugacagagagcaacaagaaguuccugccauuccagcaguuuggccgggauaucgccgauaccacagacgccguuagagauccccagacacuggaaauccuggacaucaccccaugcagcuucggcggagugucugugaucaccccuggcaccaacaccagcaaucagguggcagugcuguaccagggcgugaacuguaccgaagugcccguggccauucacgccgaucagcugacaccuacauggcggguguacuccaccggcagcaauguguuucagaccagagccggcugucugaucggagccgagcacgugaacaauagcuacgagugcgacauccccaucggcgcuggcaucugugccagcuaccagacacagacaaacagccccagacgggcuagaagcguggccagccagagcaucauugccuacacaaugucucugggcgccgagaacagcguggccuacuccaacaacucuaucgcuauccccaccaacuucaccaucagcgugaccaccgagauccugccuguguccaugaccaagaccagcguggacugcaccauguacaucugcggcgauuccaccgagugcuccaaccugcugcugcaguacggcagcuucugcacccagcugaauagagcccugacagggaucgccguggaacaggacaagaacacccaagagguguucgcccaagugaagcaaaucuacaagaccccuccuaucaaggacuucggcggcuucaauuucagccagauucugcccgauccuagcaagcccagcaagcggagcuucaucgaggaccugcuguucaacaaagugacacuggccgacgccggcuucaucaagcaguauggcgauugucugggcgacauugccgccagggaucugauuugcgcccagaaguuuaacggacugacagugcugccuccucugcugaccgaugagaugaucgcccaguacacaucugcccugcuggccggcacaaucacaagcggcuggacauuuggagcuggcgccgcucugcagauccccuuugcuaugcagauggccuaccgguucaacggcaucggagugacccagaaugugcuguacgagaaccagaagcugaucgccaaccaguucaacagcgccaucggcaagauccaggacagccugagcagcacagcaagcgcccugggaaagcugcaggacguggucaaccagaaugcccaggcacugaacacccuggucaagcagcuguccuccaacuucggcgccaucagcucugugcugaacgauauccugagcagacuggacccuccugaggccgaggugcagaucgacagacugaucacaggcagacugcagagccuccagacauacgugacccagcagcugaucagagccgccgagauuagagccucugccaaucuggccgccaccaagaugucugagugugugcugggccagagcaagagaguggacuuuugcggcaagggcuaccaccugaugagcuucccucagucugccccucacggcgugguguuucugcacgugacauaugugcccgcucaagagaagaauuucaccaccgcuccagccaucugccacgacggcaaagcccacuuuccuagagaaggcguguucguguccaacggcacccauugguucgugacacagcggaacuucuacgagccccagaucaucaccaccgacaacaccuucgugucuggcaacugcgacguugugaucggcauugugaacaauaccguguacgacccucugcagcccgagcuggacagcuucaaagaggaacuggacaaguacuuuaagaaccacacaagccccgacguggaccugggcgauaucagcggaaucaaugccagcgucgugaacauccagaaagagaucgaccggcugaacgagguggccaagaaucugaacgagagccugaucgaccugcaagaacuggggaaguacgagcaguacaucaaguggcccugguacaucuggcugggcuuuaucgccggacugauugccaucgugauggucacaaucaugcuguguugcaugaccagcugcuguagcugccugaagggcuguuguagcuguggcagcugcugcaaguucgacgaggacgauucugagcccgugcugaagggcgugaaacugcacuacaccugaggacuagucccuguucccagagcccacuuuuuuuucuuuuuuugaaauaaaauagccugucuuucagaucuaaaaaaaaaaaaaaaaaaaaaaaaaaaaaaaaaaaaaaaaaaaaaaaaaaaaaaaaaaaaaaaaaaaaaaaaaaaaaaaaaaaaaaaaaaaaaaaaaaaa

SEQ ID NO: 25134 - RNA, 4167 nt, Artificial Sequence
  SARS-CoV-2/Wuhan/WIV05/2019__EPI_ISL_402128 spike protein mRNA gc mod (1-1273)(K986P_V987P_N501Y_D614G)
aggagagggcgcuuggcuugcaaggacccugagcugcggcauugaagcacacccaacccaacucgacugaagucagccucacugaaccggaucugagaaucuucucucucugggcuugccagggcucuccgaaccuagcuagcauccucuucaauuccaacuagaaagcuuaccauguucguguuucuggugcugcugccccugguguccagccagugugugaaccugaccaccagaacacagcugccuccagccuacaccaacagcuucaccagaggcguguacuaccccgacaagguguucagauccagcgugcugcacucuacccaggaccuguuccugccuuucuucagcaacgugaccugguuccacgccauccacguguccggcaccaauggcaccaagagauucgacaaccccgugcugcccuucaacgacgggguguacuuugccagcaccgagaaguccaacaucaucagaggcuggaucuucggcaccacacuggacagcaagacccagagccugcugaucgugaacaacgccaccaacguggucaucaaagugugcgaguuccaguucugcaacgaccccuuccugggcgucuacuaccacaagaacaacaagagcuggauggaaagcgaguuccggguguacagcagcgccaacaacugcaccuucgaguacgugucccagccuuuccugauggaccuggaaggcaagcagggcaacuucaagaaccugcgcgaguucguguucaagaacaucgacggcuacuucaaaaucuacagcaagcacaccccuaucaaccucgugcgggaucugccucagggcuucucugcucuggaaccccugguggaucugcccaucggcaucaacaucacccgguuucagacacugcuggcccugcacagaagcuaccugacaccuggcgauagcagcagcggauggacagcuggugccgccgcuuacuaugugggcuaccugcagccuagaaccuuccugcugaaguacaacgagaacggcaccaucaccgacgccguggauugugcucuggauccucugagcgagacaaagugcacccugaaguccuucaccguggaaaagggcaucuaccagaccagcaacuuccgggugcagcccaccgaauccaucgugcgguuccccaauaucaccaaucugugccccuucggcgagguguucaaugccaccagauucgccucuguguacgccuggaaccggaagcggaucagcaauugcguggccgacuacuccgugcuguacaacuccgccagcuucagcaccuucaagugcuacggcguguccccuaccaagcugaacgaccugugcuucacaaacguguacgccgacagcuucgugauccggggagaugaagugcggcagauugccccuggacagacaggcaagaucgccgacuacaacuacaagcugcccgacgacuucaccggcugugugauugccuggaacagcaacaaccuggacuccaaagucggcggcaacuacaauuaccuguaccggcuguuccggaaguccaaucugaagcccuucgagcgggacaucagcaccgaaaucuaucaggccggcagcaccccuugcaacggcguggaaggcuucaacugcuacuucccacugcaguccuacggcuuucagcccacauacggcgugggcuaucagcccuacagagugguggugcugagcuucgaacugcugcaugcuccugccacagugugcggcccuaagaaaagcaccaaucucgugaagaacaaaugcgugaacuucaacuucaacggccugaccggcaccggcgugcugacagagagcaacaagaaguuccugccauuccagcaguuuggccgggauaucgccgauaccacagacgccguuagagauccccagacacuggaaauccuggacaucaccccaugcagcuucggcggagugucugugaucaccccuggcaccaacaccagcaaucagguggcagugcuguaccagggcgugaacuguaccgaagugcccguggccauucacgccgaucagcugacaccuacauggcggguguacuccaccggcagcaauguguuucagaccagagccggcugucugaucggagccgagcacgugaacaauagcuacgagugcgacauccccaucggcgcuggcaucugugccagcuaccagacacagacaaacagccccagacgggcuagaagcguggccagccagagcaucauugccuacacaaugucucugggcgccgagaacagcguggccuacuccaacaacucuaucgcuauccccaccaacuucaccaucagcgugaccaccgagauccugccuguguccaugaccaagaccagcguggacugcaccauguacaucugcggcgauuccaccgagugcuccaaccugcugcugcaguacggcagcuucugcacccagcugaauagagcccugacagggaucgccguggaacaggacaagaacacccaagagguguucgcccaagugaagcaaaucuacaagaccccuccuaucaaggacuucggcggcuucaauuucagccagauucugcccgauccuagcaagcccagcaagcggagcuucaucgaggaccugcuguucaacaaagugacacuggccgacgccggcuucaucaagcaguauggcgauugucugggcgacauugccgccagggaucugauuugcgcccagaaguuuaacggacugacagugcugccuccucugcugaccgaugagaugaucgcccaguacacaucugcccugcuggccggcacaaucacaagcggcuggacauuuggagcuggcgccgcucugcagauccccuuugcuaugcagauggccuaccgguucaacggcaucggagugacccagaaugugcuguacgagaaccagaagcugaucgccaaccaguucaacagcgccaucggcaagauccaggacagccugagcagcacagcaagcgcccugggaaagcugcaggacguggucaaccagaaugcccaggcacugaacacccuggucaagcagcuguccuccaacuucggcgccaucagcucugugcugaacgauauccugagcagacuggacccuccugaggccgaggugcagaucgacagacugaucacaggcagacugcagagccuccagacauacgugacccagcagcugaucagagccgccgagauuagagccucugccaaucuggccgccaccaagaugucugagugugugcugggccagagcaagagaguggacuuuugcggcaagggcuaccaccugaugagcuucccucagucugccccucacggcgugguguuucugcacgugacauaugugcccgcucaagagaagaauuucaccaccgcuccagccaucugccacgacggcaaagcccacuuuccuagagaaggcguguucguguccaacggcacccauugguucgugacacagcggaacuucuacgagccccagaucaucaccaccgacaacaccuucgugucuggcaacugcgacguugugaucggcauugugaacaauaccguguacgacccucugcagcccgagcuggacagcuucaaagaggaacuggacaaguacuuuaagaaccacacaagccccgacguggaccugggcgauaucagcggaaucaaugccagcgucgugaacauccagaaagagaucgaccggcugaacgagguggccaagaaucugaacgagagccugaucgaccugcaagaacuggggaaguacgagcaguacaucaaguggcccugguacaucuggcugggcuuuaucgccggacugauugccaucgugauggucacaaucaugcuguguugcaugaccagcugcuguagcugccugaagggcuguuguagcuguggcagcugcugcaaguucgacgaggacgauucugagcccgugcugaagggcgugaaacugcacuacaccugaggacuagucccuguucccagagcccacuuuuuuuucuuuuuuugaaauaaaauagccugucuuucagaucuaaaaaaaaaaaaaaaaaaaaaaaaaaaaaaaaaaaaaaaaaaaaaaaaaaaaaaaaaaaaaaaaaaaaaaaaaaaaaaaaaaaaaaaaaaaaaaaaaaaa

SEQ ID NO: 25135 - RNA, 4161 nt, Artificial Sequence
  SARS-CoV-2/Wuhan/WIV05/2019__EPI_ISL_402128 spike protein mRNA gc mod (1-1273)(K986P_V987P_H69del_V70del_D614G)
aggagagggcgcuuggcuugcaaggacccugagcugcggcauugaagcacacccaacccaacucgacugaagucagccucacugaaccggaucugagaaucuucucucucugggcuugccagggcucuccgaaccuagcuagcauccucuucaauuccaacuagaaagcuuaccauguucguguuucuggugcugcugccccugguguccagccagugugugaaccugaccaccagaacacagcugccuccagccuacaccaacagcuucaccagaggcguguacuaccccgacaagguguucagauccagcgugcugcacucuacccaggaccuguuccugccuuucuucagcaacgugaccugguuccacgccaucuccggcaccaauggcaccaagagauucgacaaccccgugcugcccuucaacgacgggguguacuuugccagcaccgagaaguccaacaucaucagaggcuggaucuucggcaccacacuggacagcaagacccagagccugcugaucgugaacaacgccaccaacguggucaucaaagugugcgaguuccaguucugcaacgaccccuuccugggcgucuacuaccacaagaacaacaagagcuggauggaaagcgaguuccggguguacagcagcgccaacaacugcaccuucgaguacgugucccagccuuuccugauggaccuggaaggcaagcagggcaacuucaagaaccugcgcgaguucguguucaagaacaucgacggcuacuucaaaaucuacagcaagcacaccccuaucaaccucgugcgggaucugccucagggcuucucugcucuggaaccccugguggaucugcccaucggcaucaacaucacccgguuucagacacugcuggcccugcacagaagcuaccugacaccuggcgauagcagcagcggauggacagcuggugccgccgcuuacuaugugggcuaccugcagccuagaaccuuccugcugaaguacaacgagaacggcaccaucaccgacgccguggauugugcucuggauccucugagcgagacaaagugcacccugaaguccuucaccguggaaaagggcaucuaccagaccagcaacuuccgggugcagcccaccgaauccaucgugcgguuccccaauaucaccaaucugugccccuucggcgagguguucaaugccaccagauucgccucuguguacgccuggaaccggaagcggaucagcaauugcguggccgacuacuccgugcuguacaacuccgccagcuucagcaccuucaagugcuacggcguguccccuaccaagcugaacgaccugugcuucacaaacguguacgccgacagcuucgugauccggggagaugaagugcggcagauugccccuggacagacaggcaagaucgccgacuacaacuacaagcugcccgacgacuucaccggcugugugauugccuggaacagcaacaaccuggacuccaaagucggcggcaacuacaauuaccuguaccggcuguuccggaaguccaaucugaagcccuucgagcgggacaucagcaccgaaaucuaucaggccggcagcaccccuugcaacggcguggaaggcuucaacugcuacuucccacugcaguccuacggcuuucagcccacaaauggcgugggcuaucagcccuacagagugguggugcugagcuucgaacugcugcaugcuccugccacagugugcggcccuaagaaaagcaccaaucucgugaagaacaaaugcgugaacuucaacuucaacggccugaccggcaccggcgugcugacagagagcaacaagaaguuccugccauuccagcaguuuggccgggauaucgccgauaccacagacgccguuagagauccccagacacuggaaauccuggacaucaccccaugcagcuucggcggagugucugugaucaccccuggcaccaacaccagcaaucagguggcagugcuguaccagggcgugaacuguaccgaagugcccguggccauucacgccgaucagcugacaccuacauggcggguguacuccaccggcagcaauguguuucagaccagagccggcugucugaucggagccgagcacgugaacaauagcuacgagugcgacauccccaucggcgcuggcaucugugccagcuaccagacacagacaaacagccccagacgggcuagaagcguggccagccagagcaucauugccuacacaaugucucugggcgccgagaacagcguggccuacuccaacaacucuaucgcuauccccaccaacuucaccaucagcgugaccaccgagauccugccuguguccaugaccaagaccagcguggacugcaccauguacaucugcggcgauuccaccgagugcuccaaccugcugcugcaguacggcagcuucugcacccagcugaauagagcccugacagggaucgccguggaacaggacaagaacacccaagagguguucgcccaagugaagcaaaucuacaagaccccuccuaucaaggacuucggcggcuucaauuucagccagauucugcccgauccuagcaagcccagcaagcggagcuucaucgaggaccugcuguucaacaaagugacacuggccgacgccggcuucaucaagcaguauggcgauugucugggcgacauugccgccagggaucugauuugcgcccagaaguuuaacggacugacagugcugccuccucugcugaccgaugagaugaucgcccaguacacaucugcccugcuggccggcacaaucacaagcggcuggacauuuggagcuggcgccgcucugcagauccccuuugcuaugcagauggccuaccgguucaacggcaucggagugacccagaaugugcuguacgagaaccagaagcugaucgccaaccaguucaacagcgccaucggcaagauccaggacagccugagcagcacagcaagcgcccugggaaagcugcaggacguggucaaccagaaugcccaggcacugaacacccuggucaagcagcuguccuccaacuucggcgccaucagcucugugcugaacgauauccugagcagacuggacccuccugaggccgaggugcagaucgacagacugaucacaggcagacugcagagccuccagacauacgugacccagcagcugaucagagccgccgagauuagagccucugccaaucuggccgccaccaagaugucugagugugugcugggccagagcaagagaguggacuuuugcggcaagggcuaccaccugaugagcuucccucagucugccccucacggcgugguguuucugcacgugacauaugugcccgcucaagagaagaauuucaccaccgcuccagccaucugccacgacggcaaagcccacuuuccuagagaaggcguguucguguccaacggcacccauugguucgugacacagcggaacuucuacgagccccagaucaucaccaccgacaacaccuucgugucuggcaacugcgacguugugaucggcauugugaacaauaccguguacgacccucugcagcccgagcuggacagcuucaaagaggaacuggacaaguacuuuaagaaccacacaagccccgacguggaccugggcgauaucagcggaaucaaugccagcgucgugaacauccagaaagagaucgaccggcugaacgagguggccaagaaucugaacgagagccugaucgaccugcaagaacuggggaaguacgagcaguacaucaaguggcccugguacaucuggcugggcuuuaucgccggacugauugccaucgugauggucacaaucaugcuguguugcaugaccagcugcuguagcugccugaagggcuguuguagcuguggcagcugcugcaaguucgacgaggacgauucugagcccgugcugaagggcgugaaacugcacuacaccugaggacuagucccuguucccagagcccacuuuuuuuucuuuuuuugaaauaaaauagccugucuuucagaucuaaaaaaaaaaaaaaaaaaaaaaaaaaaaaaaaaaaaaaaaaaaaaaaaaaaaaaaaaaaaaaaaaaaaaaaaaaaaaaaaaaaaaaaaaaaaaaaaaaaa

SEQ ID NO: 25136 - RNA, 4167 nt, Artificial Sequence
  SARS-CoV-2/Wuhan/WIV05/2019__EPI_ISL_402128 spike protein mRNA gc mod (1-1273)(K986P_V987P_Y453F_D614G)
aggagagggcgcuuggcuugcaaggacccugagcugcggcauugaagcacacccaacccaacucgacugaagucagccucacugaaccggaucugagaaucuucucucucugggcuugccagggcucuccgaaccuagcuagcauccucuucaauuccaacuagaaagcuuaccauguucguguuucuggugcugcugccccugguguccagccagugugugaaccugaccaccagaacacagcugccuccagccuacaccaacagcuucaccagaggcguguacuaccccgacaagguguucagauccagcgugcugcacucuacccaggaccuguuccugccuuucuucagcaacgugaccugguuccacgccauccacguguccggcaccaauggcaccaagagauucgacaaccccgugcugcccuucaacgacgggguguacuuugccagcaccgagaaguccaacaucaucagaggcuggaucuucggcaccacacuggacagcaagacccagagccugcugaucgugaacaacgccaccaacguggucaucaaagugugcgaguuccaguucugcaacgaccccuuccugggcgucuacuaccacaagaacaacaagagcuggauggaaagcgaguuccggguguacagcagcgccaacaacugcaccuucgaguacgugucccagccuuuccugauggaccuggaaggcaagcagggcaacuucaagaaccugcgcgaguucguguucaagaacaucgacggcuacuucaaaaucuacagcaagcacaccccuaucaaccucgugcgggaucugccucagggcuucucugcucuggaaccccugguggaucugcccaucggcaucaacaucacccgguuucagacacugcuggcccugcacagaagcuaccugacaccuggcgauagcagcagcggauggacagcuggugccgccgcuuacuaugugggcuaccugcagccuagaaccuuccugcugaaguacaacgagaacggcaccaucaccgacgccguggauugugcucuggauccucugagcgagacaaagugcacccugaaguccuucaccguggaaaagggcaucuaccagaccagcaacuuccgggugcagcccaccgaauccaucgugcgguuccccaauaucaccaaucugugccccuucggcgagguguucaaugccaccagauucgccucuguguacgccuggaaccggaagcggaucagcaauugcguggccgacuacuccgugcuguacaacuccgccagcuucagcaccuucaagugcuacggcguguccccuaccaagcugaacgaccugugcuucacaaacguguacgccgacagcuucgugauccggggagaugaagugcggcagauugccccuggacagacaggcaagaucgccgacuacaacuacaagcugcccgacgacuucaccggcugugugauugccuggaacagcaacaaccuggacuccaaagucggcggcaacuacaauuaccuguuccggcuguuccggaaguccaaucugaagcccuucgagcgggacaucagcaccgaaaucuaucaggccggcagcaccccuugcaacggcguggaaggcuucaacugcuacuucccacugcaguccuacggcuuucagcccacaaauggcgugggcuaucagcccuacagagugguggugcugagcuucgaacugcugcaugcuccugccacagugugcggcccuaagaaaagcaccaaucucgugaagaacaaaugcgugaacuucaacuucaacggccugaccggcaccggcgugcugacagagagcaacaagaaguuccugccauuccagcaguuuggccgggauaucgccgauaccacagacgccguuagagauccccagacacuggaaauccuggacaucaccccaugcagcuucggcggagugucugugaucaccccuggcaccaacaccagcaaucagguggcagugcuguaccagggcgugaacuguaccgaagugcccguggccauucacgccgaucagcugacaccuacauggcggguguacuccaccggcagcaauguguuucagaccagagccggcugucugaucggagccgagcacgugaacaauagcuacgagugcgacauccccaucggcgcuggcaucugugccagcuaccagacacagacaaacagccccagacgggcuagaagcguggccagccagagcaucauugccuacacaaugucucugggcgccgagaacagcguggccuacuccaacaacucuaucgcuauccccaccaacuucaccaucagcgugaccaccgagauccugccuguguccaugaccaagaccagcguggacugcaccauguacaucugcggcgauuccaccgagugcuccaaccugcugcugcaguacggcagcuucugcacccagcugaauagagcccugacagggaucgccguggaacaggacaagaacacccaagagguguucgcccaagugaagcaaaucuacaagaccccuccuaucaaggacuucggcggcuucaauuucagccagauucugcccgauccuagcaagcccagcaagcggagcuucaucgaggaccugcuguucaacaaagugacacuggccgacgccggcuucaucaagcaguauggcgauugucugggcgacauugccgccagggaucugauuugcgcccagaaguuuaacggacugacagugcugccuccucugcugaccgaugagaugaucgcccaguacacaucugcccugcuggccggcacaaucacaagcggcuggacauuuggagcuggcgccgcucugcagauccccuuugcuaugcagauggccuaccgguucaacggcaucggagugacccagaaugugcuguacgagaaccagaagcugaucgccaaccaguucaacagcgccaucggcaagauccaggacagccugagcagcacagcaagcgcccugggaaagcugcaggacguggucaaccagaaugcccaggcacugaacacccuggucaagcagcuguccuccaacuucggcgccaucagcucugugcugaacgauauccugagcagacuggacccuccugaggccgaggugcagaucgacagacugaucacaggcagacugcagagccuccagacauacgugacccagcagcugaucagagccgccgagauuagagccucugccaaucuggccgccaccaagaugucugagugugugcugggccagagcaagagaguggacuuuugcggcaagggcuaccaccugaugagcuucccucagucugccccucacggcgugguguuucugcacgugacauaugugcccgcucaagagaagaauuucaccaccgcuccagccaucugccacgacggcaaagcccacuuuccuagagaaggcguguucguguccaacggcacccauugguucgugacacagcggaacuucuacgagccccagaucaucaccaccgacaacaccuucgugucuggcaacugcgacguugugaucggcauugugaacaauaccguguacgacccucugcagcccgagcuggacagcuucaaagaggaacuggacaaguacuuuaagaaccacacaagccccgacguggaccugggcgauaucagcggaaucaaugccagcgucgugaacauccagaaagagaucgaccggcugaacgagguggccaagaaucugaacgagagccugaucgaccugcaagaacuggggaaguacgagcaguacaucaaguggcccugguacaucuggcugggcuuuaucgccggacugauugccaucgugauggucacaaucaugcuguguugcaugaccagcugcuguagcugccugaagggcuguuguagcuguggcagcugcugcaaguucgacgaggacgauucugagcccgugcugaagggcgugaaacugcacuacaccugaggacuagucccuguucccagagcccacuuuuuuuucuuuuuuugaaauaaaauagccugucuuucagaucuaaaaaaaaaaaaaaaaaaaaaaaaaaaaaaaaaaaaaaaaaaaaaaaaaaaaaaaaaaaaaaaaaaaaaaaaaaaaaaaaaaaaaaaaaaaaaaaaaaaa

SEQ ID NO: 25137 - RNA, 4167 nt, Artificial Sequence
  SARS-CoV-2/Wuhan/WIV05/2019__EPI_ISL_402128 spike protein mRNA gc mod (1-1273)(K986P_V987P_D614G_I692V)
aggagagggcgcuuggcuugcaaggacccugagcugcggcauugaagcacacccaacccaacucgacugaagucagccucacugaaccggaucugagaaucuucucucucugggcuugccagggcucuccgaaccuagcuagcauccucuucaauuccaacuagaaagcuuaccauguucguguuucuggugcugcugccccugguguccagccagugugugaaccugaccaccagaacacagcugccuccagccuacaccaacagcuucaccagaggcguguacuaccccgacaagguguucagauccagcgugcugcacucuacccaggaccuguuccugccuuucuucagcaacgugaccugguuccacgccauccacguguccggcaccaauggcaccaagagauucgacaaccccgugcugcccuucaacgacgggguguacuuugccagcaccgagaaguccaacaucaucagaggcuggaucuucggcaccacacuggacagcaagacccagagccugcugaucgugaacaacgccaccaacguggucaucaaagugugcgaguuccaguucugcaacgaccccuuccugggcgucuacuaccacaagaacaacaagagcuggauggaaagcgaguuccggguguacagcagcgccaacaacugcaccuucgaguacgugucccagccuuuccugauggaccuggaaggcaagcagggcaacuucaagaaccugcgcgaguucguguucaagaacaucgacggcuacuucaaaaucuacagcaagcacaccccuaucaaccucgugcgggaucugccucagggcuucucugcucuggaaccccugguggaucugcccaucggcaucaacaucacccgguuucagacacugcuggcccugcacagaagcuaccugacaccuggcgauagcagcagcggauggacagcuggugccgccgcuuacuaugugggcuaccugcagccuagaaccuuccugcugaaguacaacgagaacggcaccaucaccgacgccguggauugugcucuggauccucugagcgagacaaagugcacccugaaguccuucaccguggaaaagggcaucuaccagaccagcaacuuccgggugcagcccaccgaauccaucgugcgguuccccaauaucaccaaucugugccccuucggcgagguguucaaugccaccagauucgccucuguguacgccuggaaccggaagcggaucagcaauugcguggccgacuacuccgugcuguacaacuccgccagcuucagcaccuucaagugcuacggcguguccccuaccaagcugaacgaccugugcuucacaaacguguacgccgacagcuucgugauccggggagaugaagugcggcagauugccccuggacagacaggcaagaucgccgacuacaacuacaagcugcccgacgacuucaccggcugugugauugccuggaacagcaacaaccuggacuccaaagucggcggcaacuacaauuaccuguaccggcuguuccggaaguccaaucugaagcccuucgagcgggacaucagcaccgaaaucuaucaggccggcagcaccccuugcaacggcguggaaggcuucaacugcuacuucccacugcaguccuacggcuuucagcccacaaauggcgugggcuaucagcccuacagagugguggugcugagcuucgaacugcugcaugcuccugccacagugugcggcccuaagaaaagcaccaaucucgugaagaacaaaugcgugaacuucaacuucaacggccugaccggcaccggcgugcugacagagagcaacaagaaguuccugccauuccagcaguuuggccgggauaucgccgauaccacagacgccguuagagauccccagacacuggaaauccuggacaucaccccaugcagcuucggcggagugucugugaucaccccuggcaccaacaccagcaaucagguggcagugcuguaccagggcgugaacuguaccgaagugcccguggccauucacgccgaucagcugacaccuacauggcggguguacuccaccggcagcaauguguuucagaccagagccggcugucugaucggagccgagcacgugaacaauagcuacgagugcgacauccccaucggcgcuggcaucugugccagcuaccagacacagacaaacagccccagacgggcuagaagcguggccagccagagcgugauugccuacacaaugucucugggcgccgagaacagcguggccuacuccaacaacucuaucgcuauccccaccaacuucaccaucagcgugaccaccgagauccugccuguguccaugaccaagaccagcguggacugcaccauguacaucugcggcgauuccaccgagugcuccaaccugcugcugcaguacggcagcuucugcacccagcugaauagagcccugacagggaucgccguggaacaggacaagaacacccaagagguguucgcccaagugaagcaaaucuacaagaccccuccuaucaaggacuucggcggcuucaauuucagccagauucugcccgauccuagcaagcccagcaagcggagcuucaucgaggaccugcuguucaacaaagugacacuggccgacgccggcuucaucaagcaguauggcgauugucugggcgacauugccgccagggaucugauuugcgcccagaaguuuaacggacugacagugcugccuccucugcugaccgaugagaugaucgcccaguacacaucugcccugcuggccggcacaaucacaagcggcuggacauuuggagcuggcgccgcucugcagauccccuuugcuaugcagauggccuaccgguucaacggcaucggagugacccagaaugugcuguacgagaaccagaagcugaucgccaaccaguucaacagcgccaucggcaagauccaggacagccugagcagcacagcaagcgcccugggaaagcugcaggacguggucaaccagaaugcccaggcacugaacacccuggucaagcagcuguccuccaacuucggcgccaucagcucugugcugaacgauauccugagcagacuggacccuccugaggccgaggugcagaucgacagacugaucacaggcagacugcagagccuccagacauacgugacccagcagcugaucagagccgccgagauuagagccucugccaaucuggccgccaccaagaugucugagugugugcugggccagagcaagagaguggacuuuugcggcaagggcuaccaccugaugagcuucccucagucugccccucacggcgugguguuucugcacgugacauaugugcccgcucaagagaagaauuucaccaccgcuccagccaucugccacgacggcaaagcccacuuuccuagagaaggcguguucguguccaacggcacccauugguucgugacacagcggaacuucuacgagccccagaucaucaccaccgacaacaccuucgugucuggcaacugcgacguugugaucggcauugugaacaauaccguguacgacccucugcagcccgagcuggacagcuucaaagaggaacuggacaaguacuuuaagaaccacacaagccccgacguggaccugggcgauaucagcggaaucaaugccagcgucgugaacauccagaaagagaucgaccggcugaacgagguggccaagaaucugaacgagagccugaucgaccugcaagaacuggggaaguacgagcaguacaucaaguggcccugguacaucuggcugggcuuuaucgccggacugauugccaucgugauggucacaaucaugcuguguugcaugaccagcugcuguagcugccugaagggcuguuguagcuguggcagcugcugcaaguucgacgaggacgauucugagcccgugcugaagggcgugaaacugcacuacaccugaggacuagucccuguucccagagcccacuuuuuuuucuuuuuuugaaauaaaauagccugucuuucagaucuaaaaaaaaaaaaaaaaaaaaaaaaaaaaaaaaaaaaaaaaaaaaaaaaaaaaaaaaaaaaaaaaaaaaaaaaaaaaaaaaaaaaaaaaaaaaaaaaaaaa

SEQ ID NO: 25138 - RNA, 4167 nt, Artificial Sequence
  SARS-CoV-2/Wuhan/WIV05/2019__EPI_ISL_402128 spike protein mRNA gc mod (1-1273)(K986P_V987P_D614G_M1229I)
aggagagggcgcuuggcuugcaaggacccugagcugcggcauugaagcacacccaacccaacucgacugaagucagccucacugaaccggaucugagaaucuucucucucugggcuugccagggcucuccgaaccuagcuagcauccucuucaauuccaacuagaaagcuuaccauguucguguuucuggugcugcugccccugguguccagccagugugugaaccugaccaccagaacacagcugccuccagccuacaccaacagcuucaccagaggcguguacuaccccgacaagguguucagauccagcgugcugcacucuacccaggaccuguuccugccuuucuucagcaacgugaccugguuccacgccauccacguguccggcaccaauggcaccaagagauucgacaaccccgugcugcccuucaacgacgggguguacuuugccagcaccgagaaguccaacaucaucagaggcuggaucuucggcaccacacuggacagcaagacccagagccugcugaucgugaacaacgccaccaacguggucaucaaagugugcgaguuccaguucugcaacgaccccuuccugggcgucuacuaccacaagaacaacaagagcuggauggaaagcgaguuccggguguacagcagcgccaacaacugcaccuucgaguacgugucccagccuuuccugauggaccuggaaggcaagcagggcaacuucaagaaccugcgcgaguucguguucaagaacaucgacggcuacuucaaaaucuacagcaagcacaccccuaucaaccucgugcgggaucugccucagggcuucucugcucuggaaccccugguggaucugcccaucggcaucaacaucacccgguuucagacacugcuggcccugcacagaagcuaccugacaccuggcgauagcagcagcggauggacagcuggugccgccgcuuacuaugugggcuaccugcagccuagaaccuuccugcugaaguacaacgagaacggcaccaucaccgacgccguggauugugcucuggauccucugagcgagacaaagugcacccugaaguccuucaccguggaaaagggcaucuaccagaccagcaacuuccgggugcagcccaccgaauccaucgugcgguuccccaauaucaccaaucugugccccuucggcgagguguucaaugccaccagauucgccucuguguacgccuggaaccggaagcggaucagcaauugcguggccgacuacuccgugcuguacaacuccgccagcuucagcaccuucaagugcuacggcguguccccuaccaagcugaacgaccugugcuucacaaacguguacgccgacagcuucgugauccggggagaugaagugcggcagauugccccuggacagacaggcaagaucgccgacuacaacuacaagcugcccgacgacuucaccggcugugugauugccuggaacagcaacaaccuggacuccaaagucggcggcaacuacaauuaccuguaccggcuguuccggaaguccaaucugaagcccuucgagcgggacaucagcaccgaaaucuaucaggccggcagcaccccuugcaacggcguggaaggcuucaacugcuacuucccacugcaguccuacggcuuucagcccacaaauggcgugggcuaucagcccuacagagugguggugcugagcuucgaacugcugcaugcuccugccacagugugcggcccuaagaaaagcaccaaucucgugaagaacaaaugcgugaacuucaacuucaacggccugaccggcaccggcgugcugacagagagcaacaagaaguuccugccauuccagcaguuuggccgggauaucgccgauaccacagacgccguuagagauccccagacacuggaaauccuggacaucaccccaugcagcuucggcggagugucugugaucaccccuggcaccaacaccagcaaucagguggcagugcuguaccagggcgugaacuguaccgaagugcccguggccauucacgccgaucagcugacaccuacauggcggguguacuccaccggcagcaauguguuucagaccagagccggcugucugaucggagccgagcacgugaacaauagcuacgagugcgacauccccaucggcgcuggcaucugugccagcuaccagacacagacaaacagccccagacgggcuagaagcguggccagccagagcaucauugccuacacaaugucucugggcgccgagaacagcguggccuacuccaacaacucuaucgcuauccccaccaacuucaccaucagcgugaccaccgagauccugccuguguccaugaccaagaccagcguggacugcaccauguacaucugcggcgauuccaccgagugcuccaaccugcugcugcaguacggcagcuucugcacccagcugaauagagcccugacagggaucgccguggaacaggacaagaacacccaagagguguucgcccaagugaagcaaaucuacaagaccccuccuaucaaggacuucggcggcuucaauuucagccagauucugcccgauccuagcaagcccagcaagcggagcuucaucgaggaccugcuguucaacaaagugacacuggccgacgccggcuucaucaagcaguauggcgauugucugggcgacauugccgccagggaucugauuugcgcccagaaguuuaacggacugacagugcugccuccucugcugaccgaugagaugaucgcccaguacacaucugcccugcuggccggcacaaucacaagcggcuggacauuuggagcuggcgccgcucugcagauccccuuugcuaugcagauggccuaccgguucaacggcaucggagugacccagaaugugcuguacgagaaccagaagcugaucgccaaccaguucaacagcgccaucggcaagauccaggacagccugagcagcacagcaagcgcccugggaaagcugcaggacguggucaaccagaaugcccaggcacugaacacccuggucaagcagcuguccuccaacuucggcgccaucagcucugugcugaacgauauccugagcagacuggacccuccugaggccgaggugcagaucgacagacugaucacaggcagacugcagagccuccagacauacgugacccagcagcugaucagagccgccgagauuagagccucugccaaucuggccgccaccaagaugucugagugugugcugggccagagcaagagaguggacuuuugcggcaagggcuaccaccugaugagcuucccucagucugccccucacggcgugguguuucugcacgugacauaugugcccgcucaagagaagaauuucaccaccgcuccagccaucugccacgacggcaaagcccacuuuccuagagaaggcguguucguguccaacggcacccauugguucgugacacagcggaacuucuacgagccccagaucaucaccaccgacaacaccuucgugucuggcaacugcgacguugugaucggcauugugaacaauaccguguacgacccucugcagcccgagcuggacagcuucaaagaggaacuggacaaguacuuuaagaaccacacaagccccgacguggaccugggcgauaucagcggaaucaaugccagcgucgugaacauccagaaagagaucgaccggcugaacgagguggccaagaaucugaacgagagccugaucgaccugcaagaacuggggaaguacgagcaguacaucaaguggcccugguacaucuggcugggcuuuaucgccggacugauugccaucgugaucgucacaaucaugcuguguugcaugaccagcugcuguagcugccugaagggcuguuguagcuguggcagcugcugcaaguucgacgaggacgauucugagcccgugcugaagggcgugaaacugcacuacaccugaggacuagucccuguucccagagcccacuuuuuuuucuuuuuuugaaauaaaauagccugucuuucagaucuaaaaaaaaaaaaaaaaaaaaaaaaaaaaaaaaaaaaaaaaaaaaaaaaaaaaaaaaaaaaaaaaaaaaaaaaaaaaaaaaaaaaaaaaaaaaaaaaaaaa

SEQ ID NO: 25139 - RNA, 4161 nt, Artificial Sequence
  SARS-CoV-2/Wuhan/WIV05/2019__EPI_ISL_402128 spike protein mRNA gc mod (1-1273)(K986P_V987P_H69del_V70del_A222V_Y453F_S477N_D614G_I692V)
aggagagggcgcuuggcuugcaaggacccugagcugcggcauugaagcacacccaacccaacucgacugaagucagccucacugaaccggaucugagaaucuucucucucugggcuugccagggcucuccgaaccuagcuagcauccucuucaauuccaacuagaaagcuuaccauguucguguuucuggugcugcugccccugguguccagccagugugugaaccugaccaccagaacacagcugccuccagccuacaccaacagcuucaccagaggcguguacuaccccgacaagguguucagauccagcgugcugcacucuacccaggaccuguuccugccuuucuucagcaacgugaccugguuccacgccaucuccggcaccaauggcaccaagagauucgacaaccccgugcugcccuucaacgacgggguguacuuugccagcaccgagaaguccaacaucaucagaggcuggaucuucggcaccacacuggacagcaagacccagagccugcugaucgugaacaacgccaccaacguggucaucaaagugugcgaguuccaguucugcaacgaccccuuccugggcgucuacuaccacaagaacaacaagagcuggauggaaagcgaguuccggguguacagcagcgccaacaacugcaccuucgaguacgugucccagccuuuccugauggaccuggaaggcaagcagggcaacuucaagaaccugcgcgaguucguguucaagaacaucgacggcuacuucaaaaucuacagcaagcacaccccuaucaaccucgugcgggaucugccucagggcuucucugugcuggaaccccugguggaucugcccaucggcaucaacaucacccgguuucagacacugcuggcccugcacagaagcuaccugacaccuggcgauagcagcagcggauggacagcuggugccgccgcuuacuaugugggcuaccugcagccuagaaccuuccugcugaaguacaacgagaacggcaccaucaccgacgccguggauugugcucuggauccucugagcgagacaaagugcacccugaaguccuucaccguggaaaagggcaucuaccagaccagcaacuuccgggugcagcccaccgaauccaucgugcgguuccccaauaucaccaaucugugccccuucggcgagguguucaaugccaccagauucgccucuguguacgccuggaaccggaagcggaucagcaauugcguggccgacuacuccgugcuguacaacuccgccagcuucagcaccuucaagugcuacggcguguccccuaccaagcugaacgaccugugcuucacaaacguguacgccgacagcuucgugauccggggagaugaagugcggcagauugccccuggacagacaggcaagaucgccgacuacaacuacaagcugcccgacgacuucaccggcugugugauugccuggaacagcaacaaccuggacuccaaagucggcggcaacuacaauuaccuguuccggcuguuccggaaguccaaucugaagcccuucgagcgggacaucagcaccgaaaucuaucaggccggcaacaccccuugcaacggcguggaaggcuucaacugcuacuucccacugcaguccuacggcuuucagcccacaaauggcgugggcuaucagcccuacagagugguggugcugagcuucgaacugcugcaugcuccugccacagugugcggcccuaagaaaagcaccaaucucgugaagaacaaaugcgugaacuucaacuucaacggccugaccggcaccggcgugcugacagagagcaacaagaaguuccugccauuccagcaguuuggccgggauaucgccgauaccacagacgccguuagagauccccagacacuggaaauccuggacaucaccccaugcagcuucggcggagugucugugaucaccccuggcaccaacaccagcaaucagguggcagugcuguaccagggcgugaacuguaccgaagugcccguggccauucacgccgaucagcugacaccuacauggcggguguacuccaccggcagcaauguguuucagaccagagccggcugucugaucggagccgagcacgugaacaauagcuacgagugcgacauccccaucggcgcuggcaucugugccagcuaccagacacagacaaacagccccagacgggcuagaagcguggccagccagagcgugauugccuacacaaugucucugggcgccgagaacagcguggccuacuccaacaacucuaucgcuauccccaccaacuucaccaucagcgugaccaccgagauccugccuguguccaugaccaagaccagcguggacugcaccauguacaucugcggcgauuccaccgagugcuccaaccugcugcugcaguacggcagcuucugcacccagcugaauagagcccugacagggaucgccguggaacaggacaagaacacccaagagguguucgcccaagugaagcaaaucuacaagaccccuccuaucaaggacuucggcggcuucaauuucagccagauucugcccgauccuagcaagcccagcaagcggagcuucaucgaggaccugcuguucaacaaagugacacuggccgacgccggcuucaucaagcaguauggcgauugucugggcgacauugccgccagggaucugauuugcgcccagaaguuuaacggacugacagugcugccuccucugcugaccgaugagaugaucgcccaguacacaucugcccugcuggccggcacaaucacaagcggcuggacauuuggagcuggcgccgcucugcagauccccuuugcuaugcagauggccuaccgguucaacggcaucggagugacccagaaugugcuguacgagaaccagaagcugaucgccaaccaguucaacagcgccaucggcaagauccaggacagccugagcagcacagcaagcgcccugggaaagcugcaggacguggucaaccagaaugcccaggcacugaacacccuggucaagcagcuguccuccaacuucggcgccaucagcucugugcugaacgauauccugagcagacuggacccuccugaggccgaggugcagaucgacagacugaucacaggcagacugcagagccuccagacauacgugacccagcagcugaucagagccgccgagauuagagccucugccaaucuggccgccaccaagaugucugagugugugcugggccagagcaagagaguggacuuuugcggcaagggcuaccaccugaugagcuucccucagucugccccucacggcgugguguuucugcacgugacauaugugcccgcucaagagaagaauuucaccaccgcuccagccaucugccacgacggcaaagcccacuuuccuagagaaggcguguucguguccaacggcacccauugguucgugacacagcggaacuucuacgagccccagaucaucaccaccgacaacaccuucgugucuggcaacugcgacguugugaucggcauugugaacaauaccguguacgacccucugcagcccgagcuggacagcuucaaagaggaacuggacaaguacuuuaagaaccacacaagccccgacguggaccugggcgauaucagcggaaucaaugccagcgucgugaacauccagaaagagaucgaccggcugaacgagguggccaagaaucugaacgagagccugaucgaccugcaagaacuggggaaguacgagcaguacaucaaguggcccugguacaucuggcugggcuuuaucgccggacugauugccaucgugauggucacaaucaugcuguguugcaugaccagcugcuguagcugccugaagggcuguuguagcuguggcagcugcugcaaguucgacgaggacgauucugagcccgugcugaagggcgugaaacugcacuacaccugaggacuagucccuguucccagagcccacuuuuuuuucuuuuuuugaaauaaaauagccugucuuucagaucuaaaaaaaaaaaaaaaaaaaaaaaaaaaaaaaaaaaaaaaaaaaaaaaaaaaaaaaaaaaaaaaaaaaaaaaaaaaaaaaaaaaaaaaaaaaaaaaaaaaa

SEQ ID NO: 25140 - RNA, 4161 nt, Artificial Sequence
  SARS-CoV-2/Wuhan/WIV05/2019__EPI_ISL_402128 spike protein mRNA gc mod (1-1273)(K986P_V987P_H69del_V70del_Y453F_D614G_I692V_M1229I)
aggagagggcgcuuggcuugcaaggacccugagcugcggcauugaagcacacccaacccaacucgacugaagucagccucacugaaccggaucugagaaucuucucucucugggcuugccagggcucuccgaaccuagcuagcauccucuucaauuccaacuagaaagcuuaccauguucguguuucuggugcugcugccccugguguccagccagugugugaaccugaccaccagaacacagcugccuccagccuacaccaacagcuucaccagaggcguguacuaccccgacaagguguucagauccagcgugcugcacucuacccaggaccuguuccugccuuucuucagcaacgugaccugguuccacgccaucuccggcaccaauggcaccaagagauucgacaaccccgugcugcccuucaacgacgggguguacuuugccagcaccgagaaguccaacaucaucagaggcuggaucuucggcaccacacuggacagcaagacccagagccugcugaucgugaacaacgccaccaacguggucaucaaagugugcgaguuccaguucugcaacgaccccuuccugggcgucuacuaccacaagaacaacaagagcuggauggaaagcgaguuccggguguacagcagcgccaacaacugcaccuucgaguacgugucccagccuuuccugauggaccuggaaggcaagcagggcaacuucaagaaccugcgcgaguucguguucaagaacaucgacggcuacuucaaaaucuacagcaagcacaccccuaucaaccucgugcgggaucugccucagggcuucucugcucuggaaccccugguggaucugcccaucggcaucaacaucacccgguuucagacacugcuggcccugcacagaagcuaccugacaccuggcgauagcagcagcggauggacagcuggugccgccgcuuacuaugugggcuaccugcagccuagaaccuuccugcugaaguacaacgagaacggcaccaucaccgacgccguggauugugcucuggauccucugagcgagacaaagugcacccugaaguccuucaccguggaaaagggcaucuaccagaccagcaacuuccgggugcagcccaccgaauccaucgugcgguuccccaauaucaccaaucugugccccuucggcgagguguucaaugccaccagauucgccucuguguacgccuggaaccggaagcggaucagcaauugcguggccgacuacuccgugcuguacaacuccgccagcuucagcaccuucaagugcuacggcguguccccuaccaagcugaacgaccugugcuucacaaacguguacgccgacagcuucgugauccggggagaugaagugcggcagauugccccuggacagacaggcaagaucgccgacuacaacuacaagcugcccgacgacuucaccggcugugugauugccuggaacagcaacaaccuggacuccaaagucggcggcaacuacaauuaccuguuccggcuguuccggaaguccaaucugaagcccuucgagcgggacaucagcaccgaaaucuaucaggccggcagcaccccuugcaacggcguggaaggcuucaacugcuacuucccacugcaguccuacggcuuucagcccacaaauggcgugggcuaucagcccuacagagugguggugcugagcuucgaacugcugcaugcuccugccacagugugcggcccuaagaaaagcaccaaucucgugaagaacaaaugcgugaacuucaacuucaacggccugaccggcaccggcgugcugacagagagcaacaagaaguuccugccauuccagcaguuuggccgggauaucgccgauaccacagacgccguuagagauccccagacacuggaaauccuggacaucaccccaugcagcuucggcggagugucugugaucaccccuggcaccaacaccagcaaucagguggcagugcuguaccagggcgugaacuguaccgaagugcccguggccauucacgccgaucagcugacaccuacauggcggguguacuccaccggcagcaauguguuucagaccagagccggcugucugaucggagccgagcacgugaacaauagcuacgagugcgacauccccaucggcgcuggcaucugugccagcuaccagacacagacaaacagccccagacgggcuagaagcguggccagccagagcgugauugccuacacaaugucucugggcgccgagaacagcguggccuacuccaacaacucuaucgcuauccccaccaacuucaccaucagcgugaccaccgagauccugccuguguccaugaccaagaccagcguggacugcaccauguacaucugcggcgauuccaccgagugcuccaaccugcugcugcaguacggcagcuucugcacccagcugaauagagcccugacagggaucgccguggaacaggacaagaacacccaagagguguucgcccaagugaagcaaaucuacaagaccccuccuaucaaggacuucggcggcuucaauuucagccagauucugcccgauccuagcaagcccagcaagcggagcuucaucgaggaccugcuguucaacaaagugacacuggccgacgccggcuucaucaagcaguauggcgauugucugggcgacauugccgccagggaucugauuugcgcccagaaguuuaacggacugacagugcugccuccucugcugaccgaugagaugaucgcccaguacacaucugcccugcuggccggcacaaucacaagcggcuggacauuuggagcuggcgccgcucugcagauccccuuugcuaugcagauggccuaccgguucaacggcaucggagugacccagaaugugcuguacgagaaccagaagcugaucgccaaccaguucaacagcgccaucggcaagauccaggacagccugagcagcacagcaagcgcccugggaaagcugcaggacguggucaaccagaaugcccaggcacugaacacccuggucaagcagcuguccuccaacuucggcgccaucagcucugugcugaacgauauccugagcagacuggacccuccugaggccgaggugcagaucgacagacugaucacaggcagacugcagagccuccagacauacgugacccagcagcugaucagagccgccgagauuagagccucugccaaucuggccgccaccaagaugucugagugugugcugggccagagcaagagaguggacuuuugcggcaagggcuaccaccugaugagcuucccucagucugccccucacggcgugguguuucugcacgugacauaugugcccgcucaagagaagaauuucaccaccgcuccagccaucugccacgacggcaaagcccacuuuccuagagaaggcguguucguguccaacggcacccauugguucgugacacagcggaacuucuacgagccccagaucaucaccaccgacaacaccuucgugucuggcaacugcgacguugugaucggcauugugaacaauaccguguacgacccucugcagcccgagcuggacagcuucaaagaggaacuggacaaguacuuuaagaaccacacaagccccgacguggaccugggcgauaucagcggaaucaaugccagcgucgugaacauccagaaagagaucgaccggcugaacgagguggccaagaaucugaacgagagccugaucgaccugcaagaacuggggaaguacgagcaguacaucaaguggcccugguacaucuggcugggcuuuaucgccggacugauugccaucgugaucgucacaaucaugcuguguugcaugaccagcugcuguagcugccugaagggcuguuguagcuguggcagcugcugcaaguucgacgaggacgauucugagcccgugcugaagggcgugaaacugcacuacaccugaggacuagucccuguucccagagcccacuuuuuuuucuuuuuuugaaauaaaauagccugucuuucagaucuaaaaaaaaaaaaaaaaaaaaaaaaaaaaaaaaaaaaaaaaaaaaaaaaaaaaaaaaaaaaaaaaaaaaaaaaaaaaaaaaaaaaaaaaaaaaaaaaaaaa

SEQ ID NO: 25141 - RNA, 4158 nt, Artificial Sequence
  SARS-CoV-2/Wuhan/WIV05/2019__EPI_ISL_402128 spike protein mRNA gc mod (1-1273)(K986P_V987P_K986P_V987P_H69del_V70del_Y144del_N501Y_A570 D_D614G_P681H_T716I_S982A_D1118H)
aggagagggcgcuuggcuugcaaggacccugagcugcggcauugaagcacacccaacccaacucgacugaagucagccucacugaaccggaucugagaaucuucucucucugggcuugccagggcucuccgaaccuagcuagcauccucuucaauuccaacuagaaagcuuaccauguucguguuucuggugcugcugccccugguguccagccagugugugaaccugaccaccagaacacagcugccuccagccuacaccaacagcuucaccagaggcguguacuaccccgacaagguguucagauccagcgugcugcacucuacccaggaccuguuccugccuuucuucagcaacgugaccugguuccacgccaucuccggcaccaauggcaccaagagauucgacaaccccgugcugcccuucaacgacgggguguacuuugccagcaccgagaaguccaacaucaucagaggcuggaucuucggcaccacacuggacagcaagacccagagccugcugaucgugaacaacgccaccaacguggucaucaaagugugcgaguuccaguucugcaacgaccccuuccugggcgucuaccacaagaacaacaagagcuggauggaaagcgaguuccggguguacagcagcgccaacaacugcaccuucgaguacgugucccagccuuuccugauggaccuggaaggcaagcagggcaacuucaagaaccugcgcgaguucguguucaagaacaucgacggcuacuucaaaaucuacagcaagcacaccccuaucaaccucgugcgggaucugccucagggcuucucugcucuggaaccccugguggaucugcccaucggcaucaacaucacccgguuucagacacugcuggcccugcacagaagcuaccugacaccuggcgauagcagcagcggauggacagcuggugccgccgcuuacuaugugggcuaccugcagccuagaaccuuccugcugaaguacaacgagaacggcaccaucaccgacgccguggauugugcucuggauccucugagcgagacaaagugcacccugaaguccuucaccguggaaaagggcaucuaccagaccagcaacuuccgggugcagcccaccgaauccaucgugcgguuccccaauaucaccaaucugugccccuucggcgagguguucaaugccaccagauucgccucuguguacgccuggaaccggaagcggaucagcaauugcguggccgacuacuccgugcuguacaacuccgccagcuucagcaccuucaagugcuacggcguguccccuaccaagcugaacgaccugugcuucacaaacguguacgccgacagcuucgugauccggggagaugaagugcggcagauugccccuggacagacaggcaagaucgccgacuacaacuacaagcugcccgacgacuucaccggcugugugauugccuggaacagcaacaaccuggacuccaaagucggcggcaacuacaauuaccuguaccggcuguuccggaaguccaaucugaagcccuucgagcgggacaucagcaccgaaaucuaucaggccggcagcaccccuugcaacggcguggaaggcuucaacugcuacuucccacugcaguccuacggcuuucagcccacauacggcgugggcuaucagcccuacagagugguggugcugagcuucgaacugcugcaugcuccugccacagugugcggcccuaagaaaagcaccaaucucgugaagaacaaaugcgugaacuucaacuucaacggccugaccggcaccggcgugcugacagagagcaacaagaaguuccugccauuccagcaguuuggccgggauaucgacgauaccacagacgccguuagagauccccagacacuggaaauccuggacaucaccccaugcagcuucggcggagugucugugaucaccccuggcaccaacaccagcaaucagguggcagugcuguaccagggcgugaacuguaccgaagugcccguggccauucacgccgaucagcugacaccuacauggcggguguacuccaccggcagcaauguguuucagaccagagccggcugucugaucggagccgagcacgugaacaauagcuacgagugcgacauccccaucggcgcuggcaucugugccagcuaccagacacagacaaacagccacagacgggcuagaagcguggccagccagagcaucauugccuacacaaugucucugggcgccgagaacagcguggccuacuccaacaacucuaucgcuauccccaucaacuucaccaucagcgugaccaccgagauccugccuguguccaugaccaagaccagcguggacugcaccauguacaucugcggcgauuccaccgagugcuccaaccugcugcugcaguacggcagcuucugcacccagcugaauagagcccugacagggaucgccguggaacaggacaagaacacccaagagguguucgcccaagugaagcaaaucuacaagaccccuccuaucaaggacuucggcggcuucaauuucagccagauucugcccgauccuagcaagcccagcaagcggagcuucaucgaggaccugcuguucaacaaagugacacuggccgacgccggcuucaucaagcaguauggcgauugucugggcgacauugccgccagggaucugauuugcgcccagaaguuuaacggacugacagugcugccuccucugcugaccgaugagaugaucgcccaguacacaucugcccugcuggccggcacaaucacaagcggcuggacauuuggagcuggcgccgcucugcagauccccuuugcuaugcagauggccuaccgguucaacggcaucggagugacccagaaugugcuguacgagaaccagaagcugaucgccaaccaguucaacagcgccaucggcaagauccaggacagccugagcagcacagcaagcgcccugggaaagcugcaggacguggucaaccagaaugcccaggcacugaacacccuggucaagcagcuguccuccaacuucggcgccaucagcucugugcugaacgauauccuggccagacuggacccuccugaggccgaggugcagaucgacagacugaucacaggcagacugcagagccuccagacauacgugacccagcagcugaucagagccgccgagauuagagccucugccaaucuggccgccaccaagaugucugagugugugcugggccagagcaagagaguggacuuuugcggcaagggcuaccaccugaugagcuucccucagucugccccucacggcgugguguuucugcacgugacauaugugcccgcucaagagaagaauuucaccaccgcuccagccaucugccacgacggcaaagcccacuuuccuagagaaggcguguucguguccaacggcacccauugguucgugacacagcggaacuucuacgagccccagaucaucaccacccacaacaccuucgugucuggcaacugcgacguugugaucggcauugugaacaauaccguguacgacccucugcagcccgagcuggacagcuucaaagaggaacuggacaaguacuuuaagaaccacacaagccccgacguggaccugggcgauaucagcggaaucaaugccagcgucgugaacauccagaaagagaucgaccggcugaacgagguggccaagaaucugaacgagagccugaucgaccugcaagaacuggggaaguacgagcaguacaucaaguggcccugguacaucuggcugggcuuuaucgccggacugauugccaucgugauggucacaaucaugcuguguugcaugaccagcugcuguagcugccugaagggcuguuguagcuguggcagcugcugcaaguucgacgaggacgauucugagcccgugcugaagggcgugaaacugcacuacaccugaggacuagucccuguucccagagcccacuuuuuuuucuuuuuuugaaauaaaauagccugucuuucagaucuaaaaaaaaaaaaaaaaaaaaaaaaaaaaaaaaaaaaaaaaaaaaaaaaaaaaaaaaaaaaaaaaaaaaaaaaaaaaaaaaaaaaaaaaaaaaaaaaaaaa

SEQ ID NO: 25142 - RNA, 4167 nt, Artificial Sequence
  SARS-CoV-2/Wuhan/WIV05/2019__EPI_ISL_402128 spike protein mRNA gc mod (1-1273)(K986P_V987P_K986P_V987P_K417N_E484K_N501Y_D614G)
aggagagggcgcuuggcuugcaaggacccugagcugcggcauugaagcacacccaacccaacucgacugaagucagccucacugaaccggaucugagaaucuucucucucugggcuugccagggcucuccgaaccuagcuagcauccucuucaauuccaacuagaaagcuuaccauguucguguuucuggugcugcugccccugguguccagccagugugugaaccugaccaccagaacacagcugccuccagccuacaccaacagcuucaccagaggcguguacuaccccgacaagguguucagauccagcgugcugcacucuacccaggaccuguuccugccuuucuucagcaacgugaccugguuccacgccauccacguguccggcaccaauggcaccaagagauucgacaaccccgugcugcccuucaacgacgggguguacuuugccagcaccgagaaguccaacaucaucagaggcuggaucuucggcaccacacuggacagcaagacccagagccugcugaucgugaacaacgccaccaacguggucaucaaagugugcgaguuccaguucugcaacgaccccuuccugggcgucuacuaccacaagaacaacaagagcuggauggaaagcgaguuccggguguacagcagcgccaacaacugcaccuucgaguacgugucccagccuuuccugauggaccuggaaggcaagcagggcaacuucaagaaccugcgcgaguucguguucaagaacaucgacggcuacuucaaaaucuacagcaagcacaccccuaucaaccucgugcgggaucugccucagggcuucucugcucuggaaccccugguggaucugcccaucggcaucaacaucacccgguuucagacacugcuggcccugcacagaagcuaccugacaccuggcgauagcagcagcggauggacagcuggugccgccgcuuacuaugugggcuaccugcagccuagaaccuuccugcugaaguacaacgagaacggcaccaucaccgacgccguggauugugcucuggauccucugagcgagacaaagugcacccugaaguccuucaccguggaaaagggcaucuaccagaccagcaacuuccgggugcagcccaccgaauccaucgugcgguuccccaauaucaccaaucugugccccuucggcgagguguucaaugccaccagauucgccucuguguacgccuggaaccggaagcggaucagcaauugcguggccgacuacuccgugcuguacaacuccgccagcuucagcaccuucaagugcuacggcguguccccuaccaagcugaacgaccugugcuucacaaacguguacgccgacagcuucgugauccggggagaugaagugcggcagauugccccuggacagacaggcaacaucgccgacuacaacuacaagcugcccgacgacuucaccggcugugugauugccuggaacagcaacaaccuggacuccaaagucggcggcaacuacaauuaccuguaccggcuguuccggaaguccaaucugaagcccuucgagcgggacaucagcaccgaaaucuaucaggccggcagcaccccuugcaacggcgugaagggcuucaacugcuacuucccacugcaguccuacggcuuucagcccacauacggcgugggcuaucagcccuacagagugguggugcugagcuucgaacugcugcaugcuccugccacagugugcggcccuaagaaaagcaccaaucucgugaagaacaaaugcgugaacuucaacuucaacggccugaccggcaccggcgugcugacagagagcaacaagaaguuccugccauuccagcaguuuggccgggauaucgccgauaccacagacgccguuagagauccccagacacuggaaauccuggacaucaccccaugcagcuucggcggagugucugugaucaccccuggcaccaacaccagcaaucagguggcagugcuguaccagggcgugaacuguaccgaagugcccguggccauucacgccgaucagcugacaccuacauggcggguguacuccaccggcagcaauguguuucagaccagagccggcugucugaucggagccgagcacgugaacaauagcuacgagugcgacauccccaucggcgcuggcaucugugccagcuaccagacacagacaaacagccccagacgggcuagaagcguggccagccagagcaucauugccuacacaaugucucugggcgccgagaacagcguggccuacuccaacaacucuaucgcuauccccaccaacuucaccaucagcgugaccaccgagauccugccuguguccaugaccaagaccagcguggacugcaccauguacaucugcggcgauuccaccgagugcuccaaccugcugcugcaguacggcagcuucugcacccagcugaauagagcccugacagggaucgccguggaacaggacaagaacacccaagagguguucgcccaagugaagcaaaucuacaagaccccuccuaucaaggacuucggcggcuucaauuucagccagauucugcccgauccuagcaagcccagcaagcggagcuucaucgaggaccugcuguucaacaaagugacacuggccgacgccggcuucaucaagcaguauggcgauugucugggcgacauugccgccagggaucugauuugcgcccagaaguuuaacggacugacagugcugccuccucugcugaccgaugagaugaucgcccaguacacaucugcccugcuggccggcacaaucacaagcggcuggacauuuggagcuggcgccgcucugcagauccccuuugcuaugcagauggccuaccgguucaacggcaucggagugacccagaaugugcuguacgagaaccagaagcugaucgccaaccaguucaacagcgccaucggcaagauccaggacagccugagcagcacagcaagcgcccugggaaagcugcaggacguggucaaccagaaugcccaggcacugaacacccuggucaagcagcuguccuccaacuucggcgccaucagcucugugcugaacgauauccugagcagacuggacccuccugaggccgaggugcagaucgacagacugaucacaggcagacugcagagccuccagacauacgugacccagcagcugaucagagccgccgagauuagagccucugccaaucuggccgccaccaagaugucugagugugugcugggccagagcaagagaguggacuuuugcggcaagggcuaccaccugaugagcuucccucagucugccccucacggcgugguguuucugcacgugacauaugugcccgcucaagagaagaauuucaccaccgcuccagccaucugccacgacggcaaagcccacuuuccuagagaaggcguguucguguccaacggcacccauugguucgugacacagcggaacuucuacgagccccagaucaucaccaccgacaacaccuucgugucuggcaacugcgacguugugaucggcauugugaacaauaccguguacgacccucugcagcccgagcuggacagcuucaaagaggaacuggacaaguacuuuaagaaccacacaagccccgacguggaccugggcgauaucagcggaaucaaugccagcgucgugaacauccagaaagagaucgaccggcugaacgagguggccaagaaucugaacgagagccugaucgaccugcaagaacuggggaaguacgagcaguacaucaaguggcccugguacaucuggcugggcuuuaucgccggacugauugccaucgugauggucacaaucaugcuguguugcaugaccagcugcuguagcugccugaagggcuguuguagcuguggcagcugcugcaaguucgacgaggacgauucugagcccgugcugaagggcgugaaacugcacuacaccugaggacuagucccuguucccagagcccacuuuuuuuucuuuuuuugaaauaaaauagccugucuuucagaucuaaaaaaaaaaaaaaaaaaaaaaaaaaaaaaaaaaaaaaaaaaaaaaaaaaaaaaaaaaaaaaaaaaaaaaaaaaaaaaaaaaaaaaaaaaaaaaaaaaaa

SEQ ID NO: 25143 - RNA, 4158 nt, Artificial Sequence
  SARS-CoV-2/Wuhan/WIV05/2019__EPI_ISL_402128 spike protein mRNA gc mod (1-1273)(K986P_V987P_K986P_V987P_L18F_D80A_D215G_L242del_A243del_ L244del_R246I_K417N_E484K_N501Y_D614G_A701V)
aggagagggcgcuuggcuugcaaggacccugagcugcggcauugaagcacacccaacccaacucgacugaagucagccucacugaaccggaucugagaaucuucucucucugggcuugccagggcucuccgaaccuagcuagcauccucuucaauuccaacuagaaagcuuaccauguucguguuucuggugcugcugccccugguguccagccagugugugaacuucaccaccagaacacagcugccuccagccuacaccaacagcuucaccagaggcguguacuaccccgacaagguguucagauccagcgugcugcacucuacccaggaccuguuccugccuuucuucagcaacgugaccugguuccacgccauccacguguccggcaccaauggcaccaagagauucgccaaccccgugcugcccuucaacgacgggguguacuuugccagcaccgagaaguccaacaucaucagaggcuggaucuucggcaccacacuggacagcaagacccagagccugcugaucgugaacaacgccaccaacguggucaucaaagugugcgaguuccaguucugcaacgaccccuuccugggcgucuacuaccacaagaacaacaagagcuggauggaaagcgaguuccggguguacagcagcgccaacaacugcaccuucgaguacgugucccagccuuuccugauggaccuggaaggcaagcagggcaacuucaagaaccugcgcgaguucguguucaagaacaucgacggcuacuucaaaaucuacagcaagcacaccccuaucaaccucgugcggggccugccucagggcuucucugcucuggaaccccugguggaucugcccaucggcaucaacaucacccgguuucagacacugcacaucagcuaccugacaccuggcgauagcagcagcggauggacagcuggugccgccgcuuacuaugugggcuaccugcagccuagaaccuuccugcugaaguacaacgagaacggcaccaucaccgacgccguggauugugcucuggauccucugagcgagacaaagugcacccugaaguccuucaccguggaaaagggcaucuaccagaccagcaacuuccgggugcagcccaccgaauccaucgugcgguuccccaauaucaccaaucugugccccuucggcgagguguucaaugccaccagauucgccucuguguacgccuggaaccggaagcggaucagcaauugcguggccgacuacuccgugcuguacaacuccgccagcuucagcaccuucaagugcuacggcguguccccuaccaagcugaacgaccugugcuucacaaacguguacgccgacagcuucgugauccggggagaugaagugcggcagauugccccuggacagacaggcaacaucgccgacuacaacuacaagcugcccgacgacuucaccggcugugugauugccuggaacagcaacaaccuggacuccaaagucggcggcaacuacaauuaccuguaccggcuguuccggaaguccaaucugaagcccuucgagcgggacaucagcaccgaaaucuaucaggccggcagcaccccuugcaacggcgugaagggcuucaacugcuacuucccacugcaguccuacggcuuucagcccacauacggcgugggcuaucagcccuacagagugguggugcugagcuucgaacugcugcaugcuccugccacagugugcggcccuaagaaaagcaccaaucucgugaagaacaaaugcgugaacuucaacuucaacggccugaccggcaccggcgugcugacagagagcaacaagaaguuccugccauuccagcaguuuggccgggauaucgccgauaccacagacgccguuagagauccccagacacuggaaauccuggacaucaccccaugcagcuucggcggagugucugugaucaccccuggcaccaacaccagcaaucagguggcagugcuguaccagggcgugaacuguaccgaagugcccguggccauucacgccgaucagcugacaccuacauggcggguguacuccaccggcagcaauguguuucagaccagagccggcugucugaucggagccgagcacgugaacaauagcuacgagugcgacauccccaucggcgcuggcaucugugccagcuaccagacacagacaaacagccccagacgggcuagaagcguggccagccagagcaucauugccuacacaaugucucugggcguggagaacagcguggccuacuccaacaacucuaucgcuauccccaccaacuucaccaucagcgugaccaccgagauccugccuguguccaugaccaagaccagcguggacugcaccauguacaucugcggcgauuccaccgagugcuccaaccugcugcugcaguacggcagcuucugcacccagcugaauagagcccugacagggaucgccguggaacaggacaagaacacccaagagguguucgcccaagugaagcaaaucuacaagaccccuccuaucaaggacuucggcggcuucaauuucagccagauucugcccgauccuagcaagcccagcaagcggagcuucaucgaggaccugcuguucaacaaagugacacuggccgacgccggcuucaucaagcaguauggcgauugucugggcgacauugccgccagggaucugauuugcgcccagaaguuuaacggacugacagugcugccuccucugcugaccgaugagaugaucgcccaguacacaucugcccugcuggccggcacaaucacaagcggcuggacauuuggagcuggcgccgcucugcagauccccuuugcuaugcagauggccuaccgguucaacggcaucggagugacccagaaugugcuguacgagaaccagaagcugaucgccaaccaguucaacagcgccaucggcaagauccaggacagccugagcagcacagcaagcgcccugggaaagcugcaggacguggucaaccagaaugcccaggcacugaacacccuggucaagcagcuguccuccaacuucggcgccaucagcucugugcugaacgauauccugagcagacuggacccuccugaggccgaggugcagaucgacagacugaucacaggcagacugcagagccuccagacauacgugacccagcagcugaucagagccgccgagauuagagccucugccaaucuggccgccaccaagaugucugagugugugcugggccagagcaagagaguggacuuuugcggcaagggcuaccaccugaugagcuucccucagucugccccucacggcgugguguuucugcacgugacauaugugcccgcucaagagaagaauuucaccaccgcuccagccaucugccacgacggcaaagcccacuuuccuagagaaggcguguucguguccaacggcacccauugguucgugacacagcggaacuucuacgagccccagaucaucaccaccgacaacaccuucgugucuggcaacugcgacguugugaucggcauugugaacaauaccguguacgacccucugcagcccgagcuggacagcuucaaagaggaacuggacaaguacuuuaagaaccacacaagccccgacguggaccugggcgauaucagcggaaucaaugccagcgucgugaacauccagaaagagaucgaccggcugaacgagguggccaagaaucugaacgagagccugaucgaccugcaagaacuggggaaguacgagcaguacaucaaguggcccugguacaucuggcugggcuuuaucgccggacugauugccaucgugauggucacaaucaugcuguguugcaugaccagcugcuguagcugccugaagggcuguuguagcuguggcagcugcugcaaguucgacgaggacgauucugagcccgugcugaagggcgugaaacugcacuacaccugaggacuagucccuguucccagagcccacuuuuuuuucuuuuuuugaaauaaaauagccugucuuucagaucuaaaaaaaaaaaaaaaaaaaaaaaaaaaaaaaaaaaaaaaaaaaaaaaaaaaaaaaaaaaaaaaaaaaaaaaaaaaaaaaaaaaaaaaaaaaaaaaaaaaa

SEQ ID NO: 25144 - RNA, 4167 nt, Artificial Sequence
  SARS-CoV-2/Wuhan/WIV05/2019__EPI_ISL_402128 spike protein mRNA gc mod (1-1273)(K986P_V987P_K986P_V987P_E484K_D614G)
aggagagggcgcuuggcuugcaaggacccugagcugcggcauugaagcacacccaacccaacucgacugaagucagccucacugaaccggaucugagaaucuucucucucugggcuugccagggcucuccgaaccuagcuagcauccucuucaauuccaacuagaaagcuuaccauguucguguuucuggugcugcugccccugguguccagccagugugugaaccugaccaccagaacacagcugccuccagccuacaccaacagcuucaccagaggcguguacuaccccgacaagguguucagauccagcgugcugcacucuacccaggaccuguuccugccuuucuucagcaacgugaccugguuccacgccauccacguguccggcaccaauggcaccaagagauucgacaaccccgugcugcccuucaacgacgggguguacuuugccagcaccgagaaguccaacaucaucagaggcuggaucuucggcaccacacuggacagcaagacccagagccugcugaucgugaacaacgccaccaacguggucaucaaagugugcgaguuccaguucugcaacgaccccuuccugggcgucuacuaccacaagaacaacaagagcuggauggaaagcgaguuccggguguacagcagcgccaacaacugcaccuucgaguacgugucccagccuuuccugauggaccuggaaggcaagcagggcaacuucaagaaccugcgcgaguucguguucaagaacaucgacggcuacuucaaaaucuacagcaagcacaccccuaucaaccucgugcgggaucugccucagggcuucucugcucuggaaccccugguggaucugcccaucggcaucaacaucacccgguuucagacacugcuggcccugcacagaagcuaccugacaccuggcgauagcagcagcggauggacagcuggugccgccgcuuacuaugugggcuaccugcagccuagaaccuuccugcugaaguacaacgagaacggcaccaucaccgacgccguggauugugcucuggauccucugagcgagacaaagugcacccugaaguccuucaccguggaaaagggcaucuaccagaccagcaacuuccgggugcagcccaccgaauccaucgugcgguuccccaauaucaccaaucugugccccuucggcgagguguucaaugccaccagauucgccucuguguacgccuggaaccggaagcggaucagcaauugcguggccgacuacuccgugcuguacaacuccgccagcuucagcaccuucaagugcuacggcguguccccuaccaagcugaacgaccugugcuucacaaacguguacgccgacagcuucgugauccggggagaugaagugcggcagauugccccuggacagacaggcaagaucgccgacuacaacuacaagcugcccgacgacuucaccggcugugugauugccuggaacagcaacaaccuggacuccaaagucggcggcaacuacaauuaccuguaccggcuguuccggaaguccaaucugaagcccuucgagcgggacaucagcaccgaaaucuaucaggccggcagcaccccuugcaacggcgugaagggcuucaacugcuacuucccacugcaguccuacggcuuucagcccacaaauggcgugggcuaucagcccuacagagugguggugcugagcuucgaacugcugcaugcuccugccacagugugcggcccuaagaaaagcaccaaucucgugaagaacaaaugcgugaacuucaacuucaacggccugaccggcaccggcgugcugacagagagcaacaagaaguuccugccauuccagcaguuuggccgggauaucgccgauaccacagacgccguuagagauccccagacacuggaaauccuggacaucaccccaugcagcuucggcggagugucugugaucaccccuggcaccaacaccagcaaucagguggcagugcuguaccagggcgugaacuguaccgaagugcccguggccauucacgccgaucagcugacaccuacauggcggguguacuccaccggcagcaauguguuucagaccagagccggcugucugaucggagccgagcacgugaacaauagcuacgagugcgacauccccaucggcgcuggcaucugugccagcuaccagacacagacaaacagccccagacgggcuagaagcguggccagccagagcaucauugccuacacaaugucucugggcgccgagaacagcguggccuacuccaacaacucuaucgcuauccccaccaacuucaccaucagcgugaccaccgagauccugccuguguccaugaccaagaccagcguggacugcaccauguacaucugcggcgauuccaccgagugcuccaaccugcugcugcaguacggcagcuucugcacccagcugaauagagcccugacagggaucgccguggaacaggacaagaacacccaagagguguucgcccaagugaagcaaaucuacaagaccccuccuaucaaggacuucggcggcuucaauuucagccagauucugcccgauccuagcaagcccagcaagcggagcuucaucgaggaccugcuguucaacaaagugacacuggccgacgccggcuucaucaagcaguauggcgauugucugggcgacauugccgccagggaucugauuugcgcccagaaguuuaacggacugacagugcugccuccucugcugaccgaugagaugaucgcccaguacacaucugcccugcuggccggcacaaucacaagcggcuggacauuuggagcuggcgccgcucugcagauccccuuugcuaugcagauggccuaccgguucaacggcaucggagugacccagaaugugcuguacgagaaccagaagcugaucgccaaccaguucaacagcgccaucggcaagauccaggacagccugagcagcacagcaagcgcccugggaaagcugcaggacguggucaaccagaaugcccaggcacugaacacccuggucaagcagcuguccuccaacuucggcgccaucagcucugugcugaacgauauccugagcagacuggacccuccugaggccgaggugcagaucgacagacugaucacaggcagacugcagagccuccagacauacgugacccagcagcugaucagagccgccgagauuagagccucugccaaucuggccgccaccaagaugucugagugugugcugggccagagcaagagaguggacuuuugcggcaagggcuaccaccugaugagcuucccucagucugccccucacggcgugguguuucugcacgugacauaugugcccgcucaagagaagaauuucaccaccgcuccagccaucugccacgacggcaaagcccacuuuccuagagaaggcguguucguguccaacggcacccauugguucgugacacagcggaacuucuacgagccccagaucaucaccaccgacaacaccuucgugucuggcaacugcgacguugugaucggcauugugaacaauaccguguacgacccucugcagcccgagcuggacagcuucaaagaggaacuggacaaguacuuuaagaaccacacaagccccgacguggaccugggcgauaucagcggaaucaaugccagcgucgugaacauccagaaagagaucgaccggcugaacgagguggccaagaaucugaacgagagccugaucgaccugcaagaacuggggaaguacgagcaguacaucaaguggcccugguacaucuggcugggcuuuaucgccggacugauugccaucgugauggucacaaucaugcuguguugcaugaccagcugcuguagcugccugaagggcuguuguagcuguggcagcugcugcaaguucgacgaggacgauucugagcccgugcugaagggcgugaaacugcacuacaccugaggacuagucccuguucccagagcccacuuuuuuuucuuuuuuugaaauaaaauagccugucuuucagaucuaaaaaaaaaaaaaaaaaaaaaaaaaaaaaaaaaaaaaaaaaaaaaaaaaaaaaaaaaaaaaaaaaaaaaaaaaaaaaaaaaaaaaaaaaaaaaaaaaaaa

SEQ ID NO: 25145 - RNA, 4167 nt, Artificial Sequence
  SARS-CoV-2/Wuhan/WIV05/2019__EPI_ISL_402128 spike protein mRNA gc mod (1-1273)(K986P_V987P_K986P_V987P_L18F_T20N_P26S_D138Y_R190S_K417T _E484K_N501Y_D614G_H655Y_T1027I)
aggagagggcgcuuggcuugcaaggacccugagcugcggcauugaagcacacccaacccaacucgacugaagucagccucacugaaccggaucugagaaucuucucucucugggcuugccagggcucuccgaaccuagcuagcauccucuucaauuccaacuagaaagcuuaccauguucguguuucuggugcugcugccccugguguccagccagugugugaacuucaccaacagaacacagcugccuagcgccuacaccaacagcuucaccagaggcguguacuaccccgacaagguguucagauccagcgugcugcacucuacccaggaccuguuccugccuuucuucagcaacgugaccugguuccacgccauccacguguccggcaccaauggcaccaagagauucgacaaccccgugcugcccuucaacgacgggguguacuuugccagcaccgagaaguccaacaucaucagaggcuggaucuucggcaccacacuggacagcaagacccagagccugcugaucgugaacaacgccaccaacguggucaucaaagugugcgaguuccaguucugcaacuaccccuuccugggcgucuacuaccacaagaacaacaagagcuggauggaaagcgaguuccggguguacagcagcgccaacaacugcaccuucgaguacgugucccagccuuuccugauggaccuggaaggcaagcagggcaacuucaagaaccugagcgaguucguguucaagaacaucgacggcuacuucaaaaucuacagcaagcacaccccuaucaaccucgugcgggaucugccucagggcuucucugcucuggaaccccugguggaucugcccaucggcaucaacaucacccgguuucagacacugcuggcccugcacagaagcuaccugacaccuggcgauagcagcagcggauggacagcuggugccgccgcuuacuaugugggcuaccugcagccuagaaccuuccugcugaaguacaacgagaacggcaccaucaccgacgccguggauugugcucuggauccucugagcgagacaaagugcacccugaaguccuucaccguggaaaagggcaucuaccagaccagcaacuuccgggugcagcccaccgaauccaucgugcgguuccccaauaucaccaaucugugccccuucggcgagguguucaaugccaccagauucgccucuguguacgccuggaaccggaagcggaucagcaauugcguggccgacuacuccgugcuguacaacuccgccagcuucagcaccuucaagugcuacggcguguccccuaccaagcugaacgaccugugcuucacaaacguguacgccgacagcuucgugauccggggagaugaagugcggcagauugccccuggacagacaggcaccaucgccgacuacaacuacaagcugcccgacgacuucaccggcugugugauugccuggaacagcaacaaccuggacuccaaagucggcggcaacuacaauuaccuguaccggcuguuccggaaguccaaucugaagcccuucgagcgggacaucagcaccgaaaucuaucaggccggcagcaccccuugcaacggcgugaagggcuucaacugcuacuucccacugcaguccuacggcuuucagcccacauacggcgugggcuaucagcccuacagagugguggugcugagcuucgaacugcugcaugcuccugccacagugugcggcccuaagaaaagcaccaaucucgugaagaacaaaugcgugaacuucaacuucaacggccugaccggcaccggcgugcugacagagagcaacaagaaguuccugccauuccagcaguuuggccgggauaucgccgauaccacagacgccguuagagauccccagacacuggaaauccuggacaucaccccaugcagcuucggcggagugucugugaucaccccuggcaccaacaccagcaaucagguggcagugcuguaccagggcgugaacuguaccgaagugcccguggccauucacgccgaucagcugacaccuacauggcggguguacuccaccggcagcaauguguuucagaccagagccggcugucugaucggagccgaguacgugaacaauagcuacgagugcgacauccccaucggcgcuggcaucugugccagcuaccagacacagacaaacagccccagacgggcuagaagcguggccagccagagcaucauugccuacacaaugucucugggcgccgagaacagcguggccuacuccaacaacucuaucgcuauccccaccaacuucaccaucagcgugaccaccgagauccugccuguguccaugaccaagaccagcguggacugcaccauguacaucugcggcgauuccaccgagugcuccaaccugcugcugcaguacggcagcuucugcacccagcugaauagagcccugacagggaucgccguggaacaggacaagaacacccaagagguguucgcccaagugaagcaaaucuacaagaccccuccuaucaaggacuucggcggcuucaauuucagccagauucugcccgauccuagcaagcccagcaagcggagcuucaucgaggaccugcuguucaacaaagugacacuggccgacgccggcuucaucaagcaguauggcgauugucugggcgacauugccgccagggaucugauuugcgcccagaaguuuaacggacugacagugcugccuccucugcugaccgaugagaugaucgcccaguacacaucugcccugcuggccggcacaaucacaagcggcuggacauuuggagcuggcgccgcucugcagauccccuuugcuaugcagauggccuaccgguucaacggcaucggagugacccagaaugugcuguacgagaaccagaagcugaucgccaaccaguucaacagcgccaucggcaagauccaggacagccugagcagcacagcaagcgcccugggaaagcugcaggacguggucaaccagaaugcccaggcacugaacacccuggucaagcagcuguccuccaacuucggcgccaucagcucugugcugaacgauauccugagcagacuggacccuccugaggccgaggugcagaucgacagacugaucacaggcagacugcagagccuccagacauacgugacccagcagcugaucagagccgccgagauuagagccucugccaaucuggccgccaucaagaugucugagugugugcugggccagagcaagagaguggacuuuugcggcaagggcuaccaccugaugagcuucccucagucugccccucacggcgugguguuucugcacgugacauaugugcccgcucaagagaagaauuucaccaccgcuccagccaucugccacgacggcaaagcccacuuuccuagagaaggcguguucguguccaacggcacccauugguucgugacacagcggaacuucuacgagccccagaucaucaccaccgacaacaccuucgugucuggcaacugcgacguugugaucggcauugugaacaauaccguguacgacccucugcagcccgagcuggacagcuucaaagaggaacuggacaaguacuuuaagaaccacacaagccccgacguggaccugggcgauaucagcggaaucaaugccagcgucgugaacauccagaaagagaucgaccggcugaacgagguggccaagaaucugaacgagagccugaucgaccugcaagaacuggggaaguacgagcaguacaucaaguggcccugguacaucuggcugggcuuuaucgccggacugauugccaucgugauggucacaaucaugcuguguugcaugaccagcugcuguagcugccugaagggcuguuguagcuguggcagcugcugcaaguucgacgaggacgauucugagcccgugcugaagggcgugaaacugcacuacaccugaggacuagucccuguucccagagcccacuuuuuuuucuuuuuuugaaauaaaauagccugucuuucagaucuaaaaaaaaaaaaaaaaaaaaaaaaaaaaaaaaaaaaaaaaaaaaaaaaaaaaaaaaaaaaaaaaaaaaaaaaaaaaaaaaaaaaaaaaaaaaaaaaaaaa

SEQ ID NO: 25146 - RNA, 4167 nt, Artificial Sequence
  SARS-CoV-2/Wuhan/WIV05/2019__EPI_ISL_402128 spike protein mRNA gc mod (1-1273)(K986P_V987P_K986P_V987P_S13I_W152C_L452R_D614G)
aggagagggcgcuuggcuugcaaggacccugagcugcggcauugaagcacacccaacccaacucgacugaagucagccucacugaaccggaucugagaaucuucucucucugggcuugccagggcucuccgaaccuagcuagcauccucuucaauuccaacuagaaagcuuaccauguucguguuucuggugcugcugccccugguguccauccagugugugaaccugaccaccagaacacagcugccuccagccuacaccaacagcuucaccagaggcguguacuaccccgacaagguguucagauccagcgugcugcacucuacccaggaccuguuccugccuuucuucagcaacgugaccugguuccacgccauccacguguccggcaccaauggcaccaagagauucgacaaccccgugcugcccuucaacgacgggguguacuuugccagcaccgagaaguccaacaucaucagaggcuggaucuucggcaccacacuggacagcaagacccagagccugcugaucgugaacaacgccaccaacguggucaucaaagugugcgaguuccaguucugcaacgaccccuuccugggcgucuacuaccacaagaacaacaagagcugcauggaaagcgaguuccggguguacagcagcgccaacaacugcaccuucgaguacgugucccagccuuuccugauggaccuggaaggcaagcagggcaacuucaagaaccugcgcgaguucguguucaagaacaucgacggcuacuucaaaaucuacagcaagcacaccccuaucaaccucgugcgggaucugccucagggcuucucugcucuggaaccccugguggaucugcccaucggcaucaacaucacccgguuucagacacugcuggcccugcacagaagcuaccugacaccuggcgauagcagcagcggauggacagcuggugccgccgcuuacuaugugggcuaccugcagccuagaaccuuccugcugaaguacaacgagaacggcaccaucaccgacgccguggauugugcucuggauccucugagcgagacaaagugcacccugaaguccuucaccguggaaaagggcaucuaccagaccagcaacuuccgggugcagcccaccgaauccaucgugcgguuccccaauaucaccaaucugugccccuucggcgagguguucaaugccaccagauucgccucuguguacgccuggaaccggaagcggaucagcaauugcguggccgacuacuccgugcuguacaacuccgccagcuucagcaccuucaagugcuacggcguguccccuaccaagcugaacgaccugugcuucacaaacguguacgccgacagcuucgugauccggggagaugaagugcggcagauugccccuggacagacaggcaagaucgccgacuacaacuacaagcugcccgacgacuucaccggcugugugauugccuggaacagcaacaaccuggacuccaaagucggcggcaacuacaauuaccgcuaccggcuguuccggaaguccaaucugaagcccuucgagcgggacaucagcaccgaaaucuaucaggccggcagcaccccuugcaacggcguggaaggcuucaacugcuacuucccacugcaguccuacggcuuucagcccacaaauggcgugggcuaucagcccuacagagugguggugcugagcuucgaacugcugcaugcuccugccacagugugcggcccuaagaaaagcaccaaucucgugaagaacaaaugcgugaacuucaacuucaacggccugaccggcaccggcgugcugacagagagcaacaagaaguuccugccauuccagcaguuuggccgggauaucgccgauaccacagacgccguuagagauccccagacacuggaaauccuggacaucaccccaugcagcuucggcggagugucugugaucaccccuggcaccaacaccagcaaucagguggcagugcuguaccagggcgugaacuguaccgaagugcccguggccauucacgccgaucagcugacaccuacauggcggguguacuccaccggcagcaauguguuucagaccagagccggcugucugaucggagccgagcacgugaacaauagcuacgagugcgacauccccaucggcgcuggcaucugugccagcuaccagacacagacaaacagccccagacgggcuagaagcguggccagccagagcaucauugccuacacaaugucucugggcgccgagaacagcguggccuacuccaacaacucuaucgcuauccccaccaacuucaccaucagcgugaccaccgagauccugccuguguccaugaccaagaccagcguggacugcaccauguacaucugcggcgauuccaccgagugcuccaaccugcugcugcaguacggcagcuucugcacccagcugaauagagcccugacagggaucgccguggaacaggacaagaacacccaagagguguucgcccaagugaagcaaaucuacaagaccccuccuaucaaggacuucggcggcuucaauuucagccagauucugcccgauccuagcaagcccagcaagcggagcuucaucgaggaccugcuguucaacaaagugacacuggccgacgccggcuucaucaagcaguauggcgauugucugggcgacauugccgccagggaucugauuugcgcccagaaguuuaacggacugacagugcugccuccucugcugaccgaugagaugaucgcccaguacacaucugcccugcuggccggcacaaucacaagcggcuggacauuuggagcuggcgccgcucugcagauccccuuugcuaugcagauggccuaccgguucaacggcaucggagugacccagaaugugcuguacgagaaccagaagcugaucgccaaccaguucaacagcgccaucggcaagauccaggacagccugagcagcacagcaagcgcccugggaaagcugcaggacguggucaaccagaaugcccaggcacugaacacccuggucaagcagcuguccuccaacuucggcgccaucagcucugugcugaacgauauccugagcagacuggacccuccugaggccgaggugcagaucgacagacugaucacaggcagacugcagagccuccagacauacgugacccagcagcugaucagagccgccgagauuagagccucugccaaucuggccgccaccaagaugucugagugugugcugggccagagcaagagaguggacuuuugcggcaagggcuaccaccugaugagcuucccucagucugccccucacggcgugguguuucugcacgugacauaugugcccgcucaagagaagaauuucaccaccgcuccagccaucugccacgacggcaaagcccacuuuccuagagaaggcguguucguguccaacggcacccauugguucgugacacagcggaacuucuacgagccccagaucaucaccaccgacaacaccuucgugucuggcaacugcgacguugugaucggcauugugaacaauaccguguacgacccucugcagcccgagcuggacagcuucaaagaggaacuggacaaguacuuuaagaaccacacaagccccgacguggaccugggcgauaucagcggaaucaaugccagcgucgugaacauccagaaagagaucgaccggcugaacgagguggccaagaaucugaacgagagccugaucgaccugcaagaacuggggaaguacgagcaguacaucaaguggcccugguacaucuggcugggcuuuaucgccggacugauugccaucgugauggucacaaucaugcuguguugcaugaccagcugcuguagcugccugaagggcuguuguagcuguggcagcugcugcaaguucgacgaggacgauucugagcccgugcugaagggcgugaaacugcacuacaccugaggacuagucccuguucccagagcccacuuuuuuuucuuuuuuugaaauaaaauagccugucuuucagaucuaaaaaaaaaaaaaaaaaaaaaaaaaaaaaaaaaaaaaaaaaaaaaaaaaaaaaaaaaaaaaaaaaaaaaaaaaaaaaaaaaaaaaaaaaaaaaaaaaaaa

SEQ ID NO: 25147 - RNA, 4167 nt, Artificial Sequence
  SARS-CoV-2/Wuhan/WIV05/2019__EPI_ISL_402128 spike protein mRNA gc mod (1-1273)(K986P_V987P)
aggagagggcgcuuggcuugcaaggacccugagcugcggcauugaagcacacccaacccaacucgacugaagucagccucacugaaccggaucugagaaucuucucucucugggcuugccagggcucuccgaaccuagcuagcauccucuucaauuccaacuagaaagcuuaccauguucguguuccuggugcugcugccucugguguccagccagugugugaaccugaccaccagaacacagcugccuccagccuacaccaacagcuuuaccagaggcguguacuaccccgacaagguguucagauccagcgugcugcacucuacccaggaccuguuccugccuuucuucagcaacgugaccugguuccacgccauccacguguccggcaccaauggcaccaagagauucgacaaccccgugcugcccuucaacgacgggguguacuuugccagcaccgagaaguccaacaucaucagaggcuggaucuucggcaccacacuggacagcaagacccagagccugcugaucgugaacaacgccaccaacguggucaucaaagugugcgaguuccaguucugcaacgaccccuuccugggcgucuacuaccacaagaacaacaagagcuggauggaaagcgaguuccggguguacagcagcgccaacaacugcaccuucgaguacgugucccagccuuuccugauggaccuggaaggcaagcagggcaacuucaagaaccugcgcgaguucguguuuaagaacaucgacggcuacuucaagaucuacagcaagcacaccccuaucaaccucgugcgggaucugccucagggcuucucugcucuggaaccccugguggaucugcccaucggcaucaacaucacccgguuucagacacugcuggcccugcacagaagcuaccugacaccuggcgauagcagcagcggauggacagcuggugccgccgcuuacuaugugggcuaccugcagccuagaaccuuccugcugaaguacaacgagaacggcaccaucaccgacgccguggauugugcucuggauccucugagcgagacaaagugcacccugaaguccuucaccguggaaaagggcaucuaccagaccagcaacuuccgggugcagcccaccgaauccaucgugcgguuccccaauaucaccaaucugugccccuucggcgagguguucaaugccaccagauucgccucuguguacgccuggaaccggaagcggaucagcaauugcguggccgacuacuccgugcuguacaacuccgccagcuucagcaccuucaagugcuacggcguguccccuaccaagcugaacgaccugugcuucacaaacguguacgccgacagcuucgugauccggggagaugaagugcggcagauugccccuggacagacaggcaagaucgccgacuacaacuacaagcugcccgacgacuucaccggcugugugauugccuggaacagcaacaaccuggacuccaaagucggcggcaacuacaauuaccuguaccggcuguuccggaaguccaaucugaagcccuucgagcgggacaucuccaccgagaucuaucaggccggcagcaccccuuguaacggcguggaaggcuucaacugcuacuucccacugcaguccuacggcuuucagcccacaaauggcgugggcuaucagcccuacagagugguggugcugagcuucgaacugcugcaugccccugccacagugugcggcccuaagaaaagcaccaaucucgugaagaacaaaugcgugaacuucaacuucaacggccugaccggcaccggcgugcugacagagagcaacaagaaguuccugccauuccagcaguuuggccgggauaucgccgauaccacagacgccguuagagauccccagacacuggaaauccuggacaucaccccuugcagcuucggcggagugucugugaucaccccuggcaccaacaccagcaaucagguggcagugcuguaccaggacgugaacuguaccgaagugcccguggccauucacgccgaucagcugacaccuacauggcggguguacuccaccggcagcaauguguuucagaccagagccggcugucugaucggagccgagcacgugaacaauagcuacgagugcgacauccccaucggcgcuggaaucugcgccagcuaccagacacagacaaacagcccucggagagccagaagcguggccagccagagcaucauugccuacacaaugucucugggcgccgagaacagcguggccuacuccaacaacucuaucgcuauccccaccaacuucaccaucagcgugaccacagagauccugccuguguccaugaccaagaccagcguggacugcaccauguacaucugcggcgauuccaccgagugcuccaaccugcugcugcaguacggcagcuucugcacccagcugaauagagcccugacagggaucgccguggaacaggacaagaacacccaagagguguucgcccaagugaagcagaucuacaagaccccuccuaucaaggacuucggcggcuucaauuucagccagauucugcccgauccuagcaagcccagcaagcggagcuucaucgaggaccugcuguucaacaaagugacacuggccgacgccggcuucaucaagcaguauggcgauugucugggcgacauugccgccagggaucugauuugcgcccagaaguuuaacggacugacagugcugccuccucugcugaccgaugagaugaucgcccaguacacaucugcccugcuggccggcacaaucacaagcggcuggacauuuggagcaggcgccgcucugcagauccccuuugcuaugcagauggccuaccgguucaacggcaucggagugacccagaaugugcuguacgagaaccagaagcugaucgccaaccaguucaacagcgccaucggcaagauccaggacagccugagcagcacagcaagcgcccugggaaagcugcaggacguggucaaccagaaugcccaggcacugaacacccuggucaagcagcuguccuccaacuucggcgccaucagcucugugcugaacgauauccugagcagacuggacccuccugaggccgaggugcagaucgacagacugaucacaggcagacugcagagccuccagacauacgugacccagcagcugaucagagccgccgagauuagagccucugccaaucuggccgccaccaagaugucugagugugugcugggccagagcaagagaguggacuuuugcggcaagggcuaccaccugaugagcuucccucagucugccccucacggcgugguguuucugcacgugacauaugugcccgcucaagagaagaauuucaccaccgcuccagccaucugccacgacggcaaagcccacuuuccuagagaaggcguguucguguccaacggcacccauugguucgugacacagcggaacuucuacgagccccagaucaucaccaccgacaacaccuucgugucuggcaacugcgacgucgugaucggcauugugaacaauaccguguacgacccucugcagcccgagcuggacagcuucaaagaggaacuggacaaguacuuuaagaaccacacaagccccgacguggaccugggcgauaucagcggaaucaaugccagcgucgugaacauccagaaagagaucgaccggcugaacgagguggccaagaaucugaacgagagccugaucgaccugcaagaacuggggaaguacgagcaguacaucaaguggcccugguacaucuggcugggcuuuaucgccggacugauugccaucgugauggucacaaucaugcuguguugcaugaccagcugcuguagcugccugaagggcuguuguagcuguggcagcugcugcaaguucgacgaggacgauucugagcccgugcugaagggcgugaaacugcacuacacaugaggacuagucccuguucccagagcccacuuuuuuuucuuuuuuugaaauaaaauagccugucuuucagaucuaaaaaaaaaaaaaaaaaaaaaaaaaaaaaaaaaaaaaaaaaaaaaaaaaaaaaaaaaaaaaaaaaaaaaaaaaaaaaaaaaaaaaaaaaaaaaaaaaaaa

SEQ ID NO: 25148 - RNA, 4167 nt, Artificial Sequence
  SARS-CoV-2/Wuhan/WIV05/2019__EPI_ISL_402128 spike protein mRNA gc mod (1-1273)(K986P_V987P_ D614G)
aggagagggcgcuuggcuugcaaggacccugagcugcggcauugaagcacacccaacccaacucgacugaagucagccucacugaaccggaucugagaaucuucucucucugggcuugccagggcucuccgaaccuagcuagcauccucuucaauuccaacuagaaagcuuaccauguucguguuccuggugcugcugccucugguguccagccagugugugaaccugaccaccagaacacagcugccuccagccuacaccaacagcuuuaccagaggcguguacuaccccgacaagguguucagauccagcgugcugcacucuacccaggaccuguuccugccuuucuucagcaacgugaccugguuccacgccauccacguguccggcaccaauggcaccaagagauucgacaaccccgugcugcccuucaacgacgggguguacuuugccagcaccgagaaguccaacaucaucagaggcuggaucuucggcaccacacuggacagcaagacccagagccugcugaucgugaacaacgccaccaacguggucaucaaagugugcgaguuccaguucugcaacgaccccuuccugggcgucuacuaccacaagaacaacaagagcuggauggaaagcgaguuccggguguacagcagcgccaacaacugcaccuucgaguacgugucccagccuuuccugauggaccuggaaggcaagcagggcaacuucaagaaccugcgcgaguucguguuuaagaacaucgacggcuacuucaagaucuacagcaagcacaccccuaucaaccucgugcgggaucugccucagggcuucucugcucuggaaccccugguggaucugcccaucggcaucaacaucacccgguuucagacacugcuggcccugcacagaagcuaccugacaccuggcgauagcagcagcggauggacagcuggugccgccgcuuacuaugugggcuaccugcagccuagaaccuuccugcugaaguacaacgagaacggcaccaucaccgacgccguggauugugcucuggauccucugagcgagacaaagugcacccugaaguccuucaccguggaaaagggcaucuaccagaccagcaacuuccgggugcagcccaccgaauccaucgugcgguuccccaauaucaccaaucugugccccuucggcgagguguucaaugccaccagauucgccucuguguacgccuggaaccggaagcggaucagcaauugcguggccgacuacuccgugcuguacaacuccgccagcuucagcaccuucaagugcuacggcguguccccuaccaagcugaacgaccugugcuucacaaacguguacgccgacagcuucgugauccggggagaugaagugcggcagauugccccuggacagacaggcaagaucgccgacuacaacuacaagcugcccgacgacuucaccggcugugugauugccuggaacagcaacaaccuggacuccaaagucggcggcaacuacaauuaccuguaccggcuguuccggaaguccaaucugaagcccuucgagcgggacaucuccaccgagaucuaucaggccggcagcaccccuuguaacggcguggaaggcuucaacugcuacuucccacugcaguccuacggcuuucagcccacaaauggcgugggcuaucagcccuacagagugguggugcugagcuucgaacugcugcaugccccugccacagugugcggcccuaagaaaagcaccaaucucgugaagaacaaaugcgugaacuucaacuucaacggccugaccggcaccggcgugcugacagagagcaacaagaaguuccugccauuccagcaguuuggccgggauaucgccgauaccacagacgccguuagagauccccagacacuggaaauccuggacaucaccccuugcagcuucggcggagugucugugaucaccccuggcaccaacaccagcaaucagguggcagugcuguaccagggcgugaacuguaccgaagugcccguggccauucacgccgaucagcugacaccuacauggcggguguacuccaccggcagcaauguguuucagaccagagccggcugucugaucggagccgagcacgugaacaauagcuacgagugcgacauccccaucggcgcuggaaucugcgccagcuaccagacacagacaaacagcccucggagagccagaagcguggccagccagagcaucauugccuacacaaugucucugggcgccgagaacagcguggccuacuccaacaacucuaucgcuauccccaccaacuucaccaucagcgugaccacagagauccugccuguguccaugaccaagaccagcguggacugcaccauguacaucugcggcgauuccaccgagugcuccaaccugcugcugcaguacggcagcuucugcacccagcugaauagagcccugacagggaucgccguggaacaggacaagaacacccaagagguguucgcccaagugaagcagaucuacaagaccccuccuaucaaggacuucggcggcuucaauuucagccagauucugcccgauccuagcaagcccagcaagcggagcuucaucgaggaccugcuguucaacaaagugacacuggccgacgccggcuucaucaagcaguauggcgauugucugggcgacauugccgccagggaucugauuugcgcccagaaguuuaacggacugacagugcugccuccucugcugaccgaugagaugaucgcccaguacacaucugcccugcuggccggcacaaucacaagcggcuggacauuuggagcaggcgccgcucugcagauccccuuugcuaugcagauggccuaccgguucaacggcaucggagugacccagaaugugcuguacgagaaccagaagcugaucgccaaccaguucaacagcgccaucggcaagauccaggacagccugagcagcacagcaagcgcccugggaaagcugcaggacguggucaaccagaaugcccaggcacugaacacccuggucaagcagcuguccuccaacuucggcgccaucagcucugugcugaacgauauccugagcagacuggacccuccugaggccgaggugcagaucgacagacugaucacaggcagacugcagagccuccagacauacgugacccagcagcugaucagagccgccgagauuagagccucugccaaucuggccgccaccaagaugucugagugugugcugggccagagcaagagaguggacuuuugcggcaagggcuaccaccugaugagcuucccucagucugccccucacggcgugguguuucugcacgugacauaugugcccgcucaagagaagaauuucaccaccgcuccagccaucugccacgacggcaaagcccacuuuccuagagaaggcguguucguguccaacggcacccauugguucgugacacagcggaacuucuacgagccccagaucaucaccaccgacaacaccuucgugucuggcaacugcgacgucgugaucggcauugugaacaauaccguguacgacccucugcagcccgagcuggacagcuucaaagaggaacuggacaaguacuuuaagaaccacacaagccccgacguggaccugggcgauaucagcggaaucaaugccagcgucgugaacauccagaaagagaucgaccggcugaacgagguggccaagaaucugaacgagagccugaucgaccugcaagaacuggggaaguacgagcaguacaucaaguggcccugguacaucuggcugggcuuuaucgccggacugauugccaucgugauggucacaaucaugcuguguugcaugaccagcugcuguagcugccugaagggcuguuguagcuguggcagcugcugcaaguucgacgaggacgauucugagcccgugcugaagggcgugaaacugcacuacacaugaggacuagucccuguucccagagcccacuuuuuuuucuuuuuuugaaauaaaauagccugucuuucagaucuaaaaaaaaaaaaaaaaaaaaaaaaaaaaaaaaaaaaaaaaaaaaaaaaaaaaaaaaaaaaaaaaaaaaaaaaaaaaaaaaaaaaaaaaaaaaaaaaaaaa

SEQ ID NO: 25149 - RNA, 4167 nt, Artificial Sequence
  SARS-CoV-2/Wuhan/WIV05/2019__EPI_ISL_402128 spike protein mRNA gc mod (1-1273)(K986P_V987P_A222V_D614G)
aggagagggcgcuuggcuugcaaggacccugagcugcggcauugaagcacacccaacccaacucgacugaagucagccucacugaaccggaucugagaaucuucucucucugggcuugccagggcucuccgaaccuagcuagcauccucuucaauuccaacuagaaagcuuaccauguucguguuccuggugcugcugccucugguguccagccagugugugaaccugaccaccagaacacagcugccuccagccuacaccaacagcuuuaccagaggcguguacuaccccgacaagguguucagauccagcgugcugcacucuacccaggaccuguuccugccuuucuucagcaacgugaccugguuccacgccauccacguguccggcaccaauggcaccaagagauucgacaaccccgugcugcccuucaacgacgggguguacuuugccagcaccgagaaguccaacaucaucagaggcuggaucuucggcaccacacuggacagcaagacccagagccugcugaucgugaacaacgccaccaacguggucaucaaagugugcgaguuccaguucugcaacgaccccuuccugggcgucuacuaccacaagaacaacaagagcuggauggaaagcgaguuccggguguacagcagcgccaacaacugcaccuucgaguacgugucccagccuuuccugauggaccuggaaggcaagcagggcaacuucaagaaccugcgcgaguucguguuuaagaacaucgacggcuacuucaagaucuacagcaagcacaccccuaucaaccucgugcgggaucugccucagggcuucucugugcuggaaccccugguggaucugcccaucggcaucaacaucacccgguuucagacacugcuggcccugcacagaagcuaccugacaccuggcgauagcagcagcggauggacagcuggugccgccgcuuacuaugugggcuaccugcagccuagaaccuuccugcugaaguacaacgagaacggcaccaucaccgacgccguggauugugcucuggauccucugagcgagacaaagugcacccugaaguccuucaccguggaaaagggcaucuaccagaccagcaacuuccgggugcagcccaccgaauccaucgugcgguuccccaauaucaccaaucugugccccuucggcgagguguucaaugccaccagauucgccucuguguacgccuggaaccggaagcggaucagcaauugcguggccgacuacuccgugcuguacaacuccgccagcuucagcaccuucaagugcuacggcguguccccuaccaagcugaacgaccugugcuucacaaacguguacgccgacagcuucgugauccggggagaugaagugcggcagauugccccuggacagacaggcaagaucgccgacuacaacuacaagcugcccgacgacuucaccggcugugugauugccuggaacagcaacaaccuggacuccaaagucggcggcaacuacaauuaccuguaccggcuguuccggaaguccaaucugaagcccuucgagcgggacaucuccaccgagaucuaucaggccggcagcaccccuuguaacggcguggaaggcuucaacugcuacuucccacugcaguccuacggcuuucagcccacaaauggcgugggcuaucagcccuacagagugguggugcugagcuucgaacugcugcaugccccugccacagugugcggcccuaagaaaagcaccaaucucgugaagaacaaaugcgugaacuucaacuucaacggccugaccggcaccggcgugcugacagagagcaacaagaaguuccugccauuccagcaguuuggccgggauaucgccgauaccacagacgccguuagagauccccagacacuggaaauccuggacaucaccccuugcagcuucggcggagugucugugaucaccccuggcaccaacaccagcaaucagguggcagugcuguaccagggcgugaacuguaccgaagugcccguggccauucacgccgaucagcugacaccuacauggcggguguacuccaccggcagcaauguguuucagaccagagccggcugucugaucggagccgagcacgugaacaauagcuacgagugcgacauccccaucggcgcuggaaucugcgccagcuaccagacacagacaaacagcccucggagagccagaagcguggccagccagagcaucauugccuacacaaugucucugggcgccgagaacagcguggccuacuccaacaacucuaucgcuauccccaccaacuucaccaucagcgugaccacagagauccugccuguguccaugaccaagaccagcguggacugcaccauguacaucugcggcgauuccaccgagugcuccaaccugcugcugcaguacggcagcuucugcacccagcugaauagagcccugacagggaucgccguggaacaggacaagaacacccaagagguguucgcccaagugaagcagaucuacaagaccccuccuaucaaggacuucggcggcuucaauuucagccagauucugcccgauccuagcaagcccagcaagcggagcuucaucgaggaccugcuguucaacaaagugacacuggccgacgccggcuucaucaagcaguauggcgauugucugggcgacauugccgccagggaucugauuugcgcccagaaguuuaacggacugacagugcugccuccucugcugaccgaugagaugaucgcccaguacacaucugcccugcuggccggcacaaucacaagcggcuggacauuuggagcaggcgccgcucugcagauccccuuugcuaugcagauggccuaccgguucaacggcaucggagugacccagaaugugcuguacgagaaccagaagcugaucgccaaccaguucaacagcgccaucggcaagauccaggacagccugagcagcacagcaagcgcccugggaaagcugcaggacguggucaaccagaaugcccaggcacugaacacccuggucaagcagcuguccuccaacuucggcgccaucagcucugugcugaacgauauccugagcagacuggacccuccugaggccgaggugcagaucgacagacugaucacaggcagacugcagagccuccagacauacgugacccagcagcugaucagagccgccgagauuagagccucugccaaucuggccgccaccaagaugucugagugugugcugggccagagcaagagaguggacuuuugcggcaagggcuaccaccugaugagcuucccucagucugccccucacggcgugguguuucugcacgugacauaugugcccgcucaagagaagaauuucaccaccgcuccagccaucugccacgacggcaaagcccacuuuccuagagaaggcguguucguguccaacggcacccauugguucgugacacagcggaacuucuacgagccccagaucaucaccaccgacaacaccuucgugucuggcaacugcgacgucgugaucggcauugugaacaauaccguguacgacccucugcagcccgagcuggacagcuucaaagaggaacuggacaaguacuuuaagaaccacacaagccccgacguggaccugggcgauaucagcggaaucaaugccagcgucgugaacauccagaaagagaucgaccggcugaacgagguggccaagaaucugaacgagagccugaucgaccugcaagaacuggggaaguacgagcaguacaucaaguggcccugguacaucuggcugggcuuuaucgccggacugauugccaucgugauggucacaaucaugcuguguugcaugaccagcugcuguagcugccugaagggcuguuguagcuguggcagcugcugcaaguucgacgaggacgauucugagcccgugcugaagggcgugaaacugcacuacacaugaggacuagucccuguucccagagcccacuuuuuuuucuuuuuuugaaauaaaauagccugucuuucagaucuaaaaaaaaaaaaaaaaaaaaaaaaaaaaaaaaaaaaaaaaaaaaaaaaaaaaaaaaaaaaaaaaaaaaaaaaaaaaaaaaaaaaaaaaaaaaaaaaaaaa

SEQ ID NO: 25150 - RNA, 4167 nt, Artificial Sequence
  SARS-CoV-2/Wuhan/WIV05/2019__EPI_ISL_402128 spike protein mRNA gc mod (1-1273)(K986P_V987P_N439K_D614G)
aggagagggcgcuuggcuugcaaggacccugagcugcggcauugaagcacacccaacccaacucgacugaagucagccucacugaaccggaucugagaaucuucucucucugggcuugccagggcucuccgaaccuagcuagcauccucuucaauuccaacuagaaagcuuaccauguucguguuccuggugcugcugccucugguguccagccagugugugaaccugaccaccagaacacagcugccuccagccuacaccaacagcuuuaccagaggcguguacuaccccgacaagguguucagauccagcgugcugcacucuacccaggaccuguuccugccuuucuucagcaacgugaccugguuccacgccauccacguguccggcaccaauggcaccaagagauucgacaaccccgugcugcccuucaacgacgggguguacuuugccagcaccgagaaguccaacaucaucagaggcuggaucuucggcaccacacuggacagcaagacccagagccugcugaucgugaacaacgccaccaacguggucaucaaagugugcgaguuccaguucugcaacgaccccuuccugggcgucuacuaccacaagaacaacaagagcuggauggaaagcgaguuccggguguacagcagcgccaacaacugcaccuucgaguacgugucccagccuuuccugauggaccuggaaggcaagcagggcaacuucaagaaccugcgcgaguucguguuuaagaacaucgacggcuacuucaagaucuacagcaagcacaccccuaucaaccucgugcgggaucugccucagggcuucucugcucuggaaccccugguggaucugcccaucggcaucaacaucacccgguuucagacacugcuggcccugcacagaagcuaccugacaccuggcgauagcagcagcggauggacagcuggugccgccgcuuacuaugugggcuaccugcagccuagaaccuuccugcugaaguacaacgagaacggcaccaucaccgacgccguggauugugcucuggauccucugagcgagacaaagugcacccugaaguccuucaccguggaaaagggcaucuaccagaccagcaacuuccgggugcagcccaccgaauccaucgugcgguuccccaauaucaccaaucugugccccuucggcgagguguucaaugccaccagauucgccucuguguacgccuggaaccggaagcggaucagcaauugcguggccgacuacuccgugcuguacaacuccgccagcuucagcaccuucaagugcuacggcguguccccuaccaagcugaacgaccugugcuucacaaacguguacgccgacagcuucgugauccggggagaugaagugcggcagauugccccuggacagacaggcaagaucgccgacuacaacuacaagcugcccgacgacuucaccggcugugugauugccuggaacagcaagaaccuggacuccaaagucggcggcaacuacaauuaccuguaccggcuguuccggaaguccaaucugaagcccuucgagcgggacaucuccaccgagaucuaucaggccggcagcaccccuuguaacggcguggaaggcuucaacugcuacuucccacugcaguccuacggcuuucagcccacaaauggcgugggcuaucagcccuacagagugguggugcugagcuucgaacugcugcaugccccugccacagugugcggcccuaagaaaagcaccaaucucgugaagaacaaaugcgugaacuucaacuucaacggccugaccggcaccggcgugcugacagagagcaacaagaaguuccugccauuccagcaguuuggccgggauaucgccgauaccacagacgccguuagagauccccagacacuggaaauccuggacaucaccccuugcagcuucggcggagugucugugaucaccccuggcaccaacaccagcaaucagguggcagugcuguaccagggcgugaacuguaccgaagugcccguggccauucacgccgaucagcugacaccuacauggcggguguacuccaccggcagcaauguguuucagaccagagccggcugucugaucggagccgagcacgugaacaauagcuacgagugcgacauccccaucggcgcuggaaucugcgccagcuaccagacacagacaaacagcccucggagagccagaagcguggccagccagagcaucauugccuacacaaugucucugggcgccgagaacagcguggccuacuccaacaacucuaucgcuauccccaccaacuucaccaucagcgugaccacagagauccugccuguguccaugaccaagaccagcguggacugcaccauguacaucugcggcgauuccaccgagugcuccaaccugcugcugcaguacggcagcuucugcacccagcugaauagagcccugacagggaucgccguggaacaggacaagaacacccaagagguguucgcccaagugaagcagaucuacaagaccccuccuaucaaggacuucggcggcuucaauuucagccagauucugcccgauccuagcaagcccagcaagcggagcuucaucgaggaccugcuguucaacaaagugacacuggccgacgccggcuucaucaagcaguauggcgauugucugggcgacauugccgccagggaucugauuugcgcccagaaguuuaacggacugacagugcugccuccucugcugaccgaugagaugaucgcccaguacacaucugcccugcuggccggcacaaucacaagcggcuggacauuuggagcaggcgccgcucugcagauccccuuugcuaugcagauggccuaccgguucaacggcaucggagugacccagaaugugcuguacgagaaccagaagcugaucgccaaccaguucaacagcgccaucggcaagauccaggacagccugagcagcacagcaagcgcccugggaaagcugcaggacguggucaaccagaaugcccaggcacugaacacccuggucaagcagcuguccuccaacuucggcgccaucagcucugugcugaacgauauccugagcagacuggacccuccugaggccgaggugcagaucgacagacugaucacaggcagacugcagagccuccagacauacgugacccagcagcugaucagagccgccgagauuagagccucugccaaucuggccgccaccaagaugucugagugugugcugggccagagcaagagaguggacuuuugcggcaagggcuaccaccugaugagcuucccucagucugccccucacggcgugguguuucugcacgugacauaugugcccgcucaagagaagaauuucaccaccgcuccagccaucugccacgacggcaaagcccacuuuccuagagaaggcguguucguguccaacggcacccauugguucgugacacagcggaacuucuacgagccccagaucaucaccaccgacaacaccuucgugucuggcaacugcgacgucgugaucggcauugugaacaauaccguguacgacccucugcagcccgagcuggacagcuucaaagaggaacuggacaaguacuuuaagaaccacacaagccccgacguggaccugggcgauaucagcggaaucaaugccagcgucgugaacauccagaaagagaucgaccggcugaacgagguggccaagaaucugaacgagagccugaucgaccugcaagaacuggggaaguacgagcaguacaucaaguggcccugguacaucuggcugggcuuuaucgccggacugauugccaucgugauggucacaaucaugcuguguugcaugaccagcugcuguagcugccugaagggcuguuguagcuguggcagcugcugcaaguucgacgaggacgauucugagcccgugcugaagggcgugaaacugcacuacacaugaggacuagucccuguucccagagcccacuuuuuuuucuuuuuuugaaauaaaauagccugucuuucagaucuaaaaaaaaaaaaaaaaaaaaaaaaaaaaaaaaaaaaaaaaaaaaaaaaaaaaaaaaaaaaaaaaaaaaaaaaaaaaaaaaaaaaaaaaaaaaaaaaaaaa

SEQ ID NO: 25151 - RNA, 4167 nt, Artificial Sequence
  SARS-CoV-2/Wuhan/WIV05/2019__EPI_ISL_402128 spike protein mRNA gc mod (1-1273)(K986P_V987P_S477N_D614G)
aggagagggcgcuuggcuugcaaggacccugagcugcggcauugaagcacacccaacccaacucgacugaagucagccucacugaaccggaucugagaaucuucucucucugggcuugccagggcucuccgaaccuagcuagcauccucuucaauuccaacuagaaagcuuaccauguucguguuccuggugcugcugccucugguguccagccagugugugaaccugaccaccagaacacagcugccuccagccuacaccaacagcuuuaccagaggcguguacuaccccgacaagguguucagauccagcgugcugcacucuacccaggaccuguuccugccuuucuucagcaacgugaccugguuccacgccauccacguguccggcaccaauggcaccaagagauucgacaaccccgugcugcccuucaacgacgggguguacuuugccagcaccgagaaguccaacaucaucagaggcuggaucuucggcaccacacuggacagcaagacccagagccugcugaucgugaacaacgccaccaacguggucaucaaagugugcgaguuccaguucugcaacgaccccuuccugggcgucuacuaccacaagaacaacaagagcuggauggaaagcgaguuccggguguacagcagcgccaacaacugcaccuucgaguacgugucccagccuuuccugauggaccuggaaggcaagcagggcaacuucaagaaccugcgcgaguucguguuuaagaacaucgacggcuacuucaagaucuacagcaagcacaccccuaucaaccucgugcgggaucugccucagggcuucucugcucuggaaccccugguggaucugcccaucggcaucaacaucacccgguuucagacacugcuggcccugcacagaagcuaccugacaccuggcgauagcagcagcggauggacagcuggugccgccgcuuacuaugugggcuaccugcagccuagaaccuuccugcugaaguacaacgagaacggcaccaucaccgacgccguggauugugcucuggauccucugagcgagacaaagugcacccugaaguccuucaccguggaaaagggcaucuaccagaccagcaacuuccgggugcagcccaccgaauccaucgugcgguuccccaauaucaccaaucugugccccuucggcgagguguucaaugccaccagauucgccucuguguacgccuggaaccggaagcggaucagcaauugcguggccgacuacuccgugcuguacaacuccgccagcuucagcaccuucaagugcuacggcguguccccuaccaagcugaacgaccugugcuucacaaacguguacgccgacagcuucgugauccggggagaugaagugcggcagauugccccuggacagacaggcaagaucgccgacuacaacuacaagcugcccgacgacuucaccggcugugugauugccuggaacagcaacaaccuggacuccaaagucggcggcaacuacaauuaccuguaccggcuguuccggaaguccaaucugaagcccuucgagcgggacaucuccaccgagaucuaucaggccggcaacaccccuuguaacggcguggaaggcuucaacugcuacuucccacugcaguccuacggcuuucagcccacaaauggcgugggcuaucagcccuacagagugguggugcugagcuucgaacugcugcaugccccugccacagugugcggcccuaagaaaagcaccaaucucgugaagaacaaaugcgugaacuucaacuucaacggccugaccggcaccggcgugcugacagagagcaacaagaaguuccugccauuccagcaguuuggccgggauaucgccgauaccacagacgccguuagagauccccagacacuggaaauccuggacaucaccccuugcagcuucggcggagugucugugaucaccccuggcaccaacaccagcaaucagguggcagugcuguaccagggcgugaacuguaccgaagugcccguggccauucacgccgaucagcugacaccuacauggcggguguacuccaccggcagcaauguguuucagaccagagccggcugucugaucggagccgagcacgugaacaauagcuacgagugcgacauccccaucggcgcuggaaucugcgccagcuaccagacacagacaaacagcccucggagagccagaagcguggccagccagagcaucauugccuacacaaugucucugggcgccgagaacagcguggccuacuccaacaacucuaucgcuauccccaccaacuucaccaucagcgugaccacagagauccugccuguguccaugaccaagaccagcguggacugcaccauguacaucugcggcgauuccaccgagugcuccaaccugcugcugcaguacggcagcuucugcacccagcugaauagagcccugacagggaucgccguggaacaggacaagaacacccaagagguguucgcccaagugaagcagaucuacaagaccccuccuaucaaggacuucggcggcuucaauuucagccagauucugcccgauccuagcaagcccagcaagcggagcuucaucgaggaccugcuguucaacaaagugacacuggccgacgccggcuucaucaagcaguauggcgauugucugggcgacauugccgccagggaucugauuugcgcccagaaguuuaacggacugacagugcugccuccucugcugaccgaugagaugaucgcccaguacacaucugcccugcuggccggcacaaucacaagcggcuggacauuuggagcaggcgccgcucugcagauccccuuugcuaugcagauggccuaccgguucaacggcaucggagugacccagaaugugcuguacgagaaccagaagcugaucgccaaccaguucaacagcgccaucggcaagauccaggacagccugagcagcacagcaagcgcccugggaaagcugcaggacguggucaaccagaaugcccaggcacugaacacccuggucaagcagcuguccuccaacuucggcgccaucagcucugugcugaacgauauccugagcagacuggacccuccugaggccgaggugcagaucgacagacugaucacaggcagacugcagagccuccagacauacgugacccagcagcugaucagagccgccgagauuagagccucugccaaucuggccgccaccaagaugucugagugugugcugggccagagcaagagaguggacuuuugcggcaagggcuaccaccugaugagcuucccucagucugccccucacggcgugguguuucugcacgugacauaugugcccgcucaagagaagaauuucaccaccgcuccagccaucugccacgacggcaaagcccacuuuccuagagaaggcguguucguguccaacggcacccauugguucgugacacagcggaacuucuacgagccccagaucaucaccaccgacaacaccuucgugucuggcaacugcgacgucgugaucggcauugugaacaauaccguguacgacccucugcagcccgagcuggacagcuucaaagaggaacuggacaaguacuuuaagaaccacacaagccccgacguggaccugggcgauaucagcggaaucaaugccagcgucgugaacauccagaaagagaucgaccggcugaacgagguggccaagaaucugaacgagagccugaucgaccugcaagaacuggggaaguacgagcaguacaucaaguggcccugguacaucuggcugggcuuuaucgccggacugauugccaucgugauggucacaaucaugcuguguugcaugaccagcugcuguagcugccugaagggcuguuguagcuguggcagcugcugcaaguucgacgaggacgauucugagcccgugcugaagggcgugaaacugcacuacacaugaggacuagucccuguucccagagcccacuuuuuuuucuuuuuuugaaauaaaauagccugucuuucagaucuaaaaaaaaaaaaaaaaaaaaaaaaaaaaaaaaaaaaaaaaaaaaaaaaaaaaaaaaaaaaaaaaaaaaaaaaaaaaaaaaaaaaaaaaaaaaaaaaaaaa

SEQ ID NO: 25152 - RNA, 4167 nt, Artificial Sequence
  SARS-CoV-2/Wuhan/WIV05/2019__EPI_ISL_402128 spike protein mRNA gc mod (1-1273)(K986P_V987P_N501Y_D614G)
aggagagggcgcuuggcuugcaaggacccugagcugcggcauugaagcacacccaacccaacucgacugaagucagccucacugaaccggaucugagaaucuucucucucugggcuugccagggcucuccgaaccuagcuagcauccucuucaauuccaacuagaaagcuuaccauguucguguuccuggugcugcugccucugguguccagccagugugugaaccugaccaccagaacacagcugccuccagccuacaccaacagcuuuaccagaggcguguacuaccccgacaagguguucagauccagcgugcugcacucuacccaggaccuguuccugccuuucuucagcaacgugaccugguuccacgccauccacguguccggcaccaauggcaccaagagauucgacaaccccgugcugcccuucaacgacgggguguacuuugccagcaccgagaaguccaacaucaucagaggcuggaucuucggcaccacacuggacagcaagacccagagccugcugaucgugaacaacgccaccaacguggucaucaaagugugcgaguuccaguucugcaacgaccccuuccugggcgucuacuaccacaagaacaacaagagcuggauggaaagcgaguuccggguguacagcagcgccaacaacugcaccuucgaguacgugucccagccuuuccugauggaccuggaaggcaagcagggcaacuucaagaaccugcgcgaguucguguuuaagaacaucgacggcuacuucaagaucuacagcaagcacaccccuaucaaccucgugcgggaucugccucagggcuucucugcucuggaaccccugguggaucugcccaucggcaucaacaucacccgguuucagacacugcuggcccugcacagaagcuaccugacaccuggcgauagcagcagcggauggacagcuggugccgccgcuuacuaugugggcuaccugcagccuagaaccuuccugcugaaguacaacgagaacggcaccaucaccgacgccguggauugugcucuggauccucugagcgagacaaagugcacccugaaguccuucaccguggaaaagggcaucuaccagaccagcaacuuccgggugcagcccaccgaauccaucgugcgguuccccaauaucaccaaucugugccccuucggcgagguguucaaugccaccagauucgccucuguguacgccuggaaccggaagcggaucagcaauugcguggccgacuacuccgugcuguacaacuccgccagcuucagcaccuucaagugcuacggcguguccccuaccaagcugaacgaccugugcuucacaaacguguacgccgacagcuucgugauccggggagaugaagugcggcagauugccccuggacagacaggcaagaucgccgacuacaacuacaagcugcccgacgacuucaccggcugugugauugccuggaacagcaacaaccuggacuccaaagucggcggcaacuacaauuaccuguaccggcuguuccggaaguccaaucugaagcccuucgagcgggacaucuccaccgagaucuaucaggccggcagcaccccuuguaacggcguggaaggcuucaacugcuacuucccacugcaguccuacggcuuucagcccacauacggcgugggcuaucagcccuacagagugguggugcugagcuucgaacugcugcaugccccugccacagugugcggcccuaagaaaagcaccaaucucgugaagaacaaaugcgugaacuucaacuucaacggccugaccggcaccggcgugcugacagagagcaacaagaaguuccugccauuccagcaguuuggccgggauaucgccgauaccacagacgccguuagagauccccagacacuggaaauccuggacaucaccccuugcagcuucggcggagugucugugaucaccccuggcaccaacaccagcaaucagguggcagugcuguaccagggcgugaacuguaccgaagugcccguggccauucacgccgaucagcugacaccuacauggcggguguacuccaccggcagcaauguguuucagaccagagccggcugucugaucggagccgagcacgugaacaauagcuacgagugcgacauccccaucggcgcuggaaucugcgccagcuaccagacacagacaaacagcccucggagagccagaagcguggccagccagagcaucauugccuacacaaugucucugggcgccgagaacagcguggccuacuccaacaacucuaucgcuauccccaccaacuucaccaucagcgugaccacagagauccugccuguguccaugaccaagaccagcguggacugcaccauguacaucugcggcgauuccaccgagugcuccaaccugcugcugcaguacggcagcuucugcacccagcugaauagagcccugacagggaucgccguggaacaggacaagaacacccaagagguguucgcccaagugaagcagaucuacaagaccccuccuaucaaggacuucggcggcuucaauuucagccagauucugcccgauccuagcaagcccagcaagcggagcuucaucgaggaccugcuguucaacaaagugacacuggccgacgccggcuucaucaagcaguauggcgauugucugggcgacauugccgccagggaucugauuugcgcccagaaguuuaacggacugacagugcugccuccucugcugaccgaugagaugaucgcccaguacacaucugcccugcuggccggcacaaucacaagcggcuggacauuuggagcaggcgccgcucugcagauccccuuugcuaugcagauggccuaccgguucaacggcaucggagugacccagaaugugcuguacgagaaccagaagcugaucgccaaccaguucaacagcgccaucggcaagauccaggacagccugagcagcacagcaagcgcccugggaaagcugcaggacguggucaaccagaaugcccaggcacugaacacccuggucaagcagcuguccuccaacuucggcgccaucagcucugugcugaacgauauccugagcagacuggacccuccugaggccgaggugcagaucgacagacugaucacaggcagacugcagagccuccagacauacgugacccagcagcugaucagagccgccgagauuagagccucugccaaucuggccgccaccaagaugucugagugugugcugggccagagcaagagaguggacuuuugcggcaagggcuaccaccugaugagcuucccucagucugccccucacggcgugguguuucugcacgugacauaugugcccgcucaagagaagaauuucaccaccgcuccagccaucugccacgacggcaaagcccacuuuccuagagaaggcguguucguguccaacggcacccauugguucgugacacagcggaacuucuacgagccccagaucaucaccaccgacaacaccuucgugucuggcaacugcgacgucgugaucggcauugugaacaauaccguguacgacccucugcagcccgagcuggacagcuucaaagaggaacuggacaaguacuuuaagaaccacacaagccccgacguggaccugggcgauaucagcggaaucaaugccagcgucgugaacauccagaaagagaucgaccggcugaacgagguggccaagaaucugaacgagagccugaucgaccugcaagaacuggggaaguacgagcaguacaucaaguggcccugguacaucuggcugggcuuuaucgccggacugauugccaucgugauggucacaaucaugcuguguugcaugaccagcugcuguagcugccugaagggcuguuguagcuguggcagcugcugcaaguucgacgaggacgauucugagcccgugcugaagggcgugaaacugcacuacacaugaggacuagucccuguucccagagcccacuuuuuuuucuuuuuuugaaauaaaauagccugucuuucagaucuaaaaaaaaaaaaaaaaaaaaaaaaaaaaaaaaaaaaaaaaaaaaaaaaaaaaaaaaaaaaaaaaaaaaaaaaaaaaaaaaaaaaaaaaaaaaaaaaaaaa

SEQ ID NO: 25153 - RNA, 4161 nt, Artificial Sequence
  SARS-CoV-2/Wuhan/WIV05/2019__EPI_ISL_402128 spike protein mRNA gc mod (1-1273)(K986P_V987P_H69del_V70del_D614G)
aggagagggcgcuuggcuugcaaggacccugagcugcggcauugaagcacacccaacccaacucgacugaagucagccucacugaaccggaucugagaaucuucucucucugggcuugccagggcucuccgaaccuagcuagcauccucuucaauuccaacuagaaagcuuaccauguucguguuccuggugcugcugccucugguguccagccagugugugaaccugaccaccagaacacagcugccuccagccuacaccaacagcuuuaccagaggcguguacuaccccgacaagguguucagauccagcgugcugcacucuacccaggaccuguuccugccuuucuucagcaacgugaccugguuccacgccaucuccggcaccaauggcaccaagagauucgacaaccccgugcugcccuucaacgacgggguguacuuugccagcaccgagaaguccaacaucaucagaggcuggaucuucggcaccacacuggacagcaagacccagagccugcugaucgugaacaacgccaccaacguggucaucaaagugugcgaguuccaguucugcaacgaccccuuccugggcgucuacuaccacaagaacaacaagagcuggauggaaagcgaguuccggguguacagcagcgccaacaacugcaccuucgaguacgugucccagccuuuccugauggaccuggaaggcaagcagggcaacuucaagaaccugcgcgaguucguguuuaagaacaucgacggcuacuucaagaucuacagcaagcacaccccuaucaaccucgugcgggaucugccucagggcuucucugcucuggaaccccugguggaucugcccaucggcaucaacaucacccgguuucagacacugcuggcccugcacagaagcuaccugacaccuggcgauagcagcagcggauggacagcuggugccgccgcuuacuaugugggcuaccugcagccuagaaccuuccugcugaaguacaacgagaacggcaccaucaccgacgccguggauugugcucuggauccucugagcgagacaaagugcacccugaaguccuucaccguggaaaagggcaucuaccagaccagcaacuuccgggugcagcccaccgaauccaucgugcgguuccccaauaucaccaaucugugccccuucggcgagguguucaaugccaccagauucgccucuguguacgccuggaaccggaagcggaucagcaauugcguggccgacuacuccgugcuguacaacuccgccagcuucagcaccuucaagugcuacggcguguccccuaccaagcugaacgaccugugcuucacaaacguguacgccgacagcuucgugauccggggagaugaagugcggcagauugccccuggacagacaggcaagaucgccgacuacaacuacaagcugcccgacgacuucaccggcugugugauugccuggaacagcaacaaccuggacuccaaagucggcggcaacuacaauuaccuguaccggcuguuccggaaguccaaucugaagcccuucgagcgggacaucuccaccgagaucuaucaggccggcagcaccccuuguaacggcguggaaggcuucaacugcuacuucccacugcaguccuacggcuuucagcccacaaauggcgugggcuaucagcccuacagagugguggugcugagcuucgaacugcugcaugccccugccacagugugcggcccuaagaaaagcaccaaucucgugaagaacaaaugcgugaacuucaacuucaacggccugaccggcaccggcgugcugacagagagcaacaagaaguuccugccauuccagcaguuuggccgggauaucgccgauaccacagacgccguuagagauccccagacacuggaaauccuggacaucaccccuugcagcuucggcggagugucugugaucaccccuggcaccaacaccagcaaucagguggcagugcuguaccagggcgugaacuguaccgaagugcccguggccauucacgccgaucagcugacaccuacauggcggguguacuccaccggcagcaauguguuucagaccagagccggcugucugaucggagccgagcacgugaacaauagcuacgagugcgacauccccaucggcgcuggaaucugcgccagcuaccagacacagacaaacagcccucggagagccagaagcguggccagccagagcaucauugccuacacaaugucucugggcgccgagaacagcguggccuacuccaacaacucuaucgcuauccccaccaacuucaccaucagcgugaccacagagauccugccuguguccaugaccaagaccagcguggacugcaccauguacaucugcggcgauuccaccgagugcuccaaccugcugcugcaguacggcagcuucugcacccagcugaauagagcccugacagggaucgccguggaacaggacaagaacacccaagagguguucgcccaagugaagcagaucuacaagaccccuccuaucaaggacuucggcggcuucaauuucagccagauucugcccgauccuagcaagcccagcaagcggagcuucaucgaggaccugcuguucaacaaagugacacuggccgacgccggcuucaucaagcaguauggcgauugucugggcgacauugccgccagggaucugauuugcgcccagaaguuuaacggacugacagugcugccuccucugcugaccgaugagaugaucgcccaguacacaucugcccugcuggccggcacaaucacaagcggcuggacauuuggagcaggcgccgcucugcagauccccuuugcuaugcagauggccuaccgguucaacggcaucggagugacccagaaugugcuguacgagaaccagaagcugaucgccaaccaguucaacagcgccaucggcaagauccaggacagccugagcagcacagcaagcgcccugggaaagcugcaggacguggucaaccagaaugcccaggcacugaacacccuggucaagcagcuguccuccaacuucggcgccaucagcucugugcugaacgauauccugagcagacuggacccuccugaggccgaggugcagaucgacagacugaucacaggcagacugcagagccuccagacauacgugacccagcagcugaucagagccgccgagauuagagccucugccaaucuggccgccaccaagaugucugagugugugcugggccagagcaagagaguggacuuuugcggcaagggcuaccaccugaugagcuucccucagucugccccucacggcgugguguuucugcacgugacauaugugcccgcucaagagaagaauuucaccaccgcuccagccaucugccacgacggcaaagcccacuuuccuagagaaggcguguucguguccaacggcacccauugguucgugacacagcggaacuucuacgagccccagaucaucaccaccgacaacaccuucgugucuggcaacugcgacgucgugaucggcauugugaacaauaccguguacgacccucugcagcccgagcuggacagcuucaaagaggaacuggacaaguacuuuaagaaccacacaagccccgacguggaccugggcgauaucagcggaaucaaugccagcgucgugaacauccagaaagagaucgaccggcugaacgagguggccaagaaucugaacgagagccugaucgaccugcaagaacuggggaaguacgagcaguacaucaaguggcccugguacaucuggcugggcuuuaucgccggacugauugccaucgugauggucacaaucaugcuguguugcaugaccagcugcuguagcugccugaagggcuguuguagcuguggcagcugcugcaaguucgacgaggacgauucugagcccgugcugaagggcgugaaacugcacuacacaugaggacuagucccuguucccagagcccacuuuuuuuucuuuuuuugaaauaaaauagccugucuuucagaucuaaaaaaaaaaaaaaaaaaaaaaaaaaaaaaaaaaaaaaaaaaaaaaaaaaaaaaaaaaaaaaaaaaaaaaaaaaaaaaaaaaaaaaaaaaaaaaaaaaaa

SEQ ID NO: 25154 - RNA, 4167 nt, Artificial Sequence
  SARS-CoV-2/Wuhan/WIV05/2019__EPI_ISL_402128 spike protein mRNA gc mod (1-1273)(K986P_V987P_Y453F_D614G)
aggagagggcgcuuggcuugcaaggacccugagcugcggcauugaagcacacccaacccaacucgacugaagucagccucacugaaccggaucugagaaucuucucucucugggcuugccagggcucuccgaaccuagcuagcauccucuucaauuccaacuagaaagcuuaccauguucguguuccuggugcugcugccucugguguccagccagugugugaaccugaccaccagaacacagcugccuccagccuacaccaacagcuuuaccagaggcguguacuaccccgacaagguguucagauccagcgugcugcacucuacccaggaccuguuccugccuuucuucagcaacgugaccugguuccacgccauccacguguccggcaccaauggcaccaagagauucgacaaccccgugcugcccuucaacgacgggguguacuuugccagcaccgagaaguccaacaucaucagaggcuggaucuucggcaccacacuggacagcaagacccagagccugcugaucgugaacaacgccaccaacguggucaucaaagugugcgaguuccaguucugcaacgaccccuuccugggcgucuacuaccacaagaacaacaagagcuggauggaaagcgaguuccggguguacagcagcgccaacaacugcaccuucgaguacgugucccagccuuuccugauggaccuggaaggcaagcagggcaacuucaagaaccugcgcgaguucguguuuaagaacaucgacggcuacuucaagaucuacagcaagcacaccccuaucaaccucgugcgggaucugccucagggcuucucugcucuggaaccccugguggaucugcccaucggcaucaacaucacccgguuucagacacugcuggcccugcacagaagcuaccugacaccuggcgauagcagcagcggauggacagcuggugccgccgcuuacuaugugggcuaccugcagccuagaaccuuccugcugaaguacaacgagaacggcaccaucaccgacgccguggauugugcucuggauccucugagcgagacaaagugcacccugaaguccuucaccguggaaaagggcaucuaccagaccagcaacuuccgggugcagcccaccgaauccaucgugcgguuccccaauaucaccaaucugugccccuucggcgagguguucaaugccaccagauucgccucuguguacgccuggaaccggaagcggaucagcaauugcguggccgacuacuccgugcuguacaacuccgccagcuucagcaccuucaagugcuacggcguguccccuaccaagcugaacgaccugugcuucacaaacguguacgccgacagcuucgugauccggggagaugaagugcggcagauugccccuggacagacaggcaagaucgccgacuacaacuacaagcugcccgacgacuucaccggcugugugauugccuggaacagcaacaaccuggacuccaaagucggcggcaacuacaauuaccuguuccggcuguuccggaaguccaaucugaagcccuucgagcgggacaucuccaccgagaucuaucaggccggcagcaccccuuguaacggcguggaaggcuucaacugcuacuucccacugcaguccuacggcuuucagcccacaaauggcgugggcuaucagcccuacagagugguggugcugagcuucgaacugcugcaugccccugccacagugugcggcccuaagaaaagcaccaaucucgugaagaacaaaugcgugaacuucaacuucaacggccugaccggcaccggcgugcugacagagagcaacaagaaguuccugccauuccagcaguuuggccgggauaucgccgauaccacagacgccguuagagauccccagacacuggaaauccuggacaucaccccuugcagcuucggcggagugucugugaucaccccuggcaccaacaccagcaaucagguggcagugcuguaccagggcgugaacuguaccgaagugcccguggccauucacgccgaucagcugacaccuacauggcggguguacuccaccggcagcaauguguuucagaccagagccggcugucugaucggagccgagcacgugaacaauagcuacgagugcgacauccccaucggcgcuggaaucugcgccagcuaccagacacagacaaacagcccucggagagccagaagcguggccagccagagcaucauugccuacacaaugucucugggcgccgagaacagcguggccuacuccaacaacucuaucgcuauccccaccaacuucaccaucagcgugaccacagagauccugccuguguccaugaccaagaccagcguggacugcaccauguacaucugcggcgauuccaccgagugcuccaaccugcugcugcaguacggcagcuucugcacccagcugaauagagcccugacagggaucgccguggaacaggacaagaacacccaagagguguucgcccaagugaagcagaucuacaagaccccuccuaucaaggacuucggcggcuucaauuucagccagauucugcccgauccuagcaagcccagcaagcggagcuucaucgaggaccugcuguucaacaaagugacacuggccgacgccggcuucaucaagcaguauggcgauugucugggcgacauugccgccagggaucugauuugcgcccagaaguuuaacggacugacagugcugccuccucugcugaccgaugagaugaucgcccaguacacaucugcccugcuggccggcacaaucacaagcggcuggacauuuggagcaggcgccgcucugcagauccccuuugcuaugcagauggccuaccgguucaacggcaucggagugacccagaaugugcuguacgagaaccagaagcugaucgccaaccaguucaacagcgccaucggcaagauccaggacagccugagcagcacagcaagcgcccugggaaagcugcaggacguggucaaccagaaugcccaggcacugaacacccuggucaagcagcuguccuccaacuucggcgccaucagcucugugcugaacgauauccugagcagacuggacccuccugaggccgaggugcagaucgacagacugaucacaggcagacugcagagccuccagacauacgugacccagcagcugaucagagccgccgagauuagagccucugccaaucuggccgccaccaagaugucugagugugugcugggccagagcaagagaguggacuuuugcggcaagggcuaccaccugaugagcuucccucagucugccccucacggcgugguguuucugcacgugacauaugugcccgcucaagagaagaauuucaccaccgcuccagccaucugccacgacggcaaagcccacuuuccuagagaaggcguguucguguccaacggcacccauugguucgugacacagcggaacuucuacgagccccagaucaucaccaccgacaacaccuucgugucuggcaacugcgacgucgugaucggcauugugaacaauaccguguacgacccucugcagcccgagcuggacagcuucaaagaggaacuggacaaguacuuuaagaaccacacaagccccgacguggaccugggcgauaucagcggaaucaaugccagcgucgugaacauccagaaagagaucgaccggcugaacgagguggccaagaaucugaacgagagccugaucgaccugcaagaacuggggaaguacgagcaguacaucaaguggcccugguacaucuggcugggcuuuaucgccggacugauugccaucgugauggucacaaucaugcuguguugcaugaccagcugcuguagcugccugaagggcuguuguagcuguggcagcugcugcaaguucgacgaggacgauucugagcccgugcugaagggcgugaaacugcacuacacaugaggacuagucccuguucccagagcccacuuuuuuuucuuuuuuugaaauaaaauagccugucuuucagaucuaaaaaaaaaaaaaaaaaaaaaaaaaaaaaaaaaaaaaaaaaaaaaaaaaaaaaaaaaaaaaaaaaaaaaaaaaaaaaaaaaaaaaaaaaaaaaaaaaaaa

SEQ ID NO: 25155 - RNA, 4167 nt, Artificial Sequence
  SARS-CoV-2/Wuhan/WIV05/2019__EPI_ISL_402128 spike protein mRNA gc mod (1-1273)(K986P_V987P_D614G_I692V)
aggagagggcgcuuggcuugcaaggacccugagcugcggcauugaagcacacccaacccaacucgacugaagucagccucacugaaccggaucugagaaucuucucucucugggcuugccagggcucuccgaaccuagcuagcauccucuucaauuccaacuagaaagcuuaccauguucguguuccuggugcugcugccucugguguccagccagugugugaaccugaccaccagaacacagcugccuccagccuacaccaacagcuuuaccagaggcguguacuaccccgacaagguguucagauccagcgugcugcacucuacccaggaccuguuccugccuuucuucagcaacgugaccugguuccacgccauccacguguccggcaccaauggcaccaagagauucgacaaccccgugcugcccuucaacgacgggguguacuuugccagcaccgagaaguccaacaucaucagaggcuggaucuucggcaccacacuggacagcaagacccagagccugcugaucgugaacaacgccaccaacguggucaucaaagugugcgaguuccaguucugcaacgaccccuuccugggcgucuacuaccacaagaacaacaagagcuggauggaaagcgaguuccggguguacagcagcgccaacaacugcaccuucgaguacgugucccagccuuuccugauggaccuggaaggcaagcagggcaacuucaagaaccugcgcgaguucguguuuaagaacaucgacggcuacuucaagaucuacagcaagcacaccccuaucaaccucgugcgggaucugccucagggcuucucugcucuggaaccccugguggaucugcccaucggcaucaacaucacccgguuucagacacugcuggcccugcacagaagcuaccugacaccuggcgauagcagcagcggauggacagcuggugccgccgcuuacuaugugggcuaccugcagccuagaaccuuccugcugaaguacaacgagaacggcaccaucaccgacgccguggauugugcucuggauccucugagcgagacaaagugcacccugaaguccuucaccguggaaaagggcaucuaccagaccagcaacuuccgggugcagcccaccgaauccaucgugcgguuccccaauaucaccaaucugugccccuucggcgagguguucaaugccaccagauucgccucuguguacgccuggaaccggaagcggaucagcaauugcguggccgacuacuccgugcuguacaacuccgccagcuucagcaccuucaagugcuacggcguguccccuaccaagcugaacgaccugugcuucacaaacguguacgccgacagcuucgugauccggggagaugaagugcggcagauugccccuggacagacaggcaagaucgccgacuacaacuacaagcugcccgacgacuucaccggcugugugauugccuggaacagcaacaaccuggacuccaaagucggcggcaacuacaauuaccuguaccggcuguuccggaaguccaaucugaagcccuucgagcgggacaucuccaccgagaucuaucaggccggcagcaccccuuguaacggcguggaaggcuucaacugcuacuucccacugcaguccuacggcuuucagcccacaaauggcgugggcuaucagcccuacagagugguggugcugagcuucgaacugcugcaugccccugccacagugugcggcccuaagaaaagcaccaaucucgugaagaacaaaugcgugaacuucaacuucaacggccugaccggcaccggcgugcugacagagagcaacaagaaguuccugccauuccagcaguuuggccgggauaucgccgauaccacagacgccguuagagauccccagacacuggaaauccuggacaucaccccuugcagcuucggcggagugucugugaucaccccuggcaccaacaccagcaaucagguggcagugcuguaccagggcgugaacuguaccgaagugcccguggccauucacgccgaucagcugacaccuacauggcggguguacuccaccggcagcaauguguuucagaccagagccggcugucugaucggagccgagcacgugaacaauagcuacgagugcgacauccccaucggcgcuggaaucugcgccagcuaccagacacagacaaacagcccucggagagccagaagcguggccagccagagcgugauugccuacacaaugucucugggcgccgagaacagcguggccuacuccaacaacucuaucgcuauccccaccaacuucaccaucagcgugaccacagagauccugccuguguccaugaccaagaccagcguggacugcaccauguacaucugcggcgauuccaccgagugcuccaaccugcugcugcaguacggcagcuucugcacccagcugaauagagcccugacagggaucgccguggaacaggacaagaacacccaagagguguucgcccaagugaagcagaucuacaagaccccuccuaucaaggacuucggcggcuucaauuucagccagauucugcccgauccuagcaagcccagcaagcggagcuucaucgaggaccugcuguucaacaaagugacacuggccgacgccggcuucaucaagcaguauggcgauugucugggcgacauugccgccagggaucugauuugcgcccagaaguuuaacggacugacagugcugccuccucugcugaccgaugagaugaucgcccaguacacaucugcccugcuggccggcacaaucacaagcggcuggacauuuggagcaggcgccgcucugcagauccccuuugcuaugcagauggccuaccgguucaacggcaucggagugacccagaaugugcuguacgagaaccagaagcugaucgccaaccaguucaacagcgccaucggcaagauccaggacagccugagcagcacagcaagcgcccugggaaagcugcaggacguggucaaccagaaugcccaggcacugaacacccuggucaagcagcuguccuccaacuucggcgccaucagcucugugcugaacgauauccugagcagacuggacccuccugaggccgaggugcagaucgacagacugaucacaggcagacugcagagccuccagacauacgugacccagcagcugaucagagccgccgagauuagagccucugccaaucuggccgccaccaagaugucugagugugugcugggccagagcaagagaguggacuuuugcggcaagggcuaccaccugaugagcuucccucagucugccccucacggcgugguguuucugcacgugacauaugugcccgcucaagagaagaauuucaccaccgcuccagccaucugccacgacggcaaagcccacuuuccuagagaaggcguguucguguccaacggcacccauugguucgugacacagcggaacuucuacgagccccagaucaucaccaccgacaacaccuucgugucuggcaacugcgacgucgugaucggcauugugaacaauaccguguacgacccucugcagcccgagcuggacagcuucaaagaggaacuggacaaguacuuuaagaaccacacaagccccgacguggaccugggcgauaucagcggaaucaaugccagcgucgugaacauccagaaagagaucgaccggcugaacgagguggccaagaaucugaacgagagccugaucgaccugcaagaacuggggaaguacgagcaguacaucaaguggcccugguacaucuggcugggcuuuaucgccggacugauugccaucgugauggucacaaucaugcuguguugcaugaccagcugcuguagcugccugaagggcuguuguagcuguggcagcugcugcaaguucgacgaggacgauucugagcccgugcugaagggcgugaaacugcacuacacaugaggacuagucccuguucccagagcccacuuuuuuuucuuuuuuugaaauaaaauagccugucuuucagaucuaaaaaaaaaaaaaaaaaaaaaaaaaaaaaaaaaaaaaaaaaaaaaaaaaaaaaaaaaaaaaaaaaaaaaaaaaaaaaaaaaaaaaaaaaaaaaaaaaaaa

SEQ ID NO: 25156 - RNA, 4167 nt, Artificial Sequence
  SARS-CoV-2/Wuhan/WIV05/2019__EPI_ISL_402128 spike protein mRNA gc mod (1-1273)(K986P_V987P_D614G_M1229I)
aggagagggcgcuuggcuugcaaggacccugagcugcggcauugaagcacacccaacccaacucgacugaagucagccucacugaaccggaucugagaaucuucucucucugggcuugccagggcucuccgaaccuagcuagcauccucuucaauuccaacuagaaagcuuaccauguucguguuccuggugcugcugccucugguguccagccagugugugaaccugaccaccagaacacagcugccuccagccuacaccaacagcuuuaccagaggcguguacuaccccgacaagguguucagauccagcgugcugcacucuacccaggaccuguuccugccuuucuucagcaacgugaccugguuccacgccauccacguguccggcaccaauggcaccaagagauucgacaaccccgugcugcccuucaacgacgggguguacuuugccagcaccgagaaguccaacaucaucagaggcuggaucuucggcaccacacuggacagcaagacccagagccugcugaucgugaacaacgccaccaacguggucaucaaagugugcgaguuccaguucugcaacgaccccuuccugggcgucuacuaccacaagaacaacaagagcuggauggaaagcgaguuccggguguacagcagcgccaacaacugcaccuucgaguacgugucccagccuuuccugauggaccuggaaggcaagcagggcaacuucaagaaccugcgcgaguucguguuuaagaacaucgacggcuacuucaagaucuacagcaagcacaccccuaucaaccucgugcgggaucugccucagggcuucucugcucuggaaccccugguggaucugcccaucggcaucaacaucacccgguuucagacacugcuggcccugcacagaagcuaccugacaccuggcgauagcagcagcggauggacagcuggugccgccgcuuacuaugugggcuaccugcagccuagaaccuuccugcugaaguacaacgagaacggcaccaucaccgacgccguggauugugcucuggauccucugagcgagacaaagugcacccugaaguccuucaccguggaaaagggcaucuaccagaccagcaacuuccgggugcagcccaccgaauccaucgugcgguuccccaauaucaccaaucugugccccuucggcgagguguucaaugccaccagauucgccucuguguacgccuggaaccggaagcggaucagcaauugcguggccgacuacuccgugcuguacaacuccgccagcuucagcaccuucaagugcuacggcguguccccuaccaagcugaacgaccugugcuucacaaacguguacgccgacagcuucgugauccggggagaugaagugcggcagauugccccuggacagacaggcaagaucgccgacuacaacuacaagcugcccgacgacuucaccggcugugugauugccuggaacagcaacaaccuggacuccaaagucggcggcaacuacaauuaccuguaccggcuguuccggaaguccaaucugaagcccuucgagcgggacaucuccaccgagaucuaucaggccggcagcaccccuuguaacggcguggaaggcuucaacugcuacuucccacugcaguccuacggcuuucagcccacaaauggcgugggcuaucagcccuacagagugguggugcugagcuucgaacugcugcaugccccugccacagugugcggcccuaagaaaagcaccaaucucgugaagaacaaaugcgugaacuucaacuucaacggccugaccggcaccggcgugcugacagagagcaacaagaaguuccugccauuccagcaguuuggccgggauaucgccgauaccacagacgccguuagagauccccagacacuggaaauccuggacaucaccccuugcagcuucggcggagugucugugaucaccccuggcaccaacaccagcaaucagguggcagugcuguaccagggcgugaacuguaccgaagugcccguggccauucacgccgaucagcugacaccuacauggcggguguacuccaccggcagcaauguguuucagaccagagccggcugucugaucggagccgagcacgugaacaauagcuacgagugcgacauccccaucggcgcuggaaucugcgccagcuaccagacacagacaaacagcccucggagagccagaagcguggccagccagagcaucauugccuacacaaugucucugggcgccgagaacagcguggccuacuccaacaacucuaucgcuauccccaccaacuucaccaucagcgugaccacagagauccugccuguguccaugaccaagaccagcguggacugcaccauguacaucugcggcgauuccaccgagugcuccaaccugcugcugcaguacggcagcuucugcacccagcugaauagagcccugacagggaucgccguggaacaggacaagaacacccaagagguguucgcccaagugaagcagaucuacaagaccccuccuaucaaggacuucggcggcuucaauuucagccagauucugcccgauccuagcaagcccagcaagcggagcuucaucgaggaccugcuguucaacaaagugacacuggccgacgccggcuucaucaagcaguauggcgauugucugggcgacauugccgccagggaucugauuugcgcccagaaguuuaacggacugacagugcugccuccucugcugaccgaugagaugaucgcccaguacacaucugcccugcuggccggcacaaucacaagcggcuggacauuuggagcaggcgccgcucugcagauccccuuugcuaugcagauggccuaccgguucaacggcaucggagugacccagaaugugcuguacgagaaccagaagcugaucgccaaccaguucaacagcgccaucggcaagauccaggacagccugagcagcacagcaagcgcccugggaaagcugcaggacguggucaaccagaaugcccaggcacugaacacccuggucaagcagcuguccuccaacuucggcgccaucagcucugugcugaacgauauccugagcagacuggacccuccugaggccgaggugcagaucgacagacugaucacaggcagacugcagagccuccagacauacgugacccagcagcugaucagagccgccgagauuagagccucugccaaucuggccgccaccaagaugucugagugugugcugggccagagcaagagaguggacuuuugcggcaagggcuaccaccugaugagcuucccucagucugccccucacggcgugguguuucugcacgugacauaugugcccgcucaagagaagaauuucaccaccgcuccagccaucugccacgacggcaaagcccacuuuccuagagaaggcguguucguguccaacggcacccauugguucgugacacagcggaacuucuacgagccccagaucaucaccaccgacaacaccuucgugucuggcaacugcgacgucgugaucggcauugugaacaauaccguguacgacccucugcagcccgagcuggacagcuucaaagaggaacuggacaaguacuuuaagaaccacacaagccccgacguggaccugggcgauaucagcggaaucaaugccagcgucgugaacauccagaaagagaucgaccggcugaacgagguggccaagaaucugaacgagagccugaucgaccugcaagaacuggggaaguacgagcaguacaucaaguggcccugguacaucuggcugggcuuuaucgccggacugauugccaucgugaucgucacaaucaugcuguguugcaugaccagcugcuguagcugccugaagggcuguuguagcuguggcagcugcugcaaguucgacgaggacgauucugagcccgugcugaagggcgugaaacugcacuacacaugaggacuagucccuguucccagagcccacuuuuuuuucuuuuuuugaaauaaaauagccugucuuucagaucuaaaaaaaaaaaaaaaaaaaaaaaaaaaaaaaaaaaaaaaaaaaaaaaaaaaaaaaaaaaaaaaaaaaaaaaaaaaaaaaaaaaaaaaaaaaaaaaaaaaa

SEQ ID NO: 25157 - RNA, 4161 nt, Artificial Sequence
  SARS-CoV-2/Wuhan/WIV05/2019__EPI_ISL_402128 spike protein mRNA gc mod (1-1273)(K986P_V987P_H69del_V70del_A222V_Y453F_S477N_D614G_I692V)
aggagagggcgcuuggcuugcaaggacccugagcugcggcauugaagcacacccaacccaacucgacugaagucagccucacugaaccggaucugagaaucuucucucucugggcuugccagggcucuccgaaccuagcuagcauccucuucaauuccaacuagaaagcuuaccauguucguguuccuggugcugcugccucugguguccagccagugugugaaccugaccaccagaacacagcugccuccagccuacaccaacagcuuuaccagaggcguguacuaccccgacaagguguucagauccagcgugcugcacucuacccaggaccuguuccugccuuucuucagcaacgugaccugguuccacgccaucuccggcaccaauggcaccaagagauucgacaaccccgugcugcccuucaacgacgggguguacuuugccagcaccgagaaguccaacaucaucagaggcuggaucuucggcaccacacuggacagcaagacccagagccugcugaucgugaacaacgccaccaacguggucaucaaagugugcgaguuccaguucugcaacgaccccuuccugggcgucuacuaccacaagaacaacaagagcuggauggaaagcgaguuccggguguacagcagcgccaacaacugcaccuucgaguacgugucccagccuuuccugauggaccuggaaggcaagcagggcaacuucaagaaccugcgcgaguucguguuuaagaacaucgacggcuacuucaagaucuacagcaagcacaccccuaucaaccucgugcgggaucugccucagggcuucucugugcuggaaccccugguggaucugcccaucggcaucaacaucacccgguuucagacacugcuggcccugcacagaagcuaccugacaccuggcgauagcagcagcggauggacagcuggugccgccgcuuacuaugugggcuaccugcagccuagaaccuuccugcugaaguacaacgagaacggcaccaucaccgacgccguggauugugcucuggauccucugagcgagacaaagugcacccugaaguccuucaccguggaaaagggcaucuaccagaccagcaacuuccgggugcagcccaccgaauccaucgugcgguuccccaauaucaccaaucugugccccuucggcgagguguucaaugccaccagauucgccucuguguacgccuggaaccggaagcggaucagcaauugcguggccgacuacuccgugcuguacaacuccgccagcuucagcaccuucaagugcuacggcguguccccuaccaagcugaacgaccugugcuucacaaacguguacgccgacagcuucgugauccggggagaugaagugcggcagauugccccuggacagacaggcaagaucgccgacuacaacuacaagcugcccgacgacuucaccggcugugugauugccuggaacagcaacaaccuggacuccaaagucggcggcaacuacaauuaccuguuccggcuguuccggaaguccaaucugaagcccuucgagcgggacaucuccaccgagaucuaucaggccggcaacaccccuuguaacggcguggaaggcuucaacugcuacuucccacugcaguccuacggcuuucagcccacaaauggcgugggcuaucagcccuacagagugguggugcugagcuucgaacugcugcaugccccugccacagugugcggcccuaagaaaagcaccaaucucgugaagaacaaaugcgugaacuucaacuucaacggccugaccggcaccggcgugcugacagagagcaacaagaaguuccugccauuccagcaguuuggccgggauaucgccgauaccacagacgccguuagagauccccagacacuggaaauccuggacaucaccccuugcagcuucggcggagugucugugaucaccccuggcaccaacaccagcaaucagguggcagugcuguaccagggcgugaacuguaccgaagugcccguggccauucacgccgaucagcugacaccuacauggcggguguacuccaccggcagcaauguguuucagaccagagccggcugucugaucggagccgagcacgugaacaauagcuacgagugcgacauccccaucggcgcuggaaucugcgccagcuaccagacacagacaaacagcccucggagagccagaagcguggccagccagagcgugauugccuacacaaugucucugggcgccgagaacagcguggccuacuccaacaacucuaucgcuauccccaccaacuucaccaucagcgugaccacagagauccugccuguguccaugaccaagaccagcguggacugcaccauguacaucugcggcgauuccaccgagugcuccaaccugcugcugcaguacggcagcuucugcacccagcugaauagagcccugacagggaucgccguggaacaggacaagaacacccaagagguguucgcccaagugaagcagaucuacaagaccccuccuaucaaggacuucggcggcuucaauuucagccagauucugcccgauccuagcaagcccagcaagcggagcuucaucgaggaccugcuguucaacaaagugacacuggccgacgccggcuucaucaagcaguauggcgauugucugggcgacauugccgccagggaucugauuugcgcccagaaguuuaacggacugacagugcugccuccucugcugaccgaugagaugaucgcccaguacacaucugcccugcuggccggcacaaucacaagcggcuggacauuuggagcaggcgccgcucugcagauccccuuugcuaugcagauggccuaccgguucaacggcaucggagugacccagaaugugcuguacgagaaccagaagcugaucgccaaccaguucaacagcgccaucggcaagauccaggacagccugagcagcacagcaagcgcccugggaaagcugcaggacguggucaaccagaaugcccaggcacugaacacccuggucaagcagcuguccuccaacuucggcgccaucagcucugugcugaacgauauccugagcagacuggacccuccugaggccgaggugcagaucgacagacugaucacaggcagacugcagagccuccagacauacgugacccagcagcugaucagagccgccgagauuagagccucugccaaucuggccgccaccaagaugucugagugugugcugggccagagcaagagaguggacuuuugcggcaagggcuaccaccugaugagcuucccucagucugccccucacggcgugguguuucugcacgugacauaugugcccgcucaagagaagaauuucaccaccgcuccagccaucugccacgacggcaaagcccacuuuccuagagaaggcguguucguguccaacggcacccauugguucgugacacagcggaacuucuacgagccccagaucaucaccaccgacaacaccuucgugucuggcaacugcgacgucgugaucggcauugugaacaauaccguguacgacccucugcagcccgagcuggacagcuucaaagaggaacuggacaaguacuuuaagaaccacacaagccccgacguggaccugggcgauaucagcggaaucaaugccagcgucgugaacauccagaaagagaucgaccggcugaacgagguggccaagaaucugaacgagagccugaucgaccugcaagaacuggggaaguacgagcaguacaucaaguggcccugguacaucuggcugggcuuuaucgccggacugauugccaucgugauggucacaaucaugcuguguugcaugaccagcugcuguagcugccugaagggcuguuguagcuguggcagcugcugcaaguucgacgaggacgauucugagcccgugcugaagggcgugaaacugcacuacacaugaggacuagucccuguucccagagcccacuuuuuuuucuuuuuuugaaauaaaauagccugucuuucagaucuaaaaaaaaaaaaaaaaaaaaaaaaaaaaaaaaaaaaaaaaaaaaaaaaaaaaaaaaaaaaaaaaaaaaaaaaaaaaaaaaaaaaaaaaaaaaaaaaaaaa

SEQ ID NO: 25158 - RNA, 4161 nt, Artificial Sequence
  SARS-CoV-2/Wuhan/WIV05/2019__EPI_ISL_402128 spike protein mRNA gc mod (1-1273)(K986P_V987P_H69del_V70del_Y453F_D614G_I692V_M1229I)
aggagagggcgcuuggcuugcaaggacccugagcugcggcauugaagcacacccaacccaacucgacugaagucagccucacugaaccggaucugagaaucuucucucucugggcuugccagggcucuccgaaccuagcuagcauccucuucaauuccaacuagaaagcuuaccauguucguguuccuggugcugcugccucugguguccagccagugugugaaccugaccaccagaacacagcugccuccagccuacaccaacagcuuuaccagaggcguguacuaccccgacaagguguucagauccagcgugcugcacucuacccaggaccuguuccugccuuucuucagcaacgugaccugguuccacgccaucuccggcaccaauggcaccaagagauucgacaaccccgugcugcccuucaacgacgggguguacuuugccagcaccgagaaguccaacaucaucagaggcuggaucuucggcaccacacuggacagcaagacccagagccugcugaucgugaacaacgccaccaacguggucaucaaagugugcgaguuccaguucugcaacgaccccuuccugggcgucuacuaccacaagaacaacaagagcuggauggaaagcgaguuccggguguacagcagcgccaacaacugcaccuucgaguacgugucccagccuuuccugauggaccuggaaggcaagcagggcaacuucaagaaccugcgcgaguucguguuuaagaacaucgacggcuacuucaagaucuacagcaagcacaccccuaucaaccucgugcgggaucugccucagggcuucucugcucuggaaccccugguggaucugcccaucggcaucaacaucacccgguuucagacacugcuggcccugcacagaagcuaccugacaccuggcgauagcagcagcggauggacagcuggugccgccgcuuacuaugugggcuaccugcagccuagaaccuuccugcugaaguacaacgagaacggcaccaucaccgacgccguggauugugcucuggauccucugagcgagacaaagugcacccugaaguccuucaccguggaaaagggcaucuaccagaccagcaacuuccgggugcagcccaccgaauccaucgugcgguuccccaauaucaccaaucugugccccuucggcgagguguucaaugccaccagauucgccucuguguacgccuggaaccggaagcggaucagcaauugcguggccgacuacuccgugcuguacaacuccgccagcuucagcaccuucaagugcuacggcguguccccuaccaagcugaacgaccugugcuucacaaacguguacgccgacagcuucgugauccggggagaugaagugcggcagauugccccuggacagacaggcaagaucgccgacuacaacuacaagcugcccgacgacuucaccggcugugugauugccuggaacagcaacaaccuggacuccaaagucggcggcaacuacaauuaccuguuccggcuguuccggaaguccaaucugaagcccuucgagcgggacaucuccaccgagaucuaucaggccggcagcaccccuuguaacggcguggaaggcuucaacugcuacuucccacugcaguccuacggcuuucagcccacaaauggcgugggcuaucagcccuacagagugguggugcugagcuucgaacugcugcaugccccugccacagugugcggcccuaagaaaagcaccaaucucgugaagaacaaaugcgugaacuucaacuucaacggccugaccggcaccggcgugcugacagagagcaacaagaaguuccugccauuccagcaguuuggccgggauaucgccgauaccacagacgccguuagagauccccagacacuggaaauccuggacaucaccccuugcagcuucggcggagugucugugaucaccccuggcaccaacaccagcaaucagguggcagugcuguaccagggcgugaacuguaccgaagugcccguggccauucacgccgaucagcugacaccuacauggcggguguacuccaccggcagcaauguguuucagaccagagccggcugucugaucggagccgagcacgugaacaauagcuacgagugcgacauccccaucggcgcuggaaucugcgccagcuaccagacacagacaaacagcccucggagagccagaagcguggccagccagagcgugauugccuacacaaugucucugggcgccgagaacagcguggccuacuccaacaacucuaucgcuauccccaccaacuucaccaucagcgugaccacagagauccugccuguguccaugaccaagaccagcguggacugcaccauguacaucugcggcgauuccaccgagugcuccaaccugcugcugcaguacggcagcuucugcacccagcugaauagagcccugacagggaucgccguggaacaggacaagaacacccaagagguguucgcccaagugaagcagaucuacaagaccccuccuaucaaggacuucggcggcuucaauuucagccagauucugcccgauccuagcaagcccagcaagcggagcuucaucgaggaccugcuguucaacaaagugacacuggccgacgccggcuucaucaagcaguauggcgauugucugggcgacauugccgccagggaucugauuugcgcccagaaguuuaacggacugacagugcugccuccucugcugaccgaugagaugaucgcccaguacacaucugcccugcuggccggcacaaucacaagcggcuggacauuuggagcaggcgccgcucugcagauccccuuugcuaugcagauggccuaccgguucaacggcaucggagugacccagaaugugcuguacgagaaccagaagcugaucgccaaccaguucaacagcgccaucggcaagauccaggacagccugagcagcacagcaagcgcccugggaaagcugcaggacguggucaaccagaaugcccaggcacugaacacccuggucaagcagcuguccuccaacuucggcgccaucagcucugugcugaacgauauccugagcagacuggacccuccugaggccgaggugcagaucgacagacugaucacaggcagacugcagagccuccagacauacgugacccagcagcugaucagagccgccgagauuagagccucugccaaucuggccgccaccaagaugucugagugugugcugggccagagcaagagaguggacuuuugcggcaagggcuaccaccugaugagcuucccucagucugccccucacggcgugguguuucugcacgugacauaugugcccgcucaagagaagaauuucaccaccgcuccagccaucugccacgacggcaaagcccacuuuccuagagaaggcguguucguguccaacggcacccauugguucgugacacagcggaacuucuacgagccccagaucaucaccaccgacaacaccuucgugucuggcaacugcgacgucgugaucggcauugugaacaauaccguguacgacccucugcagcccgagcuggacagcuucaaagaggaacuggacaaguacuuuaagaaccacacaagccccgacguggaccugggcgauaucagcggaaucaaugccagcgucgugaacauccagaaagagaucgaccggcugaacgagguggccaagaaucugaacgagagccugaucgaccugcaagaacuggggaaguacgagcaguacaucaaguggcccugguacaucuggcugggcuuuaucgccggacugauugccaucgugaucgucacaaucaugcuguguugcaugaccagcugcuguagcugccugaagggcuguuguagcuguggcagcugcugcaaguucgacgaggacgauucugagcccgugcugaagggcgugaaacugcacuacacaugaggacuagucccuguucccagagcccacuuuuuuuucuuuuuuugaaauaaaauagccugucuuucagaucuaaaaaaaaaaaaaaaaaaaaaaaaaaaaaaaaaaaaaaaaaaaaaaaaaaaaaaaaaaaaaaaaaaaaaaaaaaaaaaaaaaaaaaaaaaaaaaaaaaaa

SEQ ID NO: 25159 - RNA, 4158 nt, Artificial Sequence
  SARS-CoV-2/Wuhan/WIV05/2019__EPI_ISL_402128 spike protein mRNA gc mod (1-1273)(K986P_V987P_K986P_V987P_H69del_V70del_Y144del_N501Y_A570 D_D614G_P681H_T716I_S982A_D1118H)
aggagagggcgcuuggcuugcaaggacccugagcugcggcauugaagcacacccaacccaacucgacugaagucagccucacugaaccggaucugagaaucuucucucucugggcuugccagggcucuccgaaccuagcuagcauccucuucaauuccaacuagaaagcuuaccauguucguguuccuggugcugcugccucugguguccagccagugugugaaccugaccaccagaacacagcugccuccagccuacaccaacagcuuuaccagaggcguguacuaccccgacaagguguucagauccagcgugcugcacucuacccaggaccuguuccugccuuucuucagcaacgugaccugguuccacgccaucuccggcaccaauggcaccaagagauucgacaaccccgugcugcccuucaacgacgggguguacuuugccagcaccgagaaguccaacaucaucagaggcuggaucuucggcaccacacuggacagcaagacccagagccugcugaucgugaacaacgccaccaacguggucaucaaagugugcgaguuccaguucugcaacgaccccuuccugggcgucuaccacaagaacaacaagagcuggauggaaagcgaguuccggguguacagcagcgccaacaacugcaccuucgaguacgugucccagccuuuccugauggaccuggaaggcaagcagggcaacuucaagaaccugcgcgaguucguguuuaagaacaucgacggcuacuucaagaucuacagcaagcacaccccuaucaaccucgugcgggaucugccucagggcuucucugcucuggaaccccugguggaucugcccaucggcaucaacaucacccgguuucagacacugcuggcccugcacagaagcuaccugacaccuggcgauagcagcagcggauggacagcuggugccgccgcuuacuaugugggcuaccugcagccuagaaccuuccugcugaaguacaacgagaacggcaccaucaccgacgccguggauugugcucuggauccucugagcgagacaaagugcacccugaaguccuucaccguggaaaagggcaucuaccagaccagcaacuuccgggugcagcccaccgaauccaucgugcgguuccccaauaucaccaaucugugccccuucggcgagguguucaaugccaccagauucgccucuguguacgccuggaaccggaagcggaucagcaauugcguggccgacuacuccgugcuguacaacuccgccagcuucagcaccuucaagugcuacggcguguccccuaccaagcugaacgaccugugcuucacaaacguguacgccgacagcuucgugauccggggagaugaagugcggcagauugccccuggacagacaggcaagaucgccgacuacaacuacaagcugcccgacgacuucaccggcugugugauugccuggaacagcaacaaccuggacuccaaagucggcggcaacuacaauuaccuguaccggcuguuccggaaguccaaucugaagcccuucgagcgggacaucuccaccgagaucuaucaggccggcagcaccccuuguaacggcguggaaggcuucaacugcuacuucccacugcaguccuacggcuuucagcccacauacggcgugggcuaucagcccuacagagugguggugcugagcuucgaacugcugcaugccccugccacagugugcggcccuaagaaaagcaccaaucucgugaagaacaaaugcgugaacuucaacuucaacggccugaccggcaccggcgugcugacagagagcaacaagaaguuccugccauuccagcaguuuggccgggauaucgacgauaccacagacgccguuagagauccccagacacuggaaauccuggacaucaccccuugcagcuucggcggagugucugugaucaccccuggcaccaacaccagcaaucagguggcagugcuguaccagggcgugaacuguaccgaagugcccguggccauucacgccgaucagcugacaccuacauggcggguguacuccaccggcagcaauguguuucagaccagagccggcugucugaucggagccgagcacgugaacaauagcuacgagugcgacauccccaucggcgcuggaaucugcgccagcuaccagacacagacaaacagccaccggagagccagaagcguggccagccagagcaucauugccuacacaaugucucugggcgccgagaacagcguggccuacuccaacaacucuaucgcuauccccaucaacuucaccaucagcgugaccacagagauccugccuguguccaugaccaagaccagcguggacugcaccauguacaucugcggcgauuccaccgagugcuccaaccugcugcugcaguacggcagcuucugcacccagcugaauagagcccugacagggaucgccguggaacaggacaagaacacccaagagguguucgcccaagugaagcagaucuacaagaccccuccuaucaaggacuucggcggcuucaauuucagccagauucugcccgauccuagcaagcccagcaagcggagcuucaucgaggaccugcuguucaacaaagugacacuggccgacgccggcuucaucaagcaguauggcgauugucugggcgacauugccgccagggaucugauuugcgcccagaaguuuaacggacugacagugcugccuccucugcugaccgaugagaugaucgcccaguacacaucugcccugcuggccggcacaaucacaagcggcuggacauuuggagcaggcgccgcucugcagauccccuuugcuaugcagauggccuaccgguucaacggcaucggagugacccagaaugugcuguacgagaaccagaagcugaucgccaaccaguucaacagcgccaucggcaagauccaggacagccugagcagcacagcaagcgcccugggaaagcugcaggacguggucaaccagaaugcccaggcacugaacacccuggucaagcagcuguccuccaacuucggcgccaucagcucugugcugaacgauauccuggccagacuggacccuccugaggccgaggugcagaucgacagacugaucacaggcagacugcagagccuccagacauacgugacccagcagcugaucagagccgccgagauuagagccucugccaaucuggccgccaccaagaugucugagugugugcugggccagagcaagagaguggacuuuugcggcaagggcuaccaccugaugagcuucccucagucugccccucacggcgugguguuucugcacgugacauaugugcccgcucaagagaagaauuucaccaccgcuccagccaucugccacgacggcaaagcccacuuuccuagagaaggcguguucguguccaacggcacccauugguucgugacacagcggaacuucuacgagccccagaucaucaccacccacaacaccuucgugucuggcaacugcgacgucgugaucggcauugugaacaauaccguguacgacccucugcagcccgagcuggacagcuucaaagaggaacuggacaaguacuuuaagaaccacacaagccccgacguggaccugggcgauaucagcggaaucaaugccagcgucgugaacauccagaaagagaucgaccggcugaacgagguggccaagaaucugaacgagagccugaucgaccugcaagaacuggggaaguacgagcaguacaucaaguggcccugguacaucuggcugggcuuuaucgccggacugauugccaucgugauggucacaaucaugcuguguugcaugaccagcugcuguagcugccugaagggcuguuguagcuguggcagcugcugcaaguucgacgaggacgauucugagcccgugcugaagggcgugaaacugcacuacacaugaggacuagucccuguucccagagcccacuuuuuuuucuuuuuuugaaauaaaauagccugucuuucagaucuaaaaaaaaaaaaaaaaaaaaaaaaaaaaaaaaaaaaaaaaaaaaaaaaaaaaaaaaaaaaaaaaaaaaaaaaaaaaaaaaaaaaaaaaaaaaaaaaaaaa

SEQ ID NO: 25160 - RNA, 4167 nt, Artificial Sequence
  SARS-CoV-2/Wuhan/WIV05/2019__EPI_ISL_402128 spike protein mRNA gc mod (1-1273)(K986P_V987P_K986P_V987P_K417N_E484K_N501Y_D614G)
aggagagggcgcuuggcuugcaaggacccugagcugcggcauugaagcacacccaacccaacucgacugaagucagccucacugaaccggaucugagaaucuucucucucugggcuugccagggcucuccgaaccuagcuagcauccucuucaauuccaacuagaaagcuuaccauguucguguuccuggugcugcugccucugguguccagccagugugugaaccugaccaccagaacacagcugccuccagccuacaccaacagcuuuaccagaggcguguacuaccccgacaagguguucagauccagcgugcugcacucuacccaggaccuguuccugccuuucuucagcaacgugaccugguuccacgccauccacguguccggcaccaauggcaccaagagauucgacaaccccgugcugcccuucaacgacgggguguacuuugccagcaccgagaaguccaacaucaucagaggcuggaucuucggcaccacacuggacagcaagacccagagccugcugaucgugaacaacgccaccaacguggucaucaaagugugcgaguuccaguucugcaacgaccccuuccugggcgucuacuaccacaagaacaacaagagcuggauggaaagcgaguuccggguguacagcagcgccaacaacugcaccuucgaguacgugucccagccuuuccugauggaccuggaaggcaagcagggcaacuucaagaaccugcgcgaguucguguuuaagaacaucgacggcuacuucaagaucuacagcaagcacaccccuaucaaccucgugcgggaucugccucagggcuucucugcucuggaaccccugguggaucugcccaucggcaucaacaucacccgguuucagacacugcuggcccugcacagaagcuaccugacaccuggcgauagcagcagcggauggacagcuggugccgccgcuuacuaugugggcuaccugcagccuagaaccuuccugcugaaguacaacgagaacggcaccaucaccgacgccguggauugugcucuggauccucugagcgagacaaagugcacccugaaguccuucaccguggaaaagggcaucuaccagaccagcaacuuccgggugcagcccaccgaauccaucgugcgguuccccaauaucaccaaucugugccccuucggcgagguguucaaugccaccagauucgccucuguguacgccuggaaccggaagcggaucagcaauugcguggccgacuacuccgugcuguacaacuccgccagcuucagcaccuucaagugcuacggcguguccccuaccaagcugaacgaccugugcuucacaaacguguacgccgacagcuucgugauccggggagaugaagugcggcagauugccccuggacagacaggcaacaucgccgacuacaacuacaagcugcccgacgacuucaccggcugugugauugccuggaacagcaacaaccuggacuccaaagucggcggcaacuacaauuaccuguaccggcuguuccggaaguccaaucugaagcccuucgagcgggacaucuccaccgagaucuaucaggccggcagcaccccuuguaacggcgugaagggcuucaacugcuacuucccacugcaguccuacggcuuucagcccacauacggcgugggcuaucagcccuacagagugguggugcugagcuucgaacugcugcaugccccugccacagugugcggcccuaagaaaagcaccaaucucgugaagaacaaaugcgugaacuucaacuucaacggccugaccggcaccggcgugcugacagagagcaacaagaaguuccugccauuccagcaguuuggccgggauaucgccgauaccacagacgccguuagagauccccagacacuggaaauccuggacaucaccccuugcagcuucggcggagugucugugaucaccccuggcaccaacaccagcaaucagguggcagugcuguaccagggcgugaacuguaccgaagugcccguggccauucacgccgaucagcugacaccuacauggcggguguacuccaccggcagcaauguguuucagaccagagccggcugucugaucggagccgagcacgugaacaauagcuacgagugcgacauccccaucggcgcuggaaucugcgccagcuaccagacacagacaaacagcccucggagagccagaagcguggccagccagagcaucauugccuacacaaugucucugggcgccgagaacagcguggccuacuccaacaacucuaucgcuauccccaccaacuucaccaucagcgugaccacagagauccugccuguguccaugaccaagaccagcguggacugcaccauguacaucugcggcgauuccaccgagugcuccaaccugcugcugcaguacggcagcuucugcacccagcugaauagagcccugacagggaucgccguggaacaggacaagaacacccaagagguguucgcccaagugaagcagaucuacaagaccccuccuaucaaggacuucggcggcuucaauuucagccagauucugcccgauccuagcaagcccagcaagcggagcuucaucgaggaccugcuguucaacaaagugacacuggccgacgccggcuucaucaagcaguauggcgauugucugggcgacauugccgccagggaucugauuugcgcccagaaguuuaacggacugacagugcugccuccucugcugaccgaugagaugaucgcccaguacacaucugcccugcuggccggcacaaucacaagcggcuggacauuuggagcaggcgccgcucugcagauccccuuugcuaugcagauggccuaccgguucaacggcaucggagugacccagaaugugcuguacgagaaccagaagcugaucgccaaccaguucaacagcgccaucggcaagauccaggacagccugagcagcacagcaagcgcccugggaaagcugcaggacguggucaaccagaaugcccaggcacugaacacccuggucaagcagcuguccuccaacuucggcgccaucagcucugugcugaacgauauccugagcagacuggacccuccugaggccgaggugcagaucgacagacugaucacaggcagacugcagagccuccagacauacgugacccagcagcugaucagagccgccgagauuagagccucugccaaucuggccgccaccaagaugucugagugugugcugggccagagcaagagaguggacuuuugcggcaagggcuaccaccugaugagcuucccucagucugccccucacggcgugguguuucugcacgugacauaugugcccgcucaagagaagaauuucaccaccgcuccagccaucugccacgacggcaaagcccacuuuccuagagaaggcguguucguguccaacggcacccauugguucgugacacagcggaacuucuacgagccccagaucaucaccaccgacaacaccuucgugucuggcaacugcgacgucgugaucggcauugugaacaauaccguguacgacccucugcagcccgagcuggacagcuucaaagaggaacuggacaaguacuuuaagaaccacacaagccccgacguggaccugggcgauaucagcggaaucaaugccagcgucgugaacauccagaaagagaucgaccggcugaacgagguggccaagaaucugaacgagagccugaucgaccugcaagaacuggggaaguacgagcaguacaucaaguggcccugguacaucuggcugggcuuuaucgccggacugauugccaucgugauggucacaaucaugcuguguugcaugaccagcugcuguagcugccugaagggcuguuguagcuguggcagcugcugcaaguucgacgaggacgauucugagcccgugcugaagggcgugaaacugcacuacacaugaggacuagucccuguucccagagcccacuuuuuuuucuuuuuuugaaauaaaauagccugucuuucagaucuaaaaaaaaaaaaaaaaaaaaaaaaaaaaaaaaaaaaaaaaaaaaaaaaaaaaaaaaaaaaaaaaaaaaaaaaaaaaaaaaaaaaaaaaaaaaaaaaaaaa

SEQ ID NO: 25161 - RNA, 4158 nt, Artificial Sequence
  SARS-CoV-2/Wuhan/WIV05/2019__EPI_ISL_402128 spike protein mRNA gc mod (1-1273)(K986P_V987P_K986P_V987P_L18F_D80A_D215G_L242del_A243del_ L244del_R246I_K417N_E484K_N501Y_D614G_A701V)
aggagagggcgcuuggcuugcaaggacccugagcugcggcauugaagcacacccaacccaacucgacugaagucagccucacugaaccggaucugagaaucuucucucucugggcuugccagggcucuccgaaccuagcuagcauccucuucaauuccaacuagaaagcuuaccauguucguguuccuggugcugcugccucugguguccagccagugugugaacuucaccaccagaacacagcugccuccagccuacaccaacagcuuuaccagaggcguguacuaccccgacaagguguucagauccagcgugcugcacucuacccaggaccuguuccugccuuucuucagcaacgugaccugguuccacgccauccacguguccggcaccaauggcaccaagagauucgccaaccccgugcugcccuucaacgacgggguguacuuugccagcaccgagaaguccaacaucaucagaggcuggaucuucggcaccacacuggacagcaagacccagagccugcugaucgugaacaacgccaccaacguggucaucaaagugugcgaguuccaguucugcaacgaccccuuccugggcgucuacuaccacaagaacaacaagagcuggauggaaagcgaguuccggguguacagcagcgccaacaacugcaccuucgaguacgugucccagccuuuccugauggaccuggaaggcaagcagggcaacuucaagaaccugcgcgaguucguguuuaagaacaucgacggcuacuucaagaucuacagcaagcacaccccuaucaaccucgugcggggccugccucagggcuucucugcucuggaaccccugguggaucugcccaucggcaucaacaucacccgguuucagacacugcacaucagcuaccugacaccuggcgauagcagcagcggauggacagcuggugccgccgcuuacuaugugggcuaccugcagccuagaaccuuccugcugaaguacaacgagaacggcaccaucaccgacgccguggauugugcucuggauccucugagcgagacaaagugcacccugaaguccuucaccguggaaaagggcaucuaccagaccagcaacuuccgggugcagcccaccgaauccaucgugcgguuccccaauaucaccaaucugugccccuucggcgagguguucaaugccaccagauucgccucuguguacgccuggaaccggaagcggaucagcaauugcguggccgacuacuccgugcuguacaacuccgccagcuucagcaccuucaagugcuacggcguguccccuaccaagcugaacgaccugugcuucacaaacguguacgccgacagcuucgugauccggggagaugaagugcggcagauugccccuggacagacaggcaacaucgccgacuacaacuacaagcugcccgacgacuucaccggcugugugauugccuggaacagcaacaaccuggacuccaaagucggcggcaacuacaauuaccuguaccggcuguuccggaaguccaaucugaagcccuucgagcgggacaucuccaccgagaucuaucaggccggcagcaccccuuguaacggcgugaagggcuucaacugcuacuucccacugcaguccuacggcuuucagcccacauacggcgugggcuaucagcccuacagagugguggugcugagcuucgaacugcugcaugccccugccacagugugcggcccuaagaaaagcaccaaucucgugaagaacaaaugcgugaacuucaacuucaacggccugaccggcaccggcgugcugacagagagcaacaagaaguuccugccauuccagcaguuuggccgggauaucgccgauaccacagacgccguuagagauccccagacacuggaaauccuggacaucaccccuugcagcuucggcggagugucugugaucaccccuggcaccaacaccagcaaucagguggcagugcuguaccagggcgugaacuguaccgaagugcccguggccauucacgccgaucagcugacaccuacauggcggguguacuccaccggcagcaauguguuucagaccagagccggcugucugaucggagccgagcacgugaacaauagcuacgagugcgacauccccaucggcgcuggaaucugcgccagcuaccagacacagacaaacagcccucggagagccagaagcguggccagccagagcaucauugccuacacaaugucucugggcguggagaacagcguggccuacuccaacaacucuaucgcuauccccaccaacuucaccaucagcgugaccacagagauccugccuguguccaugaccaagaccagcguggacugcaccauguacaucugcggcgauuccaccgagugcuccaaccugcugcugcaguacggcagcuucugcacccagcugaauagagcccugacagggaucgccguggaacaggacaagaacacccaagagguguucgcccaagugaagcagaucuacaagaccccuccuaucaaggacuucggcggcuucaauuucagccagauucugcccgauccuagcaagcccagcaagcggagcuucaucgaggaccugcuguucaacaaagugacacuggccgacgccggcuucaucaagcaguauggcgauugucugggcgacauugccgccagggaucugauuugcgcccagaaguuuaacggacugacagugcugccuccucugcugaccgaugagaugaucgcccaguacacaucugcccugcuggccggcacaaucacaagcggcuggacauuuggagcaggcgccgcucugcagauccccuuugcuaugcagauggccuaccgguucaacggcaucggagugacccagaaugugcuguacgagaaccagaagcugaucgccaaccaguucaacagcgccaucggcaagauccaggacagccugagcagcacagcaagcgcccugggaaagcugcaggacguggucaaccagaaugcccaggcacugaacacccuggucaagcagcuguccuccaacuucggcgccaucagcucugugcugaacgauauccugagcagacuggacccuccugaggccgaggugcagaucgacagacugaucacaggcagacugcagagccuccagacauacgugacccagcagcugaucagagccgccgagauuagagccucugccaaucuggccgccaccaagaugucugagugugugcugggccagagcaagagaguggacuuuugcggcaagggcuaccaccugaugagcuucccucagucugccccucacggcgugguguuucugcacgugacauaugugcccgcucaagagaagaauuucaccaccgcuccagccaucugccacgacggcaaagcccacuuuccuagagaaggcguguucguguccaacggcacccauugguucgugacacagcggaacuucuacgagccccagaucaucaccaccgacaacaccuucgugucuggcaacugcgacgucgugaucggcauugugaacaauaccguguacgacccucugcagcccgagcuggacagcuucaaagaggaacuggacaaguacuuuaagaaccacacaagccccgacguggaccugggcgauaucagcggaaucaaugccagcgucgugaacauccagaaagagaucgaccggcugaacgagguggccaagaaucugaacgagagccugaucgaccugcaagaacuggggaaguacgagcaguacaucaaguggcccugguacaucuggcugggcuuuaucgccggacugauugccaucgugauggucacaaucaugcuguguugcaugaccagcugcuguagcugccugaagggcuguuguagcuguggcagcugcugcaaguucgacgaggacgauucugagcccgugcugaagggcgugaaacugcacuacacaugaggacuagucccuguucccagagcccacuuuuuuuucuuuuuuugaaauaaaauagccugucuuucagaucuaaaaaaaaaaaaaaaaaaaaaaaaaaaaaaaaaaaaaaaaaaaaaaaaaaaaaaaaaaaaaaaaaaaaaaaaaaaaaaaaaaaaaaaaaaaaaaaaaaaa

SEQ ID NO: 25162 - RNA, 4167 nt, Artificial Sequence
  SARS-CoV-2/Wuhan/WIV05/2019__EPI_ISL_402128 spike protein mRNA gc mod (1-1273)(K986P_V987P_K986P_V987P_E484K_D614G)
aggagagggcgcuuggcuugcaaggacccugagcugcggcauugaagcacacccaacccaacucgacugaagucagccucacugaaccggaucugagaaucuucucucucugggcuugccagggcucuccgaaccuagcuagcauccucuucaauuccaacuagaaagcuuaccauguucguguuccuggugcugcugccucugguguccagccagugugugaaccugaccaccagaacacagcugccuccagccuacaccaacagcuuuaccagaggcguguacuaccccgacaagguguucagauccagcgugcugcacucuacccaggaccuguuccugccuuucuucagcaacgugaccugguuccacgccauccacguguccggcaccaauggcaccaagagauucgacaaccccgugcugcccuucaacgacgggguguacuuugccagcaccgagaaguccaacaucaucagaggcuggaucuucggcaccacacuggacagcaagacccagagccugcugaucgugaacaacgccaccaacguggucaucaaagugugcgaguuccaguucugcaacgaccccuuccugggcgucuacuaccacaagaacaacaagagcuggauggaaagcgaguuccggguguacagcagcgccaacaacugcaccuucgaguacgugucccagccuuuccugauggaccuggaaggcaagcagggcaacuucaagaaccugcgcgaguucguguuuaagaacaucgacggcuacuucaagaucuacagcaagcacaccccuaucaaccucgugcgggaucugccucagggcuucucugcucuggaaccccugguggaucugcccaucggcaucaacaucacccgguuucagacacugcuggcccugcacagaagcuaccugacaccuggcgauagcagcagcggauggacagcuggugccgccgcuuacuaugugggcuaccugcagccuagaaccuuccugcugaaguacaacgagaacggcaccaucaccgacgccguggauugugcucuggauccucugagcgagacaaagugcacccugaaguccuucaccguggaaaagggcaucuaccagaccagcaacuuccgggugcagcccaccgaauccaucgugcgguuccccaauaucaccaaucugugccccuucggcgagguguucaaugccaccagauucgccucuguguacgccuggaaccggaagcggaucagcaauugcguggccgacuacuccgugcuguacaacuccgccagcuucagcaccuucaagugcuacggcguguccccuaccaagcugaacgaccugugcuucacaaacguguacgccgacagcuucgugauccggggagaugaagugcggcagauugccccuggacagacaggcaagaucgccgacuacaacuacaagcugcccgacgacuucaccggcugugugauugccuggaacagcaacaaccuggacuccaaagucggcggcaacuacaauuaccuguaccggcuguuccggaaguccaaucugaagcccuucgagcgggacaucuccaccgagaucuaucaggccggcagcaccccuuguaacggcgugaagggcuucaacugcuacuucccacugcaguccuacggcuuucagcccacaaauggcgugggcuaucagcccuacagagugguggugcugagcuucgaacugcugcaugccccugccacagugugcggcccuaagaaaagcaccaaucucgugaagaacaaaugcgugaacuucaacuucaacggccugaccggcaccggcgugcugacagagagcaacaagaaguuccugccauuccagcaguuuggccgggauaucgccgauaccacagacgccguuagagauccccagacacuggaaauccuggacaucaccccuugcagcuucggcggagugucugugaucaccccuggcaccaacaccagcaaucagguggcagugcuguaccagggcgugaacuguaccgaagugcccguggccauucacgccgaucagcugacaccuacauggcggguguacuccaccggcagcaauguguuucagaccagagccggcugucugaucggagccgagcacgugaacaauagcuacgagugcgacauccccaucggcgcuggaaucugcgccagcuaccagacacagacaaacagcccucggagagccagaagcguggccagccagagcaucauugccuacacaaugucucugggcgccgagaacagcguggccuacuccaacaacucuaucgcuauccccaccaacuucaccaucagcgugaccacagagauccugccuguguccaugaccaagaccagcguggacugcaccauguacaucugcggcgauuccaccgagugcuccaaccugcugcugcaguacggcagcuucugcacccagcugaauagagcccugacagggaucgccguggaacaggacaagaacacccaagagguguucgcccaagugaagcagaucuacaagaccccuccuaucaaggacuucggcggcuucaauuucagccagauucugcccgauccuagcaagcccagcaagcggagcuucaucgaggaccugcuguucaacaaagugacacuggccgacgccggcuucaucaagcaguauggcgauugucugggcgacauugccgccagggaucugauuugcgcccagaaguuuaacggacugacagugcugccuccucugcugaccgaugagaugaucgcccaguacacaucugcccugcuggccggcacaaucacaagcggcuggacauuuggagcaggcgccgcucugcagauccccuuugcuaugcagauggccuaccgguucaacggcaucggagugacccagaaugugcuguacgagaaccagaagcugaucgccaaccaguucaacagcgccaucggcaagauccaggacagccugagcagcacagcaagcgcccugggaaagcugcaggacguggucaaccagaaugcccaggcacugaacacccuggucaagcagcuguccuccaacuucggcgccaucagcucugugcugaacgauauccugagcagacuggacccuccugaggccgaggugcagaucgacagacugaucacaggcagacugcagagccuccagacauacgugacccagcagcugaucagagccgccgagauuagagccucugccaaucuggccgccaccaagaugucugagugugugcugggccagagcaagagaguggacuuuugcggcaagggcuaccaccugaugagcuucccucagucugccccucacggcgugguguuucugcacgugacauaugugcccgcucaagagaagaauuucaccaccgcuccagccaucugccacgacggcaaagcccacuuuccuagagaaggcguguucguguccaacggcacccauugguucgugacacagcggaacuucuacgagccccagaucaucaccaccgacaacaccuucgugucuggcaacugcgacgucgugaucggcauugugaacaauaccguguacgacccucugcagcccgagcuggacagcuucaaagaggaacuggacaaguacuuuaagaaccacacaagccccgacguggaccugggcgauaucagcggaaucaaugccagcgucgugaacauccagaaagagaucgaccggcugaacgagguggccaagaaucugaacgagagccugaucgaccugcaagaacuggggaaguacgagcaguacaucaaguggcccugguacaucuggcugggcuuuaucgccggacugauugccaucgugauggucacaaucaugcuguguugcaugaccagcugcuguagcugccugaagggcuguuguagcuguggcagcugcugcaaguucgacgaggacgauucugagcccgugcugaagggcgugaaacugcacuacacaugaggacuagucccuguucccagagcccacuuuuuuuucuuuuuuugaaauaaaauagccugucuuucagaucuaaaaaaaaaaaaaaaaaaaaaaaaaaaaaaaaaaaaaaaaaaaaaaaaaaaaaaaaaaaaaaaaaaaaaaaaaaaaaaaaaaaaaaaaaaaaaaaaaaaa

SEQ ID NO: 25163 - RNA, 4167 nt, Artificial Sequence
  SARS-CoV-2/Wuhan/WIV05/2019__EPI_ISL_402128 spike protein mRNA gc mod (1-1273)(K986P_V987P_K986P_V987P_L18F_T20N_P26S_D138Y_R190S_K417T _E484K_N501Y_D614G_H655Y_T1027I)
aggagagggcgcuuggcuugcaaggacccugagcugcggcauugaagcacacccaacccaacucgacugaagucagccucacugaaccggaucugagaaucuucucucucugggcuugccagggcucuccgaaccuagcuagcauccucuucaauuccaacuagaaagcuuaccauguucguguuccuggugcugcugccucugguguccagccagugugugaacuucaccaacagaacacagcugccuagcgccuacaccaacagcuuuaccagaggcguguacuaccccgacaagguguucagauccagcgugcugcacucuacccaggaccuguuccugccuuucuucagcaacgugaccugguuccacgccauccacguguccggcaccaauggcaccaagagauucgacaaccccgugcugcccuucaacgacgggguguacuuugccagcaccgagaaguccaacaucaucagaggcuggaucuucggcaccacacuggacagcaagacccagagccugcugaucgugaacaacgccaccaacguggucaucaaagugugcgaguuccaguucugcaacuaccccuuccugggcgucuacuaccacaagaacaacaagagcuggauggaaagcgaguuccggguguacagcagcgccaacaacugcaccuucgaguacgugucccagccuuuccugauggaccuggaaggcaagcagggcaacuucaagaaccugagcgaguucguguuuaagaacaucgacggcuacuucaagaucuacagcaagcacaccccuaucaaccucgugcgggaucugccucagggcuucucugcucuggaaccccugguggaucugcccaucggcaucaacaucacccgguuucagacacugcuggcccugcacagaagcuaccugacaccuggcgauagcagcagcggauggacagcuggugccgccgcuuacuaugugggcuaccugcagccuagaaccuuccugcugaaguacaacgagaacggcaccaucaccgacgccguggauugugcucuggauccucugagcgagacaaagugcacccugaaguccuucaccguggaaaagggcaucuaccagaccagcaacuuccgggugcagcccaccgaauccaucgugcgguuccccaauaucaccaaucugugccccuucggcgagguguucaaugccaccagauucgccucuguguacgccuggaaccggaagcggaucagcaauugcguggccgacuacuccgugcuguacaacuccgccagcuucagcaccuucaagugcuacggcguguccccuaccaagcugaacgaccugugcuucacaaacguguacgccgacagcuucgugauccggggagaugaagugcggcagauugccccuggacagacaggcaccaucgccgacuacaacuacaagcugcccgacgacuucaccggcugugugauugccuggaacagcaacaaccuggacuccaaagucggcggcaacuacaauuaccuguaccggcuguuccggaaguccaaucugaagcccuucgagcgggacaucuccaccgagaucuaucaggccggcagcaccccuuguaacggcgugaagggcuucaacugcuacuucccacugcaguccuacggcuuucagcccacauacggcgugggcuaucagcccuacagagugguggugcugagcuucgaacugcugcaugccccugccacagugugcggcccuaagaaaagcaccaaucucgugaagaacaaaugcgugaacuucaacuucaacggccugaccggcaccggcgugcugacagagagcaacaagaaguuccugccauuccagcaguuuggccgggauaucgccgauaccacagacgccguuagagauccccagacacuggaaauccuggacaucaccccuugcagcuucggcggagugucugugaucaccccuggcaccaacaccagcaaucagguggcagugcuguaccagggcgugaacuguaccgaagugcccguggccauucacgccgaucagcugacaccuacauggcggguguacuccaccggcagcaauguguuucagaccagagccggcugucugaucggagccgaguacgugaacaauagcuacgagugcgacauccccaucggcgcuggaaucugcgccagcuaccagacacagacaaacagcccucggagagccagaagcguggccagccagagcaucauugccuacacaaugucucugggcgccgagaacagcguggccuacuccaacaacucuaucgcuauccccaccaacuucaccaucagcgugaccacagagauccugccuguguccaugaccaagaccagcguggacugcaccauguacaucugcggcgauuccaccgagugcuccaaccugcugcugcaguacggcagcuucugcacccagcugaauagagcccugacagggaucgccguggaacaggacaagaacacccaagagguguucgcccaagugaagcagaucuacaagaccccuccuaucaaggacuucggcggcuucaauuucagccagauucugcccgauccuagcaagcccagcaagcggagcuucaucgaggaccugcuguucaacaaagugacacuggccgacgccggcuucaucaagcaguauggcgauugucugggcgacauugccgccagggaucugauuugcgcccagaaguuuaacggacugacagugcugccuccucugcugaccgaugagaugaucgcccaguacacaucugcccugcuggccggcacaaucacaagcggcuggacauuuggagcaggcgccgcucugcagauccccuuugcuaugcagauggccuaccgguucaacggcaucggagugacccagaaugugcuguacgagaaccagaagcugaucgccaaccaguucaacagcgccaucggcaagauccaggacagccugagcagcacagcaagcgcccugggaaagcugcaggacguggucaaccagaaugcccaggcacugaacacccuggucaagcagcuguccuccaacuucggcgccaucagcucugugcugaacgauauccugagcagacuggacccuccugaggccgaggugcagaucgacagacugaucacaggcagacugcagagccuccagacauacgugacccagcagcugaucagagccgccgagauuagagccucugccaaucuggccgccaucaagaugucugagugugugcugggccagagcaagagaguggacuuuugcggcaagggcuaccaccugaugagcuucccucagucugccccucacggcgugguguuucugcacgugacauaugugcccgcucaagagaagaauuucaccaccgcuccagccaucugccacgacggcaaagcccacuuuccuagagaaggcguguucguguccaacggcacccauugguucgugacacagcggaacuucuacgagccccagaucaucaccaccgacaacaccuucgugucuggcaacugcgacgucgugaucggcauugugaacaauaccguguacgacccucugcagcccgagcuggacagcuucaaagaggaacuggacaaguacuuuaagaaccacacaagccccgacguggaccugggcgauaucagcggaaucaaugccagcgucgugaacauccagaaagagaucgaccggcugaacgagguggccaagaaucugaacgagagccugaucgaccugcaagaacuggggaaguacgagcaguacaucaaguggcccugguacaucuggcugggcuuuaucgccggacugauugccaucgugauggucacaaucaugcuguguugcaugaccagcugcuguagcugccugaagggcuguuguagcuguggcagcugcugcaaguucgacgaggacgauucugagcccgugcugaagggcgugaaacugcacuacacaugaggacuagucccuguucccagagcccacuuuuuuuucuuuuuuugaaauaaaauagccugucuuucagaucuaaaaaaaaaaaaaaaaaaaaaaaaaaaaaaaaaaaaaaaaaaaaaaaaaaaaaaaaaaaaaaaaaaaaaaaaaaaaaaaaaaaaaaaaaaaaaaaaaaaa

SEQ ID NO: 25164 - RNA, 4167 nt, Artificial Sequence
  SARS-CoV-2/Wuhan/WIV05/2019__EPI_ISL_402128 spike protein mRNA gc mod (1-1273)(K986P_V987P_K986P_V987P_S13I_W152C_L452R_D614G)
aggagagggcgcuuggcuugcaaggacccugagcugcggcauugaagcacacccaacccaacucgacugaagucagccucacugaaccggaucugagaaucuucucucucugggcuugccagggcucuccgaaccuagcuagcauccucuucaauuccaacuagaaagcuuaccauguucguguuccuggugcugcugccucugguguccauccagugugugaaccugaccaccagaacacagcugccuccagccuacaccaacagcuuuaccagaggcguguacuaccccgacaagguguucagauccagcgugcugcacucuacccaggaccuguuccugccuuucuucagcaacgugaccugguuccacgccauccacguguccggcaccaauggcaccaagagauucgacaaccccgugcugcccuucaacgacgggguguacuuugccagcaccgagaaguccaacaucaucagaggcuggaucuucggcaccacacuggacagcaagacccagagccugcugaucgugaacaacgccaccaacguggucaucaaagugugcgaguuccaguucugcaacgaccccuuccugggcgucuacuaccacaagaacaacaagagcugcauggaaagcgaguuccggguguacagcagcgccaacaacugcaccuucgaguacgugucccagccuuuccugauggaccuggaaggcaagcagggcaacuucaagaaccugcgcgaguucguguuuaagaacaucgacggcuacuucaagaucuacagcaagcacaccccuaucaaccucgugcgggaucugccucagggcuucucugcucuggaaccccugguggaucugcccaucggcaucaacaucacccgguuucagacacugcuggcccugcacagaagcuaccugacaccuggcgauagcagcagcggauggacagcuggugccgccgcuuacuaugugggcuaccugcagccuagaaccuuccugcugaaguacaacgagaacggcaccaucaccgacgccguggauugugcucuggauccucugagcgagacaaagugcacccugaaguccuucaccguggaaaagggcaucuaccagaccagcaacuuccgggugcagcccaccgaauccaucgugcgguuccccaauaucaccaaucugugccccuucggcgagguguucaaugccaccagauucgccucuguguacgccuggaaccggaagcggaucagcaauugcguggccgacuacuccgugcuguacaacuccgccagcuucagcaccuucaagugcuacggcguguccccuaccaagcugaacgaccugugcuucacaaacguguacgccgacagcuucgugauccggggagaugaagugcggcagauugccccuggacagacaggcaagaucgccgacuacaacuacaagcugcccgacgacuucaccggcugugugauugccuggaacagcaacaaccuggacuccaaagucggcggcaacuacaauuaccgcuaccggcuguuccggaaguccaaucugaagcccuucgagcgggacaucuccaccgagaucuaucaggccggcagcaccccuuguaacggcguggaaggcuucaacugcuacuucccacugcaguccuacggcuuucagcccacaaauggcgugggcuaucagcccuacagagugguggugcugagcuucgaacugcugcaugccccugccacagugugcggcccuaagaaaagcaccaaucucgugaagaacaaaugcgugaacuucaacuucaacggccugaccggcaccggcgugcugacagagagcaacaagaaguuccugccauuccagcaguuuggccgggauaucgccgauaccacagacgccguuagagauccccagacacuggaaauccuggacaucaccccuugcagcuucggcggagugucugugaucaccccuggcaccaacaccagcaaucagguggcagugcuguaccagggcgugaacuguaccgaagugcccguggccauucacgccgaucagcugacaccuacauggcggguguacuccaccggcagcaauguguuucagaccagagccggcugucugaucggagccgagcacgugaacaauagcuacgagugcgacauccccaucggcgcuggaaucugcgccagcuaccagacacagacaaacagcccucggagagccagaagcguggccagccagagcaucauugccuacacaaugucucugggcgccgagaacagcguggccuacuccaacaacucuaucgcuauccccaccaacuucaccaucagcgugaccacagagauccugccuguguccaugaccaagaccagcguggacugcaccauguacaucugcggcgauuccaccgagugcuccaaccugcugcugcaguacggcagcuucugcacccagcugaauagagcccugacagggaucgccguggaacaggacaagaacacccaagagguguucgcccaagugaagcagaucuacaagaccccuccuaucaaggacuucggcggcuucaauuucagccagauucugcccgauccuagcaagcccagcaagcggagcuucaucgaggaccugcuguucaacaaagugacacuggccgacgccggcuucaucaagcaguauggcgauugucugggcgacauugccgccagggaucugauuugcgcccagaaguuuaacggacugacagugcugccuccucugcugaccgaugagaugaucgcccaguacacaucugcccugcuggccggcacaaucacaagcggcuggacauuuggagcaggcgccgcucugcagauccccuuugcuaugcagauggccuaccgguucaacggcaucggagugacccagaaugugcuguacgagaaccagaagcugaucgccaaccaguucaacagcgccaucggcaagauccaggacagccugagcagcacagcaagcgcccugggaaagcugcaggacguggucaaccagaaugcccaggcacugaacacccuggucaagcagcuguccuccaacuucggcgccaucagcucugugcugaacgauauccugagcagacuggacccuccugaggccgaggugcagaucgacagacugaucacaggcagacugcagagccuccagacauacgugacccagcagcugaucagagccgccgagauuagagccucugccaaucuggccgccaccaagaugucugagugugugcugggccagagcaagagaguggacuuuugcggcaagggcuaccaccugaugagcuucccucagucugccccucacggcgugguguuucugcacgugacauaugugcccgcucaagagaagaauuucaccaccgcuccagccaucugccacgacggcaaagcccacuuuccuagagaaggcguguucguguccaacggcacccauugguucgugacacagcggaacuucuacgagccccagaucaucaccaccgacaacaccuucgugucuggcaacugcgacgucgugaucggcauugugaacaauaccguguacgacccucugcagcccgagcuggacagcuucaaagaggaacuggacaaguacuuuaagaaccacacaagccccgacguggaccugggcgauaucagcggaaucaaugccagcgucgugaacauccagaaagagaucgaccggcugaacgagguggccaagaaucugaacgagagccugaucgaccugcaagaacuggggaaguacgagcaguacaucaaguggcccugguacaucuggcugggcuuuaucgccggacugauugccaucgugauggucacaaucaugcuguguugcaugaccagcugcuguagcugccugaagggcuguuguagcuguggcagcugcugcaaguucgacgaggacgauucugagcccgugcugaagggcgugaaacugcacuacacaugaggacuagucccuguucccagagcccacuuuuuuuucuuuuuuugaaauaaaauagccugucuuucagaucuaaaaaaaaaaaaaaaaaaaaaaaaaaaaaaaaaaaaaaaaaaaaaaaaaaaaaaaaaaaaaaaaaaaaaaaaaaaaaaaaaaaaaaaaaaaaaaaaaaaa

SEQ ID NO: 25165 - RNA, 1435 nt, Artificial Sequence
  SARS-CoV-2/Wuhan/WIV05/2019__EPI_ISL_402128 spike protein mRNA gc (1-15,334-528) Ferritin construct
aggagacccgugacccggaaguuguacggcuacgcgacuuucccucccacaaacccucgcgcccuuccuuuccuacuugggcccggcagaaagcuuaccauguucguguuccugguccuccugccccuggugagcucccagugcaaccugugccccuucggcgagguguucaacgccacccgguucgccagcgucuacgccuggaaccgcaagcggaucuccaacugcguggcggacuacagcgugcuguacaacuccgccagcuucuccacguucaagugcuacggcgucagccccaccaagcucaacgaccugugcuucaccaacguguacgccgacuccuucgugauccgcggggacgagguccggcagaucgcccccggccagaccgggaagaucgccgacuacaacuacaagcugccggacgacuucacgggcugcgugaucgcguggaacagcaacaaccucgacuccaaggucgggggcaacuacaacuaccuguaccgccuguuccgcaagagcaaccucaagcccuucgagcgggacaucuccaccgagaucuaccaggccggcagcacccccugcaacgggguggagggcuucaacugcuacuucccccugcaguccuacggguuccagccgaccaacggcgugggguaccagcccuaccggguggucgugcugagcuucgagcuccugcacgcccccgccacggugugcggccccaagggcggggguggaagcggcggggguggaagugacaucaucaagcuccugaacgagcaggucaacaaggagaugcaguccagcaaccuguacauguccaugagcuccuggugcuacacccacagccucgacggcgccgggcuguuccuguucgaccacgccgcggaggaguacgagcacgccaagaagcucaucaucuuccugaacgagaacaacgugcccgugcagcugaccuccaucagcgccccggagcacaaguucgagggccucacgcagaucuuccagaaggccuacgagcacgagcagcacaucuccgagagcaucaacaacaucguggaccacgccaucaaguccaaggaccacgcgaccuucaacuuccugcagugguacgucgccgagcagcacgaggaggaggugcuguucaaggacauccucgacaagaucgagcugaucgggaacgagaaccacggccuguaccucgccgaccaguacgugaaggggaucgccaagagccgcaaguccugaggacuaguguccaccugucccuccugggcugcuggauugucucguuuuccugccaaauaaacaggaucagcgcuuuacagaucuaaaaaaaaaaaaaaaaaaaaaaaaaaaaaaaaaaaaaaaaaaaaaaaaaaaaaaaaaaaaaaaaaaaaaaaaaaaaaaaaaaaaaaaaaaaaaaaaaaaa

SEQ ID NO: 25166 - RNA, 1033 nt, Artificial Sequence
  SARS-CoV-2/Wuhan/WIV05/2019__EPI_ISL_402128 spike protein mRNA gc (334-528) Foldon construct
aggagacccgugacccggaaguuguacggcuacgcgacuuucccucccacaaacccucgcgcccuuccuuuccuacuugggcccggcagaaagcuuaccaugcccaugggcagccugcagccgcucgccacccuguaccugcucgggaugcugguggccuccguccuggcgaaccugugccccuucggcgagguguucaacgccacccgguucgccagcgucuacgccuggaaccgcaagcggaucuccaacugcguggcggacuacagcgugcuguacaacuccgccagcuucuccacguucaagugcuacggcgucagccccaccaagcucaacgaccugugcuucaccaacguguacgccgacuccuucgugauccgcggggacgagguccggcagaucgcccccggccagaccgggaagaucgccgacuacaacuacaagcugccggacgacuucacgggcugcgugaucgcguggaacagcaacaaccucgacuccaaggucgggggcaacuacaacuaccuguaccgccuguuccgcaagagcaaccucaagcccuucgagcgggacaucuccaccgagaucuaccaggccggcagcacccccugcaacgggguggagggcuucaacugcuacuucccccugcaguccuacggguuccagccgaccaacggcgugggguaccagcccuaccggguggucgugcugagcuucgagcuccugcacgcccccgccacggugugcggccccaagggcagcggcggguacauccccgaggccccgcgcgacggccaggccuacgugcggaaggacggcgaguggguccugcugagcaccuuccucugaggacuaguguccaccugucccuccugggcugcuggauugucucguuuuccugccaaauaaacaggaucagcgcuuuacagaucuaaaaaaaaaaaaaaaaaaaaaaaaaaaaaaaaaaaaaaaaaaaaaaaaaaaaaaaaaaaaaaaaaaaaaaaaaaaaaaaaaaaaaaaaaaaaaaaaaaaa

SEQ ID NO: 25167 - RNA, 1411 nt, Artificial Sequence
  SARS-CoV-2/Wuhan/WIV05/2019__EPI_ISL_402128 spike protein mRNA gc (1-15,334-528) LumSynth construct
aggagacccgugacccggaaguuguacggcuacgcgacuuucccucccacaaacccucgcgcccuuccuuuccuacuugggcccggcagaaagcuuaccauguucguguuccugguccuccugccccuggugagcucccagugcaaccugugccccuucggcgagguguucaacgccacccgguucgccagcgucuacgccuggaaccgcaagcggaucuccaacugcguggcggacuacagcgugcuguacaacuccgccagcuucuccacguucaagugcuacggcgucagccccaccaagcucaacgaccugugcuucaccaacguguacgccgacuccuucgugauccgcggggacgagguccggcagaucgcccccggccagaccgggaagaucgccgacuacaacuacaagcugccggacgacuucacgggcugcgugaucgcguggaacagcaacaaccucgacuccaaggucgggggcaacuacaacuaccuguaccgccuguuccgcaagagcaaccucaagcccuucgagcgggacaucuccaccgagaucuaccaggccggcagcacccccugcaacgggguggagggcuucaacugcuacuucccccugcaguccuacggguuccagccgaccaacggcgugggguaccagcccuaccggguggucgugcugagcuucgagcuccugcacgcccccgccacggugugcggccccaagggcggcggcggcuccggaggcggagguagcgggggacagaucuacgagggcaagcugaccgccgaggggcuccgcuucggcaucguggccagccgguucaaccacgcgcuggucgaccgccugguggagggggccaucgacgccaucgugcggcacggcgggcgcgaggaggacaucacccucguccgggugcccggcuccugggagaucccgguggccgccggcgagcuggcccgcaaggaggacaucgacgcggucaucgccaucggggugcugauccggggcgccacgccccacuucgacuacaucgccagcgagguguccaaggggcucgcggaccugagccuggagcuccgcaagcccaucaccuucggcgucaucaccgccgacacccuggagcaggccaucgagcgggccgggacgaagcacggcaacaagggcugggaggccgcgcuguccgccaucgagauggccaaccucuucaagagccugcgcugaggacuaguguccaccugucccuccugggcugcuggauugucucguuuuccugccaaauaaacaggaucagcgcuuuacagaucuaaaaaaaaaaaaaaaaaaaaaaaaaaaaaaaaaaaaaaaaaaaaaaaaaaaaaaaaaaaaaaaaaaaaaaaaaaaaaaaaaaaaaaaaaaaaaaaaaaaa

SEQ ID NO: 25168 - RNA, 1372 nt, Artificial Sequence
  SARS-CoV-2/Wuhan/WIV05/2019__EPI_ISL_402128 spike protein mRNA gc (334-528) LumSynth construct
aggagacccgugacccggaaguuguacggcuacgcgacuuucccucccacaaacccucgcgcccuuccuuuccuacuugggcccggcagaaagcuuaccaugcagaucuacgagggcaagcugaccgccgaggggcuccgcuucggcaucguggccagccgguucaaccacgcgcuggucgaccgccugguggagggggccaucgacgccaucgugcggcacggcgggcgcgaggaggacaucacccucguccgggugcccggcuccugggagaucccgguggccgccggcgagcuggcccgcaaggaggacaucgacgcggucaucgccaucggggugcugauccggggcgccacgccccacuucgacuacaucgccagcgagguguccaaggggcucgcggaccugagccuggagcuccgcaagcccaucaccuucggcgucaucaccgccgacacccuggagcaggccaucgagcgggccgggacgaagcacggcaacaagggcugggaggccgcgcuguccgccaucgagauggccaaccucuucaagagccugcgcggcgggggcgggagcggcgggggcggcuccgggggcgggaaccugugccccuucggcgagguguucaacgccacccgguucgccagcgucuacgccuggaaccgcaagcggaucuccaacugcguggcggacuacagcgugcuguacaacuccgccagcuucuccacguucaagugcuacggcgucagccccaccaagcucaacgaccugugcuucaccaacguguacgccgacuccuucgugauccgcggggacgagguccggcagaucgcccccggccagaccgggaagaucgccgacuacaacuacaagcugccggacgacuucacgggcugcgugaucgcguggaacagcaacaaccucgacuccaaggucgggggcaacuacaacuaccuguaccgccuguuccgcaagagcaaccucaagcccuucgagcgggacaucuccaccgagaucuaccaggccggcagcacccccugcaacgggguggagggcuucaacugcuacuucccccugcaguccuacggguuccagccgaccaacggcgugggguaccagcccuaccggguggucgugcugagcuucgagcuccugcacgcccccgccacggugugcggccccaagugaggacuaguguccaccugucccuccugggcugcuggauugucucguuuuccugccaaauaaacaggaucagcgcuuuacagaucuaaaaaaaaaaaaaaaaaaaaaaaaaaaaaaaaaaaaaaaaaaaaaaaaaaaaaaaaaaaaaaaaaaaaaaaaaaaaaaaaaaaaaaaaaaaaaaaaaaaa

SEQ ID NO: 25169 - RNA, 4105 nt, Artificial Sequence
  SARS-CoV-2/Wuhan/WIV05/2019__EPI_ISL_402128 spike protein mRNA gc (1-1273)
aggagacccgugacccggaaguuguacggcuacgcgacuuucccucccacaaacccucgcgcccuuccuuuccuacuugggcccggcagaaagcuuaccauguucguguuccugguccuccugccccuggugagcucccagugcgugaaccucaccacccgcacgcagcugccgcccgccuacaccaacagcuucacccggggcgucuacuaccccgacaagguguuccgcuccagcgugcugcacuccacccaggaccucuuccugcccuucuucagcaacgucacgugguuccacgccauccacguguccgggaccaacggcaccaagcgguucgacaacccggugcugcccuucaacgacggggucuacuucgcgagcaccgagaaguccaacaucauccgcggcuggaucuucgggacgacccucgacagcaagacccagucccugcugaucgugaacaacgccaccaacguggucaucaaggugugcgaguuccaguucugcaacgaccccuuccucggcguguacuaccacaagaacaacaagagcuggauggaguccgaguuccgggucuacagcuccgccaacaacugcacguucgaguacgugagccagcccuuccugauggaccuggagggcaagcaggggaacuucaagaaccuccgcgaguucguguucaagaacaucgacggcuacuucaagaucuacuccaagcacaccccgaucaaccugguccgggaccugccccagggguucagcgcccucgagccccugguggaccugcccaucggcaucaacaucacccgcuuccagacccuccuggcccugcaccgguccuaccucacgccgggggacagcagcuccggcuggaccgcgggcgccgccgccuacuacgugggguaccugcagccccgcaccuuccugcucaaguacaacgagaacggcaccaucacggacgcggucgacugcgcccuggacccccugagcgagaccaagugcacccucaaguccuucaccguggagaaggggaucuaccagacgagcaacuuccgggugcagcccaccgaguccaucguccgcuucccgaacaucaccaaccugugccccuucggcgagguguucaacgccacccgguucgccagcgucuacgccuggaaccgcaagcggaucuccaacugcguggcggacuacagcgugcuguacaacuccgccagcuucuccacguucaagugcuacggcgucagccccaccaagcucaacgaccugugcuucaccaacguguacgccgacuccuucgugauccgcggggacgagguccggcagaucgcccccggccagaccgggaagaucgccgacuacaacuacaagcugccggacgacuucacgggcugcgugaucgcguggaacagcaacaaccucgacuccaaggucgggggcaacuacaacuaccuguaccgccuguuccgcaagagcaaccucaagcccuucgagcgggacaucuccaccgagaucuaccaggccggcagcacccccugcaacgggguggagggcuucaacugcuacuucccccugcaguccuacggguuccagccgaccaacggcgugggguaccagcccuaccggguggucgugcugagcuucgagcuccugcacgcccccgccacggugugcggccccaagaaguccaccaaccuggucaagaacaagugcgugaacuucaacuucaacggccucaccgggaccggcgugcugaccgagagcaacaagaaguuccugccguuccagcaguucgggcgcgacaucgccgacacgaccgacgcgguccgcgacccccagacccuggagauccucgacaucacccccugcagcuucggcgggguguccgugaucacgccgggcaccaacaccagcaaccaggucgccgugcuguaccaggacgugaacugcaccgagguccccguggccauccacgccgaccagcugacgcccaccuggcggguguacuccaccggcagcaacgucuuccagacccgcgccgggugccucaucggcgcggagcacgugaacaacuccuacgagugcgacauccccaucggggccggcaucugcgccagcuaccagacgcagaccaacuccccgcggcgcgcccggagcguggcgucccagagcaucaucgccuacaccaugucccugggcgccgagaacagcgucgccuacuccaacaacagcaucgccauccccaccaacuucacgaucuccgugaccaccgagauccugcccgugagcaugaccaagacgagcgucgacugcaccauguacaucugcggggacuccaccgagugcagcaaccuccugcugcaguacggcuccuucugcacccagcucaaccgcgcgcugacggggaucgccguggagcaggacaagaacacccaggagguguucgcccaggucaagcagaucuacaagacgcccccgaucaaggacuucggcggguucaacuucagccagauccugcccgaccccuccaagcccagcaagcgguccuucaucgaggaccuccuguucaacaaggugacccuggccgacgccggcuucaucaagcaguacggcgacugccucggggacaucgcggcccgcgaccugaucugcgcccagaaguucaacggccugaccgugcucccgccccugcugaccgacgagaugaucgcccaguacaccagcgcccuccuggcggggaccaucacguccggcuggaccuucggggccggcgccgcccugcagauccccuucgcgaugcagauggccuaccgguucaacggcaucggggucacccagaacgugcucuacgagaaccagaagcugaucgccaaccaguucaacagcgccaucggcaagauccaggacucccugagcuccaccgccagcgcgcucgggaagcugcaggacguggucaaccagaacgcccaggcccugaacacgcucgugaagcagcuguccagcaacuucggcgccaucuccagcgugcugaacgacauccucucccgccuggacaaggucgaggccgaggugcagaucgaccggcugaucaccgggcgccuccagagccugcagaccuacgugacccagcagcugauccgggcggccgagauccgcgccagcgccaaccucgccgcgaccaagauguccgagugcguccugggccagagcaagcggguggacuucugcggcaagggguaccaccugauguccuucccccagagcgccccgcacggcguggucuuccuccacgugacguacguccccgcccaggagaagaacuucaccaccgcccccgcgaucugccacgacgggaaggcccacuucccccgcgagggcguguucguguccaacgggacccacugguucgucacgcagcggaacuucuacgagccgcagaucaucaccaccgacaacaccuucgugagcggcaacugcgacguggucaucggcaucgugaacaacacgguguacgacccccugcagcccgagcuggacuccuucaaggaggagcucgacaaguacuucaagaaccacaccagccccgacgucgaccugggggacaucuccggcaucaacgccagcguggugaacauccagaaggagaucgaccgccugaacgaggucgccaagaaccucaacgagucccugaucgaccugcaggagcucgggaaguacgagcaguacaucaaguggccgugguacaucuggcugggcuucaucgccggccugaucgcgaucgugauggugaccaucaugcucugcugcaugaccagcugcugcuccugccugaaggggugcugcagcugcggcuccugcugcaaguucgacgaggacgacagcgagcccguccugaagggggugaagcuccacuacacgugaggacuaguguccaccugucccuccugggcugcuggauugucucguuuuccugccaaauaaacaggaucagcgcuuuacagaucuaaaaaaaaaaaaaaaaaaaaaaaaaaaaaaaaaaaaaaaaaaaaaaaaaaaaaaaaaaaaaaaaaaaaaaaaaaaaaaaaaaaaaaaaaaaaaaaaaaaa

SEQ ID NO: 25170 - RNA, 4105 nt, Artificial Sequence
  SARS-CoV-2/Wuhan/WIV05/2019__EPI_ISL_402128 spike protein mRNA gc (1-1273)(D614G)
aggagacccgugacccggaaguuguacggcuacgcgacuuucccucccacaaacccucgcgcccuuccuuuccuacuugggcccggcagaaagcuuaccauguucguguuccugguccuccugccccuggugagcucccagugcgugaaccucaccacccgcacgcagcugccgcccgccuacaccaacagcuucacccggggcgucuacuaccccgacaagguguuccgcuccagcgugcugcacuccacccaggaccucuuccugcccuucuucagcaacgucacgugguuccacgccauccacguguccgggaccaacggcaccaagcgguucgacaacccggugcugcccuucaacgacggggucuacuucgcgagcaccgagaaguccaacaucauccgcggcuggaucuucgggacgacccucgacagcaagacccagucccugcugaucgugaacaacgccaccaacguggucaucaaggugugcgaguuccaguucugcaacgaccccuuccucggcguguacuaccacaagaacaacaagagcuggauggaguccgaguuccgggucuacagcuccgccaacaacugcacguucgaguacgugagccagcccuuccugauggaccuggagggcaagcaggggaacuucaagaaccuccgcgaguucguguucaagaacaucgacggcuacuucaagaucuacuccaagcacaccccgaucaaccugguccgggaccugccccagggguucagcgcccucgagccccugguggaccugcccaucggcaucaacaucacccgcuuccagacccuccuggcccugcaccgguccuaccucacgccgggggacagcagcuccggcuggaccgcgggcgccgccgccuacuacgugggguaccugcagccccgcaccuuccugcucaaguacaacgagaacggcaccaucacggacgcggucgacugcgcccuggacccccugagcgagaccaagugcacccucaaguccuucaccguggagaaggggaucuaccagacgagcaacuuccgggugcagcccaccgaguccaucguccgcuucccgaacaucaccaaccugugccccuucggcgagguguucaacgccacccgguucgccagcgucuacgccuggaaccgcaagcggaucuccaacugcguggcggacuacagcgugcuguacaacuccgccagcuucuccacguucaagugcuacggcgucagccccaccaagcucaacgaccugugcuucaccaacguguacgccgacuccuucgugauccgcggggacgagguccggcagaucgcccccggccagaccgggaagaucgccgacuacaacuacaagcugccggacgacuucacgggcugcgugaucgcguggaacagcaacaaccucgacuccaaggucgggggcaacuacaacuaccuguaccgccuguuccgcaagagcaaccucaagcccuucgagcgggacaucuccaccgagaucuaccaggccggcagcacccccugcaacgggguggagggcuucaacugcuacuucccccugcaguccuacggguuccagccgaccaacggcgugggguaccagcccuaccggguggucgugcugagcuucgagcuccugcacgcccccgccacggugugcggccccaagaaguccaccaaccuggucaagaacaagugcgugaacuucaacuucaacggccucaccgggaccggcgugcugaccgagagcaacaagaaguuccugccguuccagcaguucgggcgcgacaucgccgacacgaccgacgcgguccgcgacccccagacccuggagauccucgacaucacccccugcagcuucggcgggguguccgugaucacgccgggcaccaacaccagcaaccaggucgccgugcuguaccagggcgugaacugcaccgagguccccguggccauccacgccgaccagcugacgcccaccuggcggguguacuccaccggcagcaacgucuuccagacccgcgccgggugccucaucggcgcggagcacgugaacaacuccuacgagugcgacauccccaucggggccggcaucugcgccagcuaccagacgcagaccaacuccccgcggcgcgcccggagcguggcgucccagagcaucaucgccuacaccaugucccugggcgccgagaacagcgucgccuacuccaacaacagcaucgccauccccaccaacuucacgaucuccgugaccaccgagauccugcccgugagcaugaccaagacgagcgucgacugcaccauguacaucugcggggacuccaccgagugcagcaaccuccugcugcaguacggcuccuucugcacccagcucaaccgcgcgcugacggggaucgccguggagcaggacaagaacacccaggagguguucgcccaggucaagcagaucuacaagacgcccccgaucaaggacuucggcggguucaacuucagccagauccugcccgaccccuccaagcccagcaagcgguccuucaucgaggaccuccuguucaacaaggugacccuggccgacgccggcuucaucaagcaguacggcgacugccucggggacaucgcggcccgcgaccugaucugcgcccagaaguucaacggccugaccgugcucccgccccugcugaccgacgagaugaucgcccaguacaccagcgcccuccuggcggggaccaucacguccggcuggaccuucggggccggcgccgcccugcagauccccuucgcgaugcagauggccuaccgguucaacggcaucggggucacccagaacgugcucuacgagaaccagaagcugaucgccaaccaguucaacagcgccaucggcaagauccaggacucccugagcuccaccgccagcgcgcucgggaagcugcaggacguggucaaccagaacgcccaggcccugaacacgcucgugaagcagcuguccagcaacuucggcgccaucuccagcgugcugaacgacauccucucccgccuggacaaggucgaggccgaggugcagaucgaccggcugaucaccgggcgccuccagagccugcagaccuacgugacccagcagcugauccgggcggccgagauccgcgccagcgccaaccucgccgcgaccaagauguccgagugcguccugggccagagcaagcggguggacuucugcggcaagggguaccaccugauguccuucccccagagcgccccgcacggcguggucuuccuccacgugacguacguccccgcccaggagaagaacuucaccaccgcccccgcgaucugccacgacgggaaggcccacuucccccgcgagggcguguucguguccaacgggacccacugguucgucacgcagcggaacuucuacgagccgcagaucaucaccaccgacaacaccuucgugagcggcaacugcgacguggucaucggcaucgugaacaacacgguguacgacccccugcagcccgagcuggacuccuucaaggaggagcucgacaaguacuucaagaaccacaccagccccgacgucgaccugggggacaucuccggcaucaacgccagcguggugaacauccagaaggagaucgaccgccugaacgaggucgccaagaaccucaacgagucccugaucgaccugcaggagcucgggaaguacgagcaguacaucaaguggccgugguacaucuggcugggcuucaucgccggccugaucgcgaucgugauggugaccaucaugcucugcugcaugaccagcugcugcuccugccugaaggggugcugcagcugcggcuccugcugcaaguucgacgaggacgacagcgagcccguccugaagggggugaagcuccacuacacgugaggacuaguguccaccugucccuccugggcugcuggauugucucguuuuccugccaaauaaacaggaucagcgcuuuacagaucuaaaaaaaaaaaaaaaaaaaaaaaaaaaaaaaaaaaaaaaaaaaaaaaaaaaaaaaaaaaaaaaaaaaaaaaaaaaaaaaaaaaaaaaaaaaaaaaaaaaa

SEQ ID NO: 25171 - RNA, 4105 nt, Artificial Sequence
  SARS-CoV-2/Wuhan/WIV05/2019__EPI_ISL_402128 spike protein mRNA gc (1-1273)(A222V_D614G)
aggagacccgugacccggaaguuguacggcuacgcgacuuucccucccacaaacccucgcgcccuuccuuuccuacuugggcccggcagaaagcuuaccauguucguguuccugguccuccugccccuggugagcucccagugcgugaaccucaccacccgcacgcagcugccgcccgccuacaccaacagcuucacccggggcgucuacuaccccgacaagguguuccgcuccagcgugcugcacuccacccaggaccucuuccugcccuucuucagcaacgucacgugguuccacgccauccacguguccgggaccaacggcaccaagcgguucgacaacccggugcugcccuucaacgacggggucuacuucgcgagcaccgagaaguccaacaucauccgcggcuggaucuucgggacgacccucgacagcaagacccagucccugcugaucgugaacaacgccaccaacguggucaucaaggugugcgaguuccaguucugcaacgaccccuuccucggcguguacuaccacaagaacaacaagagcuggauggaguccgaguuccgggucuacagcuccgccaacaacugcacguucgaguacgugagccagcccuuccugauggaccuggagggcaagcaggggaacuucaagaaccuccgcgaguucguguucaagaacaucgacggcuacuucaagaucuacuccaagcacaccccgaucaaccugguccgggaccugccccagggguucagcguccucgagccccugguggaccugcccaucggcaucaacaucacccgcuuccagacccuccuggcccugcaccgguccuaccucacgccgggggacagcagcuccggcuggaccgcgggcgccgccgccuacuacgugggguaccugcagccccgcaccuuccugcucaaguacaacgagaacggcaccaucacggacgcggucgacugcgcccuggacccccugagcgagaccaagugcacccucaaguccuucaccguggagaaggggaucuaccagacgagcaacuuccgggugcagcccaccgaguccaucguccgcuucccgaacaucaccaaccugugccccuucggcgagguguucaacgccacccgguucgccagcgucuacgccuggaaccgcaagcggaucuccaacugcguggcggacuacagcgugcuguacaacuccgccagcuucuccacguucaagugcuacggcgucagccccaccaagcucaacgaccugugcuucaccaacguguacgccgacuccuucgugauccgcggggacgagguccggcagaucgcccccggccagaccgggaagaucgccgacuacaacuacaagcugccggacgacuucacgggcugcgugaucgcguggaacagcaacaaccucgacuccaaggucgggggcaacuacaacuaccuguaccgccuguuccgcaagagcaaccucaagcccuucgagcgggacaucuccaccgagaucuaccaggccggcagcacccccugcaacgggguggagggcuucaacugcuacuucccccugcaguccuacggguuccagccgaccaacggcgugggguaccagcccuaccggguggucgugcugagcuucgagcuccugcacgcccccgccacggugugcggccccaagaaguccaccaaccuggucaagaacaagugcgugaacuucaacuucaacggccucaccgggaccggcgugcugaccgagagcaacaagaaguuccugccguuccagcaguucgggcgcgacaucgccgacacgaccgacgcgguccgcgacccccagacccuggagauccucgacaucacccccugcagcuucggcgggguguccgugaucacgccgggcaccaacaccagcaaccaggucgccgugcuguaccagggcgugaacugcaccgagguccccguggccauccacgccgaccagcugacgcccaccuggcggguguacuccaccggcagcaacgucuuccagacccgcgccgggugccucaucggcgcggagcacgugaacaacuccuacgagugcgacauccccaucggggccggcaucugcgccagcuaccagacgcagaccaacuccccgcggcgcgcccggagcguggcgucccagagcaucaucgccuacaccaugucccugggcgccgagaacagcgucgccuacuccaacaacagcaucgccauccccaccaacuucacgaucuccgugaccaccgagauccugcccgugagcaugaccaagacgagcgucgacugcaccauguacaucugcggggacuccaccgagugcagcaaccuccugcugcaguacggcuccuucugcacccagcucaaccgcgcgcugacggggaucgccguggagcaggacaagaacacccaggagguguucgcccaggucaagcagaucuacaagacgcccccgaucaaggacuucggcggguucaacuucagccagauccugcccgaccccuccaagcccagcaagcgguccuucaucgaggaccuccuguucaacaaggugacccuggccgacgccggcuucaucaagcaguacggcgacugccucggggacaucgcggcccgcgaccugaucugcgcccagaaguucaacggccugaccgugcucccgccccugcugaccgacgagaugaucgcccaguacaccagcgcccuccuggcggggaccaucacguccggcuggaccuucggggccggcgccgcccugcagauccccuucgcgaugcagauggccuaccgguucaacggcaucggggucacccagaacgugcucuacgagaaccagaagcugaucgccaaccaguucaacagcgccaucggcaagauccaggacucccugagcuccaccgccagcgcgcucgggaagcugcaggacguggucaaccagaacgcccaggcccugaacacgcucgugaagcagcuguccagcaacuucggcgccaucuccagcgugcugaacgacauccucucccgccuggacaaggucgaggccgaggugcagaucgaccggcugaucaccgggcgccuccagagccugcagaccuacgugacccagcagcugauccgggcggccgagauccgcgccagcgccaaccucgccgcgaccaagauguccgagugcguccugggccagagcaagcggguggacuucugcggcaagggguaccaccugauguccuucccccagagcgccccgcacggcguggucuuccuccacgugacguacguccccgcccaggagaagaacuucaccaccgcccccgcgaucugccacgacgggaaggcccacuucccccgcgagggcguguucguguccaacgggacccacugguucgucacgcagcggaacuucuacgagccgcagaucaucaccaccgacaacaccuucgugagcggcaacugcgacguggucaucggcaucgugaacaacacgguguacgacccccugcagcccgagcuggacuccuucaaggaggagcucgacaaguacuucaagaaccacaccagccccgacgucgaccugggggacaucuccggcaucaacgccagcguggugaacauccagaaggagaucgaccgccugaacgaggucgccaagaaccucaacgagucccugaucgaccugcaggagcucgggaaguacgagcaguacaucaaguggccgugguacaucuggcugggcuucaucgccggccugaucgcgaucgugauggugaccaucaugcucugcugcaugaccagcugcugcuccugccugaaggggugcugcagcugcggcuccugcugcaaguucgacgaggacgacagcgagcccguccugaagggggugaagcuccacuacacgugaggacuaguguccaccugucccuccugggcugcuggauugucucguuuuccugccaaauaaacaggaucagcgcuuuacagaucuaaaaaaaaaaaaaaaaaaaaaaaaaaaaaaaaaaaaaaaaaaaaaaaaaaaaaaaaaaaaaaaaaaaaaaaaaaaaaaaaaaaaaaaaaaaaaaaaaaaa

SEQ ID NO: 25172 - RNA, 4105 nt, Artificial Sequence
  SARS-CoV-2/Wuhan/WIV05/2019__EPI_ISL_402128 spike protein mRNA gc (1-1273)(N439K_D614G)
aggagacccgugacccggaaguuguacggcuacgcgacuuucccucccacaaacccucgcgcccuuccuuuccuacuugggcccggcagaaagcuuaccauguucguguuccugguccuccugccccuggugagcucccagugcgugaaccucaccacccgcacgcagcugccgcccgccuacaccaacagcuucacccggggcgucuacuaccccgacaagguguuccgcuccagcgugcugcacuccacccaggaccucuuccugcccuucuucagcaacgucacgugguuccacgccauccacguguccgggaccaacggcaccaagcgguucgacaacccggugcugcccuucaacgacggggucuacuucgcgagcaccgagaaguccaacaucauccgcggcuggaucuucgggacgacccucgacagcaagacccagucccugcugaucgugaacaacgccaccaacguggucaucaaggugugcgaguuccaguucugcaacgaccccuuccucggcguguacuaccacaagaacaacaagagcuggauggaguccgaguuccgggucuacagcuccgccaacaacugcacguucgaguacgugagccagcccuuccugauggaccuggagggcaagcaggggaacuucaagaaccuccgcgaguucguguucaagaacaucgacggcuacuucaagaucuacuccaagcacaccccgaucaaccugguccgggaccugccccagggguucagcgcccucgagccccugguggaccugcccaucggcaucaacaucacccgcuuccagacccuccuggcccugcaccgguccuaccucacgccgggggacagcagcuccggcuggaccgcgggcgccgccgccuacuacgugggguaccugcagccccgcaccuuccugcucaaguacaacgagaacggcaccaucacggacgcggucgacugcgcccuggacccccugagcgagaccaagugcacccucaaguccuucaccguggagaaggggaucuaccagacgagcaacuuccgggugcagcccaccgaguccaucguccgcuucccgaacaucaccaaccugugccccuucggcgagguguucaacgccacccgguucgccagcgucuacgccuggaaccgcaagcggaucuccaacugcguggcggacuacagcgugcuguacaacuccgccagcuucuccacguucaagugcuacggcgucagccccaccaagcucaacgaccugugcuucaccaacguguacgccgacuccuucgugauccgcggggacgagguccggcagaucgcccccggccagaccgggaagaucgccgacuacaacuacaagcugccggacgacuucacgggcugcgugaucgcguggaacagcaagaaccucgacuccaaggucgggggcaacuacaacuaccuguaccgccuguuccgcaagagcaaccucaagcccuucgagcgggacaucuccaccgagaucuaccaggccggcagcacccccugcaacgggguggagggcuucaacugcuacuucccccugcaguccuacggguuccagccgaccaacggcgugggguaccagcccuaccggguggucgugcugagcuucgagcuccugcacgcccccgccacggugugcggccccaagaaguccaccaaccuggucaagaacaagugcgugaacuucaacuucaacggccucaccgggaccggcgugcugaccgagagcaacaagaaguuccugccguuccagcaguucgggcgcgacaucgccgacacgaccgacgcgguccgcgacccccagacccuggagauccucgacaucacccccugcagcuucggcgggguguccgugaucacgccgggcaccaacaccagcaaccaggucgccgugcuguaccagggcgugaacugcaccgagguccccguggccauccacgccgaccagcugacgcccaccuggcggguguacuccaccggcagcaacgucuuccagacccgcgccgggugccucaucggcgcggagcacgugaacaacuccuacgagugcgacauccccaucggggccggcaucugcgccagcuaccagacgcagaccaacuccccgcggcgcgcccggagcguggcgucccagagcaucaucgccuacaccaugucccugggcgccgagaacagcgucgccuacuccaacaacagcaucgccauccccaccaacuucacgaucuccgugaccaccgagauccugcccgugagcaugaccaagacgagcgucgacugcaccauguacaucugcggggacuccaccgagugcagcaaccuccugcugcaguacggcuccuucugcacccagcucaaccgcgcgcugacggggaucgccguggagcaggacaagaacacccaggagguguucgcccaggucaagcagaucuacaagacgcccccgaucaaggacuucggcggguucaacuucagccagauccugcccgaccccuccaagcccagcaagcgguccuucaucgaggaccuccuguucaacaaggugacccuggccgacgccggcuucaucaagcaguacggcgacugccucggggacaucgcggcccgcgaccugaucugcgcccagaaguucaacggccugaccgugcucccgccccugcugaccgacgagaugaucgcccaguacaccagcgcccuccuggcggggaccaucacguccggcuggaccuucggggccggcgccgcccugcagauccccuucgcgaugcagauggccuaccgguucaacggcaucggggucacccagaacgugcucuacgagaaccagaagcugaucgccaaccaguucaacagcgccaucggcaagauccaggacucccugagcuccaccgccagcgcgcucgggaagcugcaggacguggucaaccagaacgcccaggcccugaacacgcucgugaagcagcuguccagcaacuucggcgccaucuccagcgugcugaacgacauccucucccgccuggacaaggucgaggccgaggugcagaucgaccggcugaucaccgggcgccuccagagccugcagaccuacgugacccagcagcugauccgggcggccgagauccgcgccagcgccaaccucgccgcgaccaagauguccgagugcguccugggccagagcaagcggguggacuucugcggcaagggguaccaccugauguccuucccccagagcgccccgcacggcguggucuuccuccacgugacguacguccccgcccaggagaagaacuucaccaccgcccccgcgaucugccacgacgggaaggcccacuucccccgcgagggcguguucguguccaacgggacccacugguucgucacgcagcggaacuucuacgagccgcagaucaucaccaccgacaacaccuucgugagcggcaacugcgacguggucaucggcaucgugaacaacacgguguacgacccccugcagcccgagcuggacuccuucaaggaggagcucgacaaguacuucaagaaccacaccagccccgacgucgaccugggggacaucuccggcaucaacgccagcguggugaacauccagaaggagaucgaccgccugaacgaggucgccaagaaccucaacgagucccugaucgaccugcaggagcucgggaaguacgagcaguacaucaaguggccgugguacaucuggcugggcuucaucgccggccugaucgcgaucgugauggugaccaucaugcucugcugcaugaccagcugcugcuccugccugaaggggugcugcagcugcggcuccugcugcaaguucgacgaggacgacagcgagcccguccugaagggggugaagcuccacuacacgugaggacuaguguccaccugucccuccugggcugcuggauugucucguuuuccugccaaauaaacaggaucagcgcuuuacagaucuaaaaaaaaaaaaaaaaaaaaaaaaaaaaaaaaaaaaaaaaaaaaaaaaaaaaaaaaaaaaaaaaaaaaaaaaaaaaaaaaaaaaaaaaaaaaaaaaaaaa

SEQ ID NO: 25173 - RNA, 4105 nt, Artificial Sequence
  SARS-CoV-2/Wuhan/WIV05/2019__EPI_ISL_402128 spike protein mRNA gc (1-1273)(S477N_D614G)
aggagacccgugacccggaaguuguacggcuacgcgacuuucccucccacaaacccucgcgcccuuccuuuccuacuugggcccggcagaaagcuuaccauguucguguuccugguccuccugccccuggugagcucccagugcgugaaccucaccacccgcacgcagcugccgcccgccuacaccaacagcuucacccggggcgucuacuaccccgacaagguguuccgcuccagcgugcugcacuccacccaggaccucuuccugcccuucuucagcaacgucacgugguuccacgccauccacguguccgggaccaacggcaccaagcgguucgacaacccggugcugcccuucaacgacggggucuacuucgcgagcaccgagaaguccaacaucauccgcggcuggaucuucgggacgacccucgacagcaagacccagucccugcugaucgugaacaacgccaccaacguggucaucaaggugugcgaguuccaguucugcaacgaccccuuccucggcguguacuaccacaagaacaacaagagcuggauggaguccgaguuccgggucuacagcuccgccaacaacugcacguucgaguacgugagccagcccuuccugauggaccuggagggcaagcaggggaacuucaagaaccuccgcgaguucguguucaagaacaucgacggcuacuucaagaucuacuccaagcacaccccgaucaaccugguccgggaccugccccagggguucagcgcccucgagccccugguggaccugcccaucggcaucaacaucacccgcuuccagacccuccuggcccugcaccgguccuaccucacgccgggggacagcagcuccggcuggaccgcgggcgccgccgccuacuacgugggguaccugcagccccgcaccuuccugcucaaguacaacgagaacggcaccaucacggacgcggucgacugcgcccuggacccccugagcgagaccaagugcacccucaaguccuucaccguggagaaggggaucuaccagacgagcaacuuccgggugcagcccaccgaguccaucguccgcuucccgaacaucaccaaccugugccccuucggcgagguguucaacgccacccgguucgccagcgucuacgccuggaaccgcaagcggaucuccaacugcguggcggacuacagcgugcuguacaacuccgccagcuucuccacguucaagugcuacggcgucagccccaccaagcucaacgaccugugcuucaccaacguguacgccgacuccuucgugauccgcggggacgagguccggcagaucgcccccggccagaccgggaagaucgccgacuacaacuacaagcugccggacgacuucacgggcugcgugaucgcguggaacagcaacaaccucgacuccaaggucgggggcaacuacaacuaccuguaccgccuguuccgcaagagcaaccucaagcccuucgagcgggacaucuccaccgagaucuaccaggccggcaacacccccugcaacgggguggagggcuucaacugcuacuucccccugcaguccuacggguuccagccgaccaacggcgugggguaccagcccuaccggguggucgugcugagcuucgagcuccugcacgcccccgccacggugugcggccccaagaaguccaccaaccuggucaagaacaagugcgugaacuucaacuucaacggccucaccgggaccggcgugcugaccgagagcaacaagaaguuccugccguuccagcaguucgggcgcgacaucgccgacacgaccgacgcgguccgcgacccccagacccuggagauccucgacaucacccccugcagcuucggcgggguguccgugaucacgccgggcaccaacaccagcaaccaggucgccgugcuguaccagggcgugaacugcaccgagguccccguggccauccacgccgaccagcugacgcccaccuggcggguguacuccaccggcagcaacgucuuccagacccgcgccgggugccucaucggcgcggagcacgugaacaacuccuacgagugcgacauccccaucggggccggcaucugcgccagcuaccagacgcagaccaacuccccgcggcgcgcccggagcguggcgucccagagcaucaucgccuacaccaugucccugggcgccgagaacagcgucgccuacuccaacaacagcaucgccauccccaccaacuucacgaucuccgugaccaccgagauccugcccgugagcaugaccaagacgagcgucgacugcaccauguacaucugcggggacuccaccgagugcagcaaccuccugcugcaguacggcuccuucugcacccagcucaaccgcgcgcugacggggaucgccguggagcaggacaagaacacccaggagguguucgcccaggucaagcagaucuacaagacgcccccgaucaaggacuucggcggguucaacuucagccagauccugcccgaccccuccaagcccagcaagcgguccuucaucgaggaccuccuguucaacaaggugacccuggccgacgccggcuucaucaagcaguacggcgacugccucggggacaucgcggcccgcgaccugaucugcgcccagaaguucaacggccugaccgugcucccgccccugcugaccgacgagaugaucgcccaguacaccagcgcccuccuggcggggaccaucacguccggcuggaccuucggggccggcgccgcccugcagauccccuucgcgaugcagauggccuaccgguucaacggcaucggggucacccagaacgugcucuacgagaaccagaagcugaucgccaaccaguucaacagcgccaucggcaagauccaggacucccugagcuccaccgccagcgcgcucgggaagcugcaggacguggucaaccagaacgcccaggcccugaacacgcucgugaagcagcuguccagcaacuucggcgccaucuccagcgugcugaacgacauccucucccgccuggacaaggucgaggccgaggugcagaucgaccggcugaucaccgggcgccuccagagccugcagaccuacgugacccagcagcugauccgggcggccgagauccgcgccagcgccaaccucgccgcgaccaagauguccgagugcguccugggccagagcaagcggguggacuucugcggcaagggguaccaccugauguccuucccccagagcgccccgcacggcguggucuuccuccacgugacguacguccccgcccaggagaagaacuucaccaccgcccccgcgaucugccacgacgggaaggcccacuucccccgcgagggcguguucguguccaacgggacccacugguucgucacgcagcggaacuucuacgagccgcagaucaucaccaccgacaacaccuucgugagcggcaacugcgacguggucaucggcaucgugaacaacacgguguacgacccccugcagcccgagcuggacuccuucaaggaggagcucgacaaguacuucaagaaccacaccagccccgacgucgaccugggggacaucuccggcaucaacgccagcguggugaacauccagaaggagaucgaccgccugaacgaggucgccaagaaccucaacgagucccugaucgaccugcaggagcucgggaaguacgagcaguacaucaaguggccgugguacaucuggcugggcuucaucgccggccugaucgcgaucgugauggugaccaucaugcucugcugcaugaccagcugcugcuccugccugaaggggugcugcagcugcggcuccugcugcaaguucgacgaggacgacagcgagcccguccugaagggggugaagcuccacuacacgugaggacuaguguccaccugucccuccugggcugcuggauugucucguuuuccugccaaauaaacaggaucagcgcuuuacagaucuaaaaaaaaaaaaaaaaaaaaaaaaaaaaaaaaaaaaaaaaaaaaaaaaaaaaaaaaaaaaaaaaaaaaaaaaaaaaaaaaaaaaaaaaaaaaaaaaaaaa

SEQ ID NO: 25174 - RNA, 4105 nt, Artificial Sequence
  SARS-CoV-2/Wuhan/WIV05/2019__EPI_ISL_402128 spike protein mRNA gc (1-1273)(N501Y_D614G)
aggagacccgugacccggaaguuguacggcuacgcgacuuucccucccacaaacccucgcgcccuuccuuuccuacuugggcccggcagaaagcuuaccauguucguguuccugguccuccugccccuggugagcucccagugcgugaaccucaccacccgcacgcagcugccgcccgccuacaccaacagcuucacccggggcgucuacuaccccgacaagguguuccgcuccagcgugcugcacuccacccaggaccucuuccugcccuucuucagcaacgucacgugguuccacgccauccacguguccgggaccaacggcaccaagcgguucgacaacccggugcugcccuucaacgacggggucuacuucgcgagcaccgagaaguccaacaucauccgcggcuggaucuucgggacgacccucgacagcaagacccagucccugcugaucgugaacaacgccaccaacguggucaucaaggugugcgaguuccaguucugcaacgaccccuuccucggcguguacuaccacaagaacaacaagagcuggauggaguccgaguuccgggucuacagcuccgccaacaacugcacguucgaguacgugagccagcccuuccugauggaccuggagggcaagcaggggaacuucaagaaccuccgcgaguucguguucaagaacaucgacggcuacuucaagaucuacuccaagcacaccccgaucaaccugguccgggaccugccccagggguucagcgcccucgagccccugguggaccugcccaucggcaucaacaucacccgcuuccagacccuccuggcccugcaccgguccuaccucacgccgggggacagcagcuccggcuggaccgcgggcgccgccgccuacuacgugggguaccugcagccccgcaccuuccugcucaaguacaacgagaacggcaccaucacggacgcggucgacugcgcccuggacccccugagcgagaccaagugcacccucaaguccuucaccguggagaaggggaucuaccagacgagcaacuuccgggugcagcccaccgaguccaucguccgcuucccgaacaucaccaaccugugccccuucggcgagguguucaacgccacccgguucgccagcgucuacgccuggaaccgcaagcggaucuccaacugcguggcggacuacagcgugcuguacaacuccgccagcuucuccacguucaagugcuacggcgucagccccaccaagcucaacgaccugugcuucaccaacguguacgccgacuccuucgugauccgcggggacgagguccggcagaucgcccccggccagaccgggaagaucgccgacuacaacuacaagcugccggacgacuucacgggcugcgugaucgcguggaacagcaacaaccucgacuccaaggucgggggcaacuacaacuaccuguaccgccuguuccgcaagagcaaccucaagcccuucgagcgggacaucuccaccgagaucuaccaggccggcagcacccccugcaacgggguggagggcuucaacugcuacuucccccugcaguccuacggguuccagccgaccuacggcgugggguaccagcccuaccggguggucgugcugagcuucgagcuccugcacgcccccgccacggugugcggccccaagaaguccaccaaccuggucaagaacaagugcgugaacuucaacuucaacggccucaccgggaccggcgugcugaccgagagcaacaagaaguuccugccguuccagcaguucgggcgcgacaucgccgacacgaccgacgcgguccgcgacccccagacccuggagauccucgacaucacccccugcagcuucggcgggguguccgugaucacgccgggcaccaacaccagcaaccaggucgccgugcuguaccagggcgugaacugcaccgagguccccguggccauccacgccgaccagcugacgcccaccuggcggguguacuccaccggcagcaacgucuuccagacccgcgccgggugccucaucggcgcggagcacgugaacaacuccuacgagugcgacauccccaucggggccggcaucugcgccagcuaccagacgcagaccaacuccccgcggcgcgcccggagcguggcgucccagagcaucaucgccuacaccaugucccugggcgccgagaacagcgucgccuacuccaacaacagcaucgccauccccaccaacuucacgaucuccgugaccaccgagauccugcccgugagcaugaccaagacgagcgucgacugcaccauguacaucugcggggacuccaccgagugcagcaaccuccugcugcaguacggcuccuucugcacccagcucaaccgcgcgcugacggggaucgccguggagcaggacaagaacacccaggagguguucgcccaggucaagcagaucuacaagacgcccccgaucaaggacuucggcggguucaacuucagccagauccugcccgaccccuccaagcccagcaagcgguccuucaucgaggaccuccuguucaacaaggugacccuggccgacgccggcuucaucaagcaguacggcgacugccucggggacaucgcggcccgcgaccugaucugcgcccagaaguucaacggccugaccgugcucccgccccugcugaccgacgagaugaucgcccaguacaccagcgcccuccuggcggggaccaucacguccggcuggaccuucggggccggcgccgcccugcagauccccuucgcgaugcagauggccuaccgguucaacggcaucggggucacccagaacgugcucuacgagaaccagaagcugaucgccaaccaguucaacagcgccaucggcaagauccaggacucccugagcuccaccgccagcgcgcucgggaagcugcaggacguggucaaccagaacgcccaggcccugaacacgcucgugaagcagcuguccagcaacuucggcgccaucuccagcgugcugaacgacauccucucccgccuggacaaggucgaggccgaggugcagaucgaccggcugaucaccgggcgccuccagagccugcagaccuacgugacccagcagcugauccgggcggccgagauccgcgccagcgccaaccucgccgcgaccaagauguccgagugcguccugggccagagcaagcggguggacuucugcggcaagggguaccaccugauguccuucccccagagcgccccgcacggcguggucuuccuccacgugacguacguccccgcccaggagaagaacuucaccaccgcccccgcgaucugccacgacgggaaggcccacuucccccgcgagggcguguucguguccaacgggacccacugguucgucacgcagcggaacuucuacgagccgcagaucaucaccaccgacaacaccuucgugagcggcaacugcgacguggucaucggcaucgugaacaacacgguguacgacccccugcagcccgagcuggacuccuucaaggaggagcucgacaaguacuucaagaaccacaccagccccgacgucgaccugggggacaucuccggcaucaacgccagcguggugaacauccagaaggagaucgaccgccugaacgaggucgccaagaaccucaacgagucccugaucgaccugcaggagcucgggaaguacgagcaguacaucaaguggccgugguacaucuggcugggcuucaucgccggccugaucgcgaucgugauggugaccaucaugcucugcugcaugaccagcugcugcuccugccugaaggggugcugcagcugcggcuccugcugcaaguucgacgaggacgacagcgagcccguccugaagggggugaagcuccacuacacgugaggacuaguguccaccugucccuccugggcugcuggauugucucguuuuccugccaaauaaacaggaucagcgcuuuacagaucuaaaaaaaaaaaaaaaaaaaaaaaaaaaaaaaaaaaaaaaaaaaaaaaaaaaaaaaaaaaaaaaaaaaaaaaaaaaaaaaaaaaaaaaaaaaaaaaaaaaa

SEQ ID NO: 25175 - RNA, 4099 nt, Artificial Sequence
  SARS-CoV-2/Wuhan/WIV05/2019__EPI_ISL_402128 spike protein mRNA gc (1-1273)(H69del_V70del_D614G)
aggagacccgugacccggaaguuguacggcuacgcgacuuucccucccacaaacccucgcgcccuuccuuuccuacuugggcccggcagaaagcuuaccauguucguguuccugguccuccugccccuggugagcucccagugcgugaaccucaccacccgcacgcagcugccgcccgccuacaccaacagcuucacccggggcgucuacuaccccgacaagguguuccgcuccagcgugcugcacuccacccaggaccucuuccugcccuucuucagcaacgucacgugguuccacgccaucuccgggaccaacggcaccaagcgguucgacaacccggugcugcccuucaacgacggggucuacuucgcgagcaccgagaaguccaacaucauccgcggcuggaucuucgggacgacccucgacagcaagacccagucccugcugaucgugaacaacgccaccaacguggucaucaaggugugcgaguuccaguucugcaacgaccccuuccucggcguguacuaccacaagaacaacaagagcuggauggaguccgaguuccgggucuacagcuccgccaacaacugcacguucgaguacgugagccagcccuuccugauggaccuggagggcaagcaggggaacuucaagaaccuccgcgaguucguguucaagaacaucgacggcuacuucaagaucuacuccaagcacaccccgaucaaccugguccgggaccugccccagggguucagcgcccucgagccccugguggaccugcccaucggcaucaacaucacccgcuuccagacccuccuggcccugcaccgguccuaccucacgccgggggacagcagcuccggcuggaccgcgggcgccgccgccuacuacgugggguaccugcagccccgcaccuuccugcucaaguacaacgagaacggcaccaucacggacgcggucgacugcgcccuggacccccugagcgagaccaagugcacccucaaguccuucaccguggagaaggggaucuaccagacgagcaacuuccgggugcagcccaccgaguccaucguccgcuucccgaacaucaccaaccugugccccuucggcgagguguucaacgccacccgguucgccagcgucuacgccuggaaccgcaagcggaucuccaacugcguggcggacuacagcgugcuguacaacuccgccagcuucuccacguucaagugcuacggcgucagccccaccaagcucaacgaccugugcuucaccaacguguacgccgacuccuucgugauccgcggggacgagguccggcagaucgcccccggccagaccgggaagaucgccgacuacaacuacaagcugccggacgacuucacgggcugcgugaucgcguggaacagcaacaaccucgacuccaaggucgggggcaacuacaacuaccuguaccgccuguuccgcaagagcaaccucaagcccuucgagcgggacaucuccaccgagaucuaccaggccggcagcacccccugcaacgggguggagggcuucaacugcuacuucccccugcaguccuacggguuccagccgaccaacggcgugggguaccagcccuaccggguggucgugcugagcuucgagcuccugcacgcccccgccacggugugcggccccaagaaguccaccaaccuggucaagaacaagugcgugaacuucaacuucaacggccucaccgggaccggcgugcugaccgagagcaacaagaaguuccugccguuccagcaguucgggcgcgacaucgccgacacgaccgacgcgguccgcgacccccagacccuggagauccucgacaucacccccugcagcuucggcgggguguccgugaucacgccgggcaccaacaccagcaaccaggucgccgugcuguaccagggcgugaacugcaccgagguccccguggccauccacgccgaccagcugacgcccaccuggcggguguacuccaccggcagcaacgucuuccagacccgcgccgggugccucaucggcgcggagcacgugaacaacuccuacgagugcgacauccccaucggggccggcaucugcgccagcuaccagacgcagaccaacuccccgcggcgcgcccggagcguggcgucccagagcaucaucgccuacaccaugucccugggcgccgagaacagcgucgccuacuccaacaacagcaucgccauccccaccaacuucacgaucuccgugaccaccgagauccugcccgugagcaugaccaagacgagcgucgacugcaccauguacaucugcggggacuccaccgagugcagcaaccuccugcugcaguacggcuccuucugcacccagcucaaccgcgcgcugacggggaucgccguggagcaggacaagaacacccaggagguguucgcccaggucaagcagaucuacaagacgcccccgaucaaggacuucggcggguucaacuucagccagauccugcccgaccccuccaagcccagcaagcgguccuucaucgaggaccuccuguucaacaaggugacccuggccgacgccggcuucaucaagcaguacggcgacugccucggggacaucgcggcccgcgaccugaucugcgcccagaaguucaacggccugaccgugcucccgccccugcugaccgacgagaugaucgcccaguacaccagcgcccuccuggcggggaccaucacguccggcuggaccuucggggccggcgccgcccugcagauccccuucgcgaugcagauggccuaccgguucaacggcaucggggucacccagaacgugcucuacgagaaccagaagcugaucgccaaccaguucaacagcgccaucggcaagauccaggacucccugagcuccaccgccagcgcgcucgggaagcugcaggacguggucaaccagaacgcccaggcccugaacacgcucgugaagcagcuguccagcaacuucggcgccaucuccagcgugcugaacgacauccucucccgccuggacaaggucgaggccgaggugcagaucgaccggcugaucaccgggcgccuccagagccugcagaccuacgugacccagcagcugauccgggcggccgagauccgcgccagcgccaaccucgccgcgaccaagauguccgagugcguccugggccagagcaagcggguggacuucugcggcaagggguaccaccugauguccuucccccagagcgccccgcacggcguggucuuccuccacgugacguacguccccgcccaggagaagaacuucaccaccgcccccgcgaucugccacgacgggaaggcccacuucccccgcgagggcguguucguguccaacgggacccacugguucgucacgcagcggaacuucuacgagccgcagaucaucaccaccgacaacaccuucgugagcggcaacugcgacguggucaucggcaucgugaacaacacgguguacgacccccugcagcccgagcuggacuccuucaaggaggagcucgacaaguacuucaagaaccacaccagccccgacgucgaccugggggacaucuccggcaucaacgccagcguggugaacauccagaaggagaucgaccgccugaacgaggucgccaagaaccucaacgagucccugaucgaccugcaggagcucgggaaguacgagcaguacaucaaguggccgugguacaucuggcugggcuucaucgccggccugaucgcgaucgugauggugaccaucaugcucugcugcaugaccagcugcugcuccugccugaaggggugcugcagcugcggcuccugcugcaaguucgacgaggacgacagcgagcccguccugaagggggugaagcuccacuacacgugaggacuaguguccaccugucccuccugggcugcuggauugucucguuuuccugccaaauaaacaggaucagcgcuuuacagaucuaaaaaaaaaaaaaaaaaaaaaaaaaaaaaaaaaaaaaaaaaaaaaaaaaaaaaaaaaaaaaaaaaaaaaaaaaaaaaaaaaaaaaaaaaaaaaaaaaaaa

SEQ ID NO: 25176 - RNA, 4105 nt, Artificial Sequence
  SARS-CoV-2/Wuhan/WIV05/2019__EPI_ISL_402128 spike protein mRNA gc (1-1273)(Y453F_D614G)
aggagacccgugacccggaaguuguacggcuacgcgacuuucccucccacaaacccucgcgcccuuccuuuccuacuugggcccggcagaaagcuuaccauguucguguuccugguccuccugccccuggugagcucccagugcgugaaccucaccacccgcacgcagcugccgcccgccuacaccaacagcuucacccggggcgucuacuaccccgacaagguguuccgcuccagcgugcugcacuccacccaggaccucuuccugcccuucuucagcaacgucacgugguuccacgccauccacguguccgggaccaacggcaccaagcgguucgacaacccggugcugcccuucaacgacggggucuacuucgcgagcaccgagaaguccaacaucauccgcggcuggaucuucgggacgacccucgacagcaagacccagucccugcugaucgugaacaacgccaccaacguggucaucaaggugugcgaguuccaguucugcaacgaccccuuccucggcguguacuaccacaagaacaacaagagcuggauggaguccgaguuccgggucuacagcuccgccaacaacugcacguucgaguacgugagccagcccuuccugauggaccuggagggcaagcaggggaacuucaagaaccuccgcgaguucguguucaagaacaucgacggcuacuucaagaucuacuccaagcacaccccgaucaaccugguccgggaccugccccagggguucagcgcccucgagccccugguggaccugcccaucggcaucaacaucacccgcuuccagacccuccuggcccugcaccgguccuaccucacgccgggggacagcagcuccggcuggaccgcgggcgccgccgccuacuacgugggguaccugcagccccgcaccuuccugcucaaguacaacgagaacggcaccaucacggacgcggucgacugcgcccuggacccccugagcgagaccaagugcacccucaaguccuucaccguggagaaggggaucuaccagacgagcaacuuccgggugcagcccaccgaguccaucguccgcuucccgaacaucaccaaccugugccccuucggcgagguguucaacgccacccgguucgccagcgucuacgccuggaaccgcaagcggaucuccaacugcguggcggacuacagcgugcuguacaacuccgccagcuucuccacguucaagugcuacggcgucagccccaccaagcucaacgaccugugcuucaccaacguguacgccgacuccuucgugauccgcggggacgagguccggcagaucgcccccggccagaccgggaagaucgccgacuacaacuacaagcugccggacgacuucacgggcugcgugaucgcguggaacagcaacaaccucgacuccaaggucgggggcaacuacaacuaccuguuccgccuguuccgcaagagcaaccucaagcccuucgagcgggacaucuccaccgagaucuaccaggccggcagcacccccugcaacgggguggagggcuucaacugcuacuucccccugcaguccuacggguuccagccgaccaacggcgugggguaccagcccuaccggguggucgugcugagcuucgagcuccugcacgcccccgccacggugugcggccccaagaaguccaccaaccuggucaagaacaagugcgugaacuucaacuucaacggccucaccgggaccggcgugcugaccgagagcaacaagaaguuccugccguuccagcaguucgggcgcgacaucgccgacacgaccgacgcgguccgcgacccccagacccuggagauccucgacaucacccccugcagcuucggcgggguguccgugaucacgccgggcaccaacaccagcaaccaggucgccgugcuguaccagggcgugaacugcaccgagguccccguggccauccacgccgaccagcugacgcccaccuggcggguguacuccaccggcagcaacgucuuccagacccgcgccgggugccucaucggcgcggagcacgugaacaacuccuacgagugcgacauccccaucggggccggcaucugcgccagcuaccagacgcagaccaacuccccgcggcgcgcccggagcguggcgucccagagcaucaucgccuacaccaugucccugggcgccgagaacagcgucgccuacuccaacaacagcaucgccauccccaccaacuucacgaucuccgugaccaccgagauccugcccgugagcaugaccaagacgagcgucgacugcaccauguacaucugcggggacuccaccgagugcagcaaccuccugcugcaguacggcuccuucugcacccagcucaaccgcgcgcugacggggaucgccguggagcaggacaagaacacccaggagguguucgcccaggucaagcagaucuacaagacgcccccgaucaaggacuucggcggguucaacuucagccagauccugcccgaccccuccaagcccagcaagcgguccuucaucgaggaccuccuguucaacaaggugacccuggccgacgccggcuucaucaagcaguacggcgacugccucggggacaucgcggcccgcgaccugaucugcgcccagaaguucaacggccugaccgugcucccgccccugcugaccgacgagaugaucgcccaguacaccagcgcccuccuggcggggaccaucacguccggcuggaccuucggggccggcgccgcccugcagauccccuucgcgaugcagauggccuaccgguucaacggcaucggggucacccagaacgugcucuacgagaaccagaagcugaucgccaaccaguucaacagcgccaucggcaagauccaggacucccugagcuccaccgccagcgcgcucgggaagcugcaggacguggucaaccagaacgcccaggcccugaacacgcucgugaagcagcuguccagcaacuucggcgccaucuccagcgugcugaacgacauccucucccgccuggacaaggucgaggccgaggugcagaucgaccggcugaucaccgggcgccuccagagccugcagaccuacgugacccagcagcugauccgggcggccgagauccgcgccagcgccaaccucgccgcgaccaagauguccgagugcguccugggccagagcaagcggguggacuucugcggcaagggguaccaccugauguccuucccccagagcgccccgcacggcguggucuuccuccacgugacguacguccccgcccaggagaagaacuucaccaccgcccccgcgaucugccacgacgggaaggcccacuucccccgcgagggcguguucguguccaacgggacccacugguucgucacgcagcggaacuucuacgagccgcagaucaucaccaccgacaacaccuucgugagcggcaacugcgacguggucaucggcaucgugaacaacacgguguacgacccccugcagcccgagcuggacuccuucaaggaggagcucgacaaguacuucaagaaccacaccagccccgacgucgaccugggggacaucuccggcaucaacgccagcguggugaacauccagaaggagaucgaccgccugaacgaggucgccaagaaccucaacgagucccugaucgaccugcaggagcucgggaaguacgagcaguacaucaaguggccgugguacaucuggcugggcuucaucgccggccugaucgcgaucgugauggugaccaucaugcucugcugcaugaccagcugcugcuccugccugaaggggugcugcagcugcggcuccugcugcaaguucgacgaggacgacagcgagcccguccugaagggggugaagcuccacuacacgugaggacuaguguccaccugucccuccugggcugcuggauugucucguuuuccugccaaauaaacaggaucagcgcuuuacagaucuaaaaaaaaaaaaaaaaaaaaaaaaaaaaaaaaaaaaaaaaaaaaaaaaaaaaaaaaaaaaaaaaaaaaaaaaaaaaaaaaaaaaaaaaaaaaaaaaaaaa

SEQ ID NO: 25177 - RNA, 4105 nt, Artificial Sequence
  SARS-CoV-2/Wuhan/WIV05/2019__EPI_ISL_402128 spike protein mRNA gc (1-1273)(D614G_I692V)
aggagacccgugacccggaaguuguacggcuacgcgacuuucccucccacaaacccucgcgcccuuccuuuccuacuugggcccggcagaaagcuuaccauguucguguuccugguccuccugccccuggugagcucccagugcgugaaccucaccacccgcacgcagcugccgcccgccuacaccaacagcuucacccggggcgucuacuaccccgacaagguguuccgcuccagcgugcugcacuccacccaggaccucuuccugcccuucuucagcaacgucacgugguuccacgccauccacguguccgggaccaacggcaccaagcgguucgacaacccggugcugcccuucaacgacggggucuacuucgcgagcaccgagaaguccaacaucauccgcggcuggaucuucgggacgacccucgacagcaagacccagucccugcugaucgugaacaacgccaccaacguggucaucaaggugugcgaguuccaguucugcaacgaccccuuccucggcguguacuaccacaagaacaacaagagcuggauggaguccgaguuccgggucuacagcuccgccaacaacugcacguucgaguacgugagccagcccuuccugauggaccuggagggcaagcaggggaacuucaagaaccuccgcgaguucguguucaagaacaucgacggcuacuucaagaucuacuccaagcacaccccgaucaaccugguccgggaccugccccagggguucagcgcccucgagccccugguggaccugcccaucggcaucaacaucacccgcuuccagacccuccuggcccugcaccgguccuaccucacgccgggggacagcagcuccggcuggaccgcgggcgccgccgccuacuacgugggguaccugcagccccgcaccuuccugcucaaguacaacgagaacggcaccaucacggacgcggucgacugcgcccuggacccccugagcgagaccaagugcacccucaaguccuucaccguggagaaggggaucuaccagacgagcaacuuccgggugcagcccaccgaguccaucguccgcuucccgaacaucaccaaccugugccccuucggcgagguguucaacgccacccgguucgccagcgucuacgccuggaaccgcaagcggaucuccaacugcguggcggacuacagcgugcuguacaacuccgccagcuucuccacguucaagugcuacggcgucagccccaccaagcucaacgaccugugcuucaccaacguguacgccgacuccuucgugauccgcggggacgagguccggcagaucgcccccggccagaccgggaagaucgccgacuacaacuacaagcugccggacgacuucacgggcugcgugaucgcguggaacagcaacaaccucgacuccaaggucgggggcaacuacaacuaccuguaccgccuguuccgcaagagcaaccucaagcccuucgagcgggacaucuccaccgagaucuaccaggccggcagcacccccugcaacgggguggagggcuucaacugcuacuucccccugcaguccuacggguuccagccgaccaacggcgugggguaccagcccuaccggguggucgugcugagcuucgagcuccugcacgcccccgccacggugugcggccccaagaaguccaccaaccuggucaagaacaagugcgugaacuucaacuucaacggccucaccgggaccggcgugcugaccgagagcaacaagaaguuccugccguuccagcaguucgggcgcgacaucgccgacacgaccgacgcgguccgcgacccccagacccuggagauccucgacaucacccccugcagcuucggcgggguguccgugaucacgccgggcaccaacaccagcaaccaggucgccgugcuguaccagggcgugaacugcaccgagguccccguggccauccacgccgaccagcugacgcccaccuggcggguguacuccaccggcagcaacgucuuccagacccgcgccgggugccucaucggcgcggagcacgugaacaacuccuacgagugcgacauccccaucggggccggcaucugcgccagcuaccagacgcagaccaacuccccgcggcgcgcccggagcguggcgucccagagcgucaucgccuacaccaugucccugggcgccgagaacagcgucgccuacuccaacaacagcaucgccauccccaccaacuucacgaucuccgugaccaccgagauccugcccgugagcaugaccaagacgagcgucgacugcaccauguacaucugcggggacuccaccgagugcagcaaccuccugcugcaguacggcuccuucugcacccagcucaaccgcgcgcugacggggaucgccguggagcaggacaagaacacccaggagguguucgcccaggucaagcagaucuacaagacgcccccgaucaaggacuucggcggguucaacuucagccagauccugcccgaccccuccaagcccagcaagcgguccuucaucgaggaccuccuguucaacaaggugacccuggccgacgccggcuucaucaagcaguacggcgacugccucggggacaucgcggcccgcgaccugaucugcgcccagaaguucaacggccugaccgugcucccgccccugcugaccgacgagaugaucgcccaguacaccagcgcccuccuggcggggaccaucacguccggcuggaccuucggggccggcgccgcccugcagauccccuucgcgaugcagauggccuaccgguucaacggcaucggggucacccagaacgugcucuacgagaaccagaagcugaucgccaaccaguucaacagcgccaucggcaagauccaggacucccugagcuccaccgccagcgcgcucgggaagcugcaggacguggucaaccagaacgcccaggcccugaacacgcucgugaagcagcuguccagcaacuucggcgccaucuccagcgugcugaacgacauccucucccgccuggacaaggucgaggccgaggugcagaucgaccggcugaucaccgggcgccuccagagccugcagaccuacgugacccagcagcugauccgggcggccgagauccgcgccagcgccaaccucgccgcgaccaagauguccgagugcguccugggccagagcaagcggguggacuucugcggcaagggguaccaccugauguccuucccccagagcgccccgcacggcguggucuuccuccacgugacguacguccccgcccaggagaagaacuucaccaccgcccccgcgaucugccacgacgggaaggcccacuucccccgcgagggcguguucguguccaacgggacccacugguucgucacgcagcggaacuucuacgagccgcagaucaucaccaccgacaacaccuucgugagcggcaacugcgacguggucaucggcaucgugaacaacacgguguacgacccccugcagcccgagcuggacuccuucaaggaggagcucgacaaguacuucaagaaccacaccagccccgacgucgaccugggggacaucuccggcaucaacgccagcguggugaacauccagaaggagaucgaccgccugaacgaggucgccaagaaccucaacgagucccugaucgaccugcaggagcucgggaaguacgagcaguacaucaaguggccgugguacaucuggcugggcuucaucgccggccugaucgcgaucgugauggugaccaucaugcucugcugcaugaccagcugcugcuccugccugaaggggugcugcagcugcggcuccugcugcaaguucgacgaggacgacagcgagcccguccugaagggggugaagcuccacuacacgugaggacuaguguccaccugucccuccugggcugcuggauugucucguuuuccugccaaauaaacaggaucagcgcuuuacagaucuaaaaaaaaaaaaaaaaaaaaaaaaaaaaaaaaaaaaaaaaaaaaaaaaaaaaaaaaaaaaaaaaaaaaaaaaaaaaaaaaaaaaaaaaaaaaaaaaaaaa

SEQ ID NO: 25178 - RNA, 4105 nt, Artificial Sequence
  SARS-CoV-2/Wuhan/WIV05/2019__EPI_ISL_402128 spike protein mRNA gc (1-1273)(D614G_M1229I)
aggagacccgugacccggaaguuguacggcuacgcgacuuucccucccacaaacccucgcgcccuuccuuuccuacuugggcccggcagaaagcuuaccauguucguguuccugguccuccugccccuggugagcucccagugcgugaaccucaccacccgcacgcagcugccgcccgccuacaccaacagcuucacccggggcgucuacuaccccgacaagguguuccgcuccagcgugcugcacuccacccaggaccucuuccugcccuucuucagcaacgucacgugguuccacgccauccacguguccgggaccaacggcaccaagcgguucgacaacccggugcugcccuucaacgacggggucuacuucgcgagcaccgagaaguccaacaucauccgcggcuggaucuucgggacgacccucgacagcaagacccagucccugcugaucgugaacaacgccaccaacguggucaucaaggugugcgaguuccaguucugcaacgaccccuuccucggcguguacuaccacaagaacaacaagagcuggauggaguccgaguuccgggucuacagcuccgccaacaacugcacguucgaguacgugagccagcccuuccugauggaccuggagggcaagcaggggaacuucaagaaccuccgcgaguucguguucaagaacaucgacggcuacuucaagaucuacuccaagcacaccccgaucaaccugguccgggaccugccccagggguucagcgcccucgagccccugguggaccugcccaucggcaucaacaucacccgcuuccagacccuccuggcccugcaccgguccuaccucacgccgggggacagcagcuccggcuggaccgcgggcgccgccgccuacuacgugggguaccugcagccccgcaccuuccugcucaaguacaacgagaacggcaccaucacggacgcggucgacugcgcccuggacccccugagcgagaccaagugcacccucaaguccuucaccguggagaaggggaucuaccagacgagcaacuuccgggugcagcccaccgaguccaucguccgcuucccgaacaucaccaaccugugccccuucggcgagguguucaacgccacccgguucgccagcgucuacgccuggaaccgcaagcggaucuccaacugcguggcggacuacagcgugcuguacaacuccgccagcuucuccacguucaagugcuacggcgucagccccaccaagcucaacgaccugugcuucaccaacguguacgccgacuccuucgugauccgcggggacgagguccggcagaucgcccccggccagaccgggaagaucgccgacuacaacuacaagcugccggacgacuucacgggcugcgugaucgcguggaacagcaacaaccucgacuccaaggucgggggcaacuacaacuaccuguaccgccuguuccgcaagagcaaccucaagcccuucgagcgggacaucuccaccgagaucuaccaggccggcagcacccccugcaacgggguggagggcuucaacugcuacuucccccugcaguccuacggguuccagccgaccaacggcgugggguaccagcccuaccggguggucgugcugagcuucgagcuccugcacgcccccgccacggugugcggccccaagaaguccaccaaccuggucaagaacaagugcgugaacuucaacuucaacggccucaccgggaccggcgugcugaccgagagcaacaagaaguuccugccguuccagcaguucgggcgcgacaucgccgacacgaccgacgcgguccgcgacccccagacccuggagauccucgacaucacccccugcagcuucggcgggguguccgugaucacgccgggcaccaacaccagcaaccaggucgccgugcuguaccagggcgugaacugcaccgagguccccguggccauccacgccgaccagcugacgcccaccuggcggguguacuccaccggcagcaacgucuuccagacccgcgccgggugccucaucggcgcggagcacgugaacaacuccuacgagugcgacauccccaucggggccggcaucugcgccagcuaccagacgcagaccaacuccccgcggcgcgcccggagcguggcgucccagagcaucaucgccuacaccaugucccugggcgccgagaacagcgucgccuacuccaacaacagcaucgccauccccaccaacuucacgaucuccgugaccaccgagauccugcccgugagcaugaccaagacgagcgucgacugcaccauguacaucugcggggacuccaccgagugcagcaaccuccugcugcaguacggcuccuucugcacccagcucaaccgcgcgcugacggggaucgccguggagcaggacaagaacacccaggagguguucgcccaggucaagcagaucuacaagacgcccccgaucaaggacuucggcggguucaacuucagccagauccugcccgaccccuccaagcccagcaagcgguccuucaucgaggaccuccuguucaacaaggugacccuggccgacgccggcuucaucaagcaguacggcgacugccucggggacaucgcggcccgcgaccugaucugcgcccagaaguucaacggccugaccgugcucccgccccugcugaccgacgagaugaucgcccaguacaccagcgcccuccuggcggggaccaucacguccggcuggaccuucggggccggcgccgcccugcagauccccuucgcgaugcagauggccuaccgguucaacggcaucggggucacccagaacgugcucuacgagaaccagaagcugaucgccaaccaguucaacagcgccaucggcaagauccaggacucccugagcuccaccgccagcgcgcucgggaagcugcaggacguggucaaccagaacgcccaggcccugaacacgcucgugaagcagcuguccagcaacuucggcgccaucuccagcgugcugaacgacauccucucccgccuggacaaggucgaggccgaggugcagaucgaccggcugaucaccgggcgccuccagagccugcagaccuacgugacccagcagcugauccgggcggccgagauccgcgccagcgccaaccucgccgcgaccaagauguccgagugcguccugggccagagcaagcggguggacuucugcggcaagggguaccaccugauguccuucccccagagcgccccgcacggcguggucuuccuccacgugacguacguccccgcccaggagaagaacuucaccaccgcccccgcgaucugccacgacgggaaggcccacuucccccgcgagggcguguucguguccaacgggacccacugguucgucacgcagcggaacuucuacgagccgcagaucaucaccaccgacaacaccuucgugagcggcaacugcgacguggucaucggcaucgugaacaacacgguguacgacccccugcagcccgagcuggacuccuucaaggaggagcucgacaaguacuucaagaaccacaccagccccgacgucgaccugggggacaucuccggcaucaacgccagcguggugaacauccagaaggagaucgaccgccugaacgaggucgccaagaaccucaacgagucccugaucgaccugcaggagcucgggaaguacgagcaguacaucaaguggccgugguacaucuggcugggcuucaucgccggccugaucgcgaucgugaucgugaccaucaugcucugcugcaugaccagcugcugcuccugccugaaggggugcugcagcugcggcuccugcugcaaguucgacgaggacgacagcgagcccguccugaagggggugaagcuccacuacacgugaggacuaguguccaccugucccuccugggcugcuggauugucucguuuuccugccaaauaaacaggaucagcgcuuuacagaucuaaaaaaaaaaaaaaaaaaaaaaaaaaaaaaaaaaaaaaaaaaaaaaaaaaaaaaaaaaaaaaaaaaaaaaaaaaaaaaaaaaaaaaaaaaaaaaaaaaaa

SEQ ID NO: 25179 - RNA, 4099 nt, Artificial Sequence
  SARS-CoV-2/Wuhan/WIV05/2019__EPI_ISL_402128 spike protein mRNA gc (1-1273)(H69del_V70del_A222V_Y453F_S477N_D614G_I692V)
aggagacccgugacccggaaguuguacggcuacgcgacuuucccucccacaaacccucgcgcccuuccuuuccuacuugggcccggcagaaagcuuaccauguucguguuccugguccuccugccccuggugagcucccagugcgugaaccucaccacccgcacgcagcugccgcccgccuacaccaacagcuucacccggggcgucuacuaccccgacaagguguuccgcuccagcgugcugcacuccacccaggaccucuuccugcccuucuucagcaacgucacgugguuccacgccaucuccgggaccaacggcaccaagcgguucgacaacccggugcugcccuucaacgacggggucuacuucgcgagcaccgagaaguccaacaucauccgcggcuggaucuucgggacgacccucgacagcaagacccagucccugcugaucgugaacaacgccaccaacguggucaucaaggugugcgaguuccaguucugcaacgaccccuuccucggcguguacuaccacaagaacaacaagagcuggauggaguccgaguuccgggucuacagcuccgccaacaacugcacguucgaguacgugagccagcccuuccugauggaccuggagggcaagcaggggaacuucaagaaccuccgcgaguucguguucaagaacaucgacggcuacuucaagaucuacuccaagcacaccccgaucaaccugguccgggaccugccccagggguucagcguccucgagccccugguggaccugcccaucggcaucaacaucacccgcuuccagacccuccuggcccugcaccgguccuaccucacgccgggggacagcagcuccggcuggaccgcgggcgccgccgccuacuacgugggguaccugcagccccgcaccuuccugcucaaguacaacgagaacggcaccaucacggacgcggucgacugcgcccuggacccccugagcgagaccaagugcacccucaaguccuucaccguggagaaggggaucuaccagacgagcaacuuccgggugcagcccaccgaguccaucguccgcuucccgaacaucaccaaccugugccccuucggcgagguguucaacgccacccgguucgccagcgucuacgccuggaaccgcaagcggaucuccaacugcguggcggacuacagcgugcuguacaacuccgccagcuucuccacguucaagugcuacggcgucagccccaccaagcucaacgaccugugcuucaccaacguguacgccgacuccuucgugauccgcggggacgagguccggcagaucgcccccggccagaccgggaagaucgccgacuacaacuacaagcugccggacgacuucacgggcugcgugaucgcguggaacagcaacaaccucgacuccaaggucgggggcaacuacaacuaccuguuccgccuguuccgcaagagcaaccucaagcccuucgagcgggacaucuccaccgagaucuaccaggccggcaacacccccugcaacgggguggagggcuucaacugcuacuucccccugcaguccuacggguuccagccgaccaacggcgugggguaccagcccuaccggguggucgugcugagcuucgagcuccugcacgcccccgccacggugugcggccccaagaaguccaccaaccuggucaagaacaagugcgugaacuucaacuucaacggccucaccgggaccggcgugcugaccgagagcaacaagaaguuccugccguuccagcaguucgggcgcgacaucgccgacacgaccgacgcgguccgcgacccccagacccuggagauccucgacaucacccccugcagcuucggcgggguguccgugaucacgccgggcaccaacaccagcaaccaggucgccgugcuguaccagggcgugaacugcaccgagguccccguggccauccacgccgaccagcugacgcccaccuggcggguguacuccaccggcagcaacgucuuccagacccgcgccgggugccucaucggcgcggagcacgugaacaacuccuacgagugcgacauccccaucggggccggcaucugcgccagcuaccagacgcagaccaacuccccgcggcgcgcccggagcguggcgucccagagcgucaucgccuacaccaugucccugggcgccgagaacagcgucgccuacuccaacaacagcaucgccauccccaccaacuucacgaucuccgugaccaccgagauccugcccgugagcaugaccaagacgagcgucgacugcaccauguacaucugcggggacuccaccgagugcagcaaccuccugcugcaguacggcuccuucugcacccagcucaaccgcgcgcugacggggaucgccguggagcaggacaagaacacccaggagguguucgcccaggucaagcagaucuacaagacgcccccgaucaaggacuucggcggguucaacuucagccagauccugcccgaccccuccaagcccagcaagcgguccuucaucgaggaccuccuguucaacaaggugacccuggccgacgccggcuucaucaagcaguacggcgacugccucggggacaucgcggcccgcgaccugaucugcgcccagaaguucaacggccugaccgugcucccgccccugcugaccgacgagaugaucgcccaguacaccagcgcccuccuggcggggaccaucacguccggcuggaccuucggggccggcgccgcccugcagauccccuucgcgaugcagauggccuaccgguucaacggcaucggggucacccagaacgugcucuacgagaaccagaagcugaucgccaaccaguucaacagcgccaucggcaagauccaggacucccugagcuccaccgccagcgcgcucgggaagcugcaggacguggucaaccagaacgcccaggcccugaacacgcucgugaagcagcuguccagcaacuucggcgccaucuccagcgugcugaacgacauccucucccgccuggacaaggucgaggccgaggugcagaucgaccggcugaucaccgggcgccuccagagccugcagaccuacgugacccagcagcugauccgggcggccgagauccgcgccagcgccaaccucgccgcgaccaagauguccgagugcguccugggccagagcaagcggguggacuucugcggcaagggguaccaccugauguccuucccccagagcgccccgcacggcguggucuuccuccacgugacguacguccccgcccaggagaagaacuucaccaccgcccccgcgaucugccacgacgggaaggcccacuucccccgcgagggcguguucguguccaacgggacccacugguucgucacgcagcggaacuucuacgagccgcagaucaucaccaccgacaacaccuucgugagcggcaacugcgacguggucaucggcaucgugaacaacacgguguacgacccccugcagcccgagcuggacuccuucaaggaggagcucgacaaguacuucaagaaccacaccagccccgacgucgaccugggggacaucuccggcaucaacgccagcguggugaacauccagaaggagaucgaccgccugaacgaggucgccaagaaccucaacgagucccugaucgaccugcaggagcucgggaaguacgagcaguacaucaaguggccgugguacaucuggcugggcuucaucgccggccugaucgcgaucgugauggugaccaucaugcucugcugcaugaccagcugcugcuccugccugaaggggugcugcagcugcggcuccugcugcaaguucgacgaggacgacagcgagcccguccugaagggggugaagcuccacuacacgugaggacuaguguccaccugucccuccugggcugcuggauugucucguuuuccugccaaauaaacaggaucagcgcuuuacagaucuaaaaaaaaaaaaaaaaaaaaaaaaaaaaaaaaaaaaaaaaaaaaaaaaaaaaaaaaaaaaaaaaaaaaaaaaaaaaaaaaaaaaaaaaaaaaaaaaaaaa

SEQ ID NO: 25180 - RNA, 4099 nt, Artificial Sequence
  SARS-CoV-2/Wuhan/WIV05/2019__EPI_ISL_402128 spike protein mRNA gc (1-1273)(H69del_V70del_Y453F_D614G_I692V_M1229I)
aggagacccgugacccggaaguuguacggcuacgcgacuuucccucccacaaacccucgcgcccuuccuuuccuacuugggcccggcagaaagcuuaccauguucguguuccugguccuccugccccuggugagcucccagugcgugaaccucaccacccgcacgcagcugccgcccgccuacaccaacagcuucacccggggcgucuacuaccccgacaagguguuccgcuccagcgugcugcacuccacccaggaccucuuccugcccuucuucagcaacgucacgugguuccacgccaucuccgggaccaacggcaccaagcgguucgacaacccggugcugcccuucaacgacggggucuacuucgcgagcaccgagaaguccaacaucauccgcggcuggaucuucgggacgacccucgacagcaagacccagucccugcugaucgugaacaacgccaccaacguggucaucaaggugugcgaguuccaguucugcaacgaccccuuccucggcguguacuaccacaagaacaacaagagcuggauggaguccgaguuccgggucuacagcuccgccaacaacugcacguucgaguacgugagccagcccuuccugauggaccuggagggcaagcaggggaacuucaagaaccuccgcgaguucguguucaagaacaucgacggcuacuucaagaucuacuccaagcacaccccgaucaaccugguccgggaccugccccagggguucagcgcccucgagccccugguggaccugcccaucggcaucaacaucacccgcuuccagacccuccuggcccugcaccgguccuaccucacgccgggggacagcagcuccggcuggaccgcgggcgccgccgccuacuacgugggguaccugcagccccgcaccuuccugcucaaguacaacgagaacggcaccaucacggacgcggucgacugcgcccuggacccccugagcgagaccaagugcacccucaaguccuucaccguggagaaggggaucuaccagacgagcaacuuccgggugcagcccaccgaguccaucguccgcuucccgaacaucaccaaccugugccccuucggcgagguguucaacgccacccgguucgccagcgucuacgccuggaaccgcaagcggaucuccaacugcguggcggacuacagcgugcuguacaacuccgccagcuucuccacguucaagugcuacggcgucagccccaccaagcucaacgaccugugcuucaccaacguguacgccgacuccuucgugauccgcggggacgagguccggcagaucgcccccggccagaccgggaagaucgccgacuacaacuacaagcugccggacgacuucacgggcugcgugaucgcguggaacagcaacaaccucgacuccaaggucgggggcaacuacaacuaccuguuccgccuguuccgcaagagcaaccucaagcccuucgagcgggacaucuccaccgagaucuaccaggccggcagcacccccugcaacgggguggagggcuucaacugcuacuucccccugcaguccuacggguuccagccgaccaacggcgugggguaccagcccuaccggguggucgugcugagcuucgagcuccugcacgcccccgccacggugugcggccccaagaaguccaccaaccuggucaagaacaagugcgugaacuucaacuucaacggccucaccgggaccggcgugcugaccgagagcaacaagaaguuccugccguuccagcaguucgggcgcgacaucgccgacacgaccgacgcgguccgcgacccccagacccuggagauccucgacaucacccccugcagcuucggcgggguguccgugaucacgccgggcaccaacaccagcaaccaggucgccgugcuguaccagggcgugaacugcaccgagguccccguggccauccacgccgaccagcugacgcccaccuggcggguguacuccaccggcagcaacgucuuccagacccgcgccgggugccucaucggcgcggagcacgugaacaacuccuacgagugcgacauccccaucggggccggcaucugcgccagcuaccagacgcagaccaacuccccgcggcgcgcccggagcguggcgucccagagcgugaucgccuacaccaugucccugggcgccgagaacagcgucgccuacuccaacaacagcaucgccauccccaccaacuucacgaucuccgugaccaccgagauccugcccgugagcaugaccaagacgagcgucgacugcaccauguacaucugcggggacuccaccgagugcagcaaccuccugcugcaguacggcuccuucugcacccagcucaaccgcgcgcugacggggaucgccguggagcaggacaagaacacccaggagguguucgcccaggucaagcagaucuacaagacgcccccgaucaaggacuucggcggguucaacuucagccagauccugcccgaccccuccaagcccagcaagcgguccuucaucgaggaccuccuguucaacaaggugacccuggccgacgccggcuucaucaagcaguacggcgacugccucggggacaucgcggcccgcgaccugaucugcgcccagaaguucaacggccugaccgugcucccgccccugcugaccgacgagaugaucgcccaguacaccagcgcccuccuggcggggaccaucacguccggcuggaccuucggggccggcgccgcccugcagauccccuucgcgaugcagauggccuaccgguucaacggcaucggggucacccagaacgugcucuacgagaaccagaagcugaucgccaaccaguucaacagcgccaucggcaagauccaggacucccugagcuccaccgccagcgcgcucgggaagcugcaggacguggucaaccagaacgcccaggcccugaacacgcucgugaagcagcuguccagcaacuucggcgccaucuccagcgugcugaacgacauccucucccgccuggacaaggucgaggccgaggugcagaucgaccggcugaucaccgggcgccuccagagccugcagaccuacgugacccagcagcugauccgggcggccgagauccgcgccagcgccaaccucgccgcgaccaagauguccgagugcguccugggccagagcaagcggguggacuucugcggcaagggguaccaccugauguccuucccccagagcgccccgcacggcguggucuuccuccacgugacguacguccccgcccaggagaagaacuucaccaccgcccccgcgaucugccacgacgggaaggcccacuucccccgcgagggcguguucguguccaacgggacccacugguucgucacgcagcggaacuucuacgagccgcagaucaucaccaccgacaacaccuucgugagcggcaacugcgacguggucaucggcaucgugaacaacacgguguacgacccccugcagcccgagcuggacuccuucaaggaggagcucgacaaguacuucaagaaccacaccagccccgacgucgaccugggggacaucuccggcaucaacgccagcguggugaacauccagaaggagaucgaccgccugaacgaggucgccaagaaccucaacgagucccugaucgaccugcaggagcucgggaaguacgagcaguacaucaaguggccgugguacaucuggcugggcuucaucgccggccugaucgcgaucgugaucgugaccaucaugcucugcugcaugaccagcugcugcuccugccugaaggggugcugcagcugcggcuccugcugcaaguucgacgaggacgacagcgagcccguccugaagggggugaagcuccacuacacgugaggacuaguguccaccugucccuccugggcugcuggauugucucguuuuccugccaaauaaacaggaucagcgcuuuacagaucuaaaaaaaaaaaaaaaaaaaaaaaaaaaaaaaaaaaaaaaaaaaaaaaaaaaaaaaaaaaaaaaaaaaaaaaaaaaaaaaaaaaaaaaaaaaaaaaaaaaa

SEQ ID NO: 25181 - RNA, 4096 nt, Artificial Sequence
  SARS-CoV-2/Wuhan/WIV05/2019__EPI_ISL_402128 spike protein mRNA gc (1-1273)(H69del_V70del_Y144del_N501Y_A570D_D614G_P681H_T716I_S982 A_D1118H)
aggagacccgugacccggaaguuguacggcuacgcgacuuucccucccacaaacccucgcgcccuuccuuuccuacuugggcccggcagaaagcuuaccauguucguguuccugguccuccugccccuggugagcucccagugcgugaaccucaccacccgcacgcagcugccgcccgccuacaccaacagcuucacccggggcgucuacuaccccgacaagguguuccgcuccagcgugcugcacuccacccaggaccucuuccugcccuucuucagcaacgucacgugguuccacgccaucuccgggaccaacggcaccaagcgguucgacaacccggugcugcccuucaacgacggggucuacuucgcgagcaccgagaaguccaacaucauccgcggcuggaucuucgggacgacccucgacagcaagacccagucccugcugaucgugaacaacgccaccaacguggucaucaaggugugcgaguuccaguucugcaacgaccccuuccucggcguguaccacaagaacaacaagagcuggauggaguccgaguuccgggucuacagcuccgccaacaacugcacguucgaguacgugagccagcccuuccugauggaccuggagggcaagcaggggaacuucaagaaccuccgcgaguucguguucaagaacaucgacggcuacuucaagaucuacuccaagcacaccccgaucaaccugguccgggaccugccccagggguucagcgcccucgagccccugguggaccugcccaucggcaucaacaucacccgcuuccagacccuccuggcccugcaccgguccuaccucacgccgggggacagcagcuccggcuggaccgcgggcgccgccgccuacuacgugggguaccugcagccccgcaccuuccugcucaaguacaacgagaacggcaccaucacggacgcggucgacugcgcccuggacccccugagcgagaccaagugcacccucaaguccuucaccguggagaaggggaucuaccagacgagcaacuuccgggugcagcccaccgaguccaucguccgcuucccgaacaucaccaaccugugccccuucggcgagguguucaacgccacccgguucgccagcgucuacgccuggaaccgcaagcggaucuccaacugcguggcggacuacagcgugcuguacaacuccgccagcuucuccacguucaagugcuacggcgucagccccaccaagcucaacgaccugugcuucaccaacguguacgccgacuccuucgugauccgcggggacgagguccggcagaucgcccccggccagaccgggaagaucgccgacuacaacuacaagcugccggacgacuucacgggcugcgugaucgcguggaacagcaacaaccucgacuccaaggucgggggcaacuacaacuaccuguaccgccuguuccgcaagagcaaccucaagcccuucgagcgggacaucuccaccgagaucuaccaggccggcagcacccccugcaacgggguggagggcuucaacugcuacuucccccugcaguccuacggguuccagccgaccuacggcgugggguaccagcccuaccggguggucgugcugagcuucgagcuccugcacgcccccgccacggugugcggccccaagaaguccaccaaccuggucaagaacaagugcgugaacuucaacuucaacggccucaccgggaccggcgugcugaccgagagcaacaagaaguuccugccguuccagcaguucgggcgcgacaucgacgacacgaccgacgcgguccgcgacccccagacccuggagauccucgacaucacccccugcagcuucggcgggguguccgugaucacgccgggcaccaacaccagcaaccaggucgccgugcuguaccagggcgugaacugcaccgagguccccguggccauccacgccgaccagcugacgcccaccuggcggguguacuccaccggcagcaacgucuuccagacccgcgccgggugccucaucggcgcggagcacgugaacaacuccuacgagugcgacauccccaucggggccggcaucugcgccagcuaccagacgcagaccaacucccaccggcgcgcccggagcguggcgucccagagcaucaucgccuacaccaugucccugggcgccgagaacagcgucgccuacuccaacaacagcaucgccauccccaucaacuucacgaucuccgugaccaccgagauccugcccgugagcaugaccaagacgagcgucgacugcaccauguacaucugcggggacuccaccgagugcagcaaccuccugcugcaguacggcuccuucugcacccagcucaaccgcgcgcugacggggaucgccguggagcaggacaagaacacccaggagguguucgcccaggucaagcagaucuacaagacgcccccgaucaaggacuucggcggguucaacuucagccagauccugcccgaccccuccaagcccagcaagcgguccuucaucgaggaccuccuguucaacaaggugacccuggccgacgccggcuucaucaagcaguacggcgacugccucggggacaucgcggcccgcgaccugaucugcgcccagaaguucaacggccugaccgugcucccgccccugcugaccgacgagaugaucgcccaguacaccagcgcccuccuggcggggaccaucacguccggcuggaccuucggggccggcgccgcccugcagauccccuucgcgaugcagauggccuaccgguucaacggcaucggggucacccagaacgugcucuacgagaaccagaagcugaucgccaaccaguucaacagcgccaucggcaagauccaggacucccugagcuccaccgccagcgcgcucgggaagcugcaggacguggucaaccagaacgcccaggcccugaacacgcucgugaagcagcuguccagcaacuucggcgccaucuccagcgugcugaacgacauccucgcccgccuggacaaggucgaggccgaggugcagaucgaccggcugaucaccgggcgccuccagagccugcagaccuacgugacccagcagcugauccgggcggccgagauccgcgccagcgccaaccucgccgcgaccaagauguccgagugcguccugggccagagcaagcggguggacuucugcggcaagggguaccaccugauguccuucccccagagcgccccgcacggcguggucuuccuccacgugacguacguccccgcccaggagaagaacuucaccaccgcccccgcgaucugccacgacgggaaggcccacuucccccgcgagggcguguucguguccaacgggacccacugguucgucacgcagcggaacuucuacgagccgcagaucaucaccacccacaacaccuucgugagcggcaacugcgacguggucaucggcaucgugaacaacacgguguacgacccccugcagcccgagcuggacuccuucaaggaggagcucgacaaguacuucaagaaccacaccagccccgacgucgaccugggggacaucuccggcaucaacgccagcguggugaacauccagaaggagaucgaccgccugaacgaggucgccaagaaccucaacgagucccugaucgaccugcaggagcucgggaaguacgagcaguacaucaaguggccgugguacaucuggcugggcuucaucgccggccugaucgcgaucgugauggugaccaucaugcucugcugcaugaccagcugcugcuccugccugaaggggugcugcagcugcggcuccugcugcaaguucgacgaggacgacagcgagcccguccugaagggggugaagcuccacuacacgugaggacuaguguccaccugucccuccugggcugcuggauugucucguuuuccugccaaauaaacaggaucagcgcuuuacagaucuaaaaaaaaaaaaaaaaaaaaaaaaaaaaaaaaaaaaaaaaaaaaaaaaaaaaaaaaaaaaaaaaaaaaaaaaaaaaaaaaaaaaaaaaaaaaaaaaaaaa

SEQ ID NO: 25182 - RNA, 4105 nt, Artificial Sequence
  SARS-CoV-2/Wuhan/WIV05/2019__EPI_ISL_402128 spike protein mRNA gc (1-1273)(K417N_E484K_N501Y_D614G)
aggagacccgugacccggaaguuguacggcuacgcgacuuucccucccacaaacccucgcgcccuuccuuuccuacuugggcccggcagaaagcuuaccauguucguguuccugguccuccugccccuggugagcucccagugcgugaaccucaccacccgcacgcagcugccgcccgccuacaccaacagcuucacccggggcgucuacuaccccgacaagguguuccgcuccagcgugcugcacuccacccaggaccucuuccugcccuucuucagcaacgucacgugguuccacgccauccacguguccgggaccaacggcaccaagcgguucgacaacccggugcugcccuucaacgacggggucuacuucgcgagcaccgagaaguccaacaucauccgcggcuggaucuucgggacgacccucgacagcaagacccagucccugcugaucgugaacaacgccaccaacguggucaucaaggugugcgaguuccaguucugcaacgaccccuuccucggcguguacuaccacaagaacaacaagagcuggauggaguccgaguuccgggucuacagcuccgccaacaacugcacguucgaguacgugagccagcccuuccugauggaccuggagggcaagcaggggaacuucaagaaccuccgcgaguucguguucaagaacaucgacggcuacuucaagaucuacuccaagcacaccccgaucaaccugguccgggaccugccccagggguucagcgcccucgagccccugguggaccugcccaucggcaucaacaucacccgcuuccagacccuccuggcccugcaccgguccuaccucacgccgggggacagcagcuccggcuggaccgcgggcgccgccgccuacuacgugggguaccugcagccccgcaccuuccugcucaaguacaacgagaacggcaccaucacggacgcggucgacugcgcccuggacccccugagcgagaccaagugcacccucaaguccuucaccguggagaaggggaucuaccagacgagcaacuuccgggugcagcccaccgaguccaucguccgcuucccgaacaucaccaaccugugccccuucggcgagguguucaacgccacccgguucgccagcgucuacgccuggaaccgcaagcggaucuccaacugcguggcggacuacagcgugcuguacaacuccgccagcuucuccacguucaagugcuacggcgucagccccaccaagcucaacgaccugugcuucaccaacguguacgccgacuccuucgugauccgcggggacgagguccggcagaucgcccccggccagaccgggaacaucgccgacuacaacuacaagcugccggacgacuucacgggcugcgugaucgcguggaacagcaacaaccucgacuccaaggucgggggcaacuacaacuaccuguaccgccuguuccgcaagagcaaccucaagcccuucgagcgggacaucuccaccgagaucuaccaggccggcagcacccccugcaacggggugaagggcuucaacugcuacuucccccugcaguccuacggguuccagccgaccuacggcgugggguaccagcccuaccggguggucgugcugagcuucgagcuccugcacgcccccgccacggugugcggccccaagaaguccaccaaccuggucaagaacaagugcgugaacuucaacuucaacggccucaccgggaccggcgugcugaccgagagcaacaagaaguuccugccguuccagcaguucgggcgcgacaucgccgacacgaccgacgcgguccgcgacccccagacccuggagauccucgacaucacccccugcagcuucggcgggguguccgugaucacgccgggcaccaacaccagcaaccaggucgccgugcuguaccagggcgugaacugcaccgagguccccguggccauccacgccgaccagcugacgcccaccuggcggguguacuccaccggcagcaacgucuuccagacccgcgccgggugccucaucggcgcggagcacgugaacaacuccuacgagugcgacauccccaucggggccggcaucugcgccagcuaccagacgcagaccaacuccccgcggcgcgcccggagcguggcgucccagagcaucaucgccuacaccaugucccugggcgccgagaacagcgucgccuacuccaacaacagcaucgccauccccaccaacuucacgaucuccgugaccaccgagauccugcccgugagcaugaccaagacgagcgucgacugcaccauguacaucugcggggacuccaccgagugcagcaaccuccugcugcaguacggcuccuucugcacccagcucaaccgcgcgcugacggggaucgccguggagcaggacaagaacacccaggagguguucgcccaggucaagcagaucuacaagacgcccccgaucaaggacuucggcggguucaacuucagccagauccugcccgaccccuccaagcccagcaagcgguccuucaucgaggaccuccuguucaacaaggugacccuggccgacgccggcuucaucaagcaguacggcgacugccucggggacaucgcggcccgcgaccugaucugcgcccagaaguucaacggccugaccgugcucccgccccugcugaccgacgagaugaucgcccaguacaccagcgcccuccuggcggggaccaucacguccggcuggaccuucggggccggcgccgcccugcagauccccuucgcgaugcagauggccuaccgguucaacggcaucggggucacccagaacgugcucuacgagaaccagaagcugaucgccaaccaguucaacagcgccaucggcaagauccaggacucccugagcuccaccgccagcgcgcucgggaagcugcaggacguggucaaccagaacgcccaggcccugaacacgcucgugaagcagcuguccagcaacuucggcgccaucuccagcgugcugaacgacauccucucccgccuggacaaggucgaggccgaggugcagaucgaccggcugaucaccgggcgccuccagagccugcagaccuacgugacccagcagcugauccgggcggccgagauccgcgccagcgccaaccucgccgcgaccaagauguccgagugcguccugggccagagcaagcggguggacuucugcggcaagggguaccaccugauguccuucccccagagcgccccgcacggcguggucuuccuccacgugacguacguccccgcccaggagaagaacuucaccaccgcccccgcgaucugccacgacgggaaggcccacuucccccgcgagggcguguucguguccaacgggacccacugguucgucacgcagcggaacuucuacgagccgcagaucaucaccaccgacaacaccuucgugagcggcaacugcgacguggucaucggcaucgugaacaacacgguguacgacccccugcagcccgagcuggacuccuucaaggaggagcucgacaaguacuucaagaaccacaccagccccgacgucgaccugggggacaucuccggcaucaacgccagcguggugaacauccagaaggagaucgaccgccugaacgaggucgccaagaaccucaacgagucccugaucgaccugcaggagcucgggaaguacgagcaguacaucaaguggccgugguacaucuggcugggcuucaucgccggccugaucgcgaucgugauggugaccaucaugcucugcugcaugaccagcugcugcuccugccugaaggggugcugcagcugcggcuccugcugcaaguucgacgaggacgacagcgagcccguccugaagggggugaagcuccacuacacgugaggacuaguguccaccugucccuccugggcugcuggauugucucguuuuccugccaaauaaacaggaucagcgcuuuacagaucuaaaaaaaaaaaaaaaaaaaaaaaaaaaaaaaaaaaaaaaaaaaaaaaaaaaaaaaaaaaaaaaaaaaaaaaaaaaaaaaaaaaaaaaaaaaaaaaaaaaa

SEQ ID NO: 25183 - RNA, 4096 nt, Artificial Sequence
  SARS-CoV-2/Wuhan/WIV05/2019__EPI_ISL_402128 spike protein mRNA gc (1-1273)(L18F_D80A_D215G_L242del_A243del_L244del_R246I_K417N_E484 K_N501Y_D614G_A701V)
aggagacccgugacccggaaguuguacggcuacgcgacuuucccucccacaaacccucgcgcccuuccuuuccuacuugggcccggcagaaagcuuaccauguucguguuccugguccuccugccccuggugagcucccagugcgugaacuucaccacccgcacgcagcugccgcccgccuacaccaacagcuucacccggggcgucuacuaccccgacaagguguuccgcuccagcgugcugcacuccacccaggaccucuuccugcccuucuucagcaacgucacgugguuccacgccauccacguguccgggaccaacggcaccaagcgguucgccaacccggugcugcccuucaacgacggggucuacuucgcgagcaccgagaaguccaacaucauccgcggcuggaucuucgggacgacccucgacagcaagacccagucccugcugaucgugaacaacgccaccaacguggucaucaaggugugcgaguuccaguucugcaacgaccccuuccucggcguguacuaccacaagaacaacaagagcuggauggaguccgaguuccgggucuacagcuccgccaacaacugcacguucgaguacgugagccagcccuuccugauggaccuggagggcaagcaggggaacuucaagaaccuccgcgaguucguguucaagaacaucgacggcuacuucaagaucuacuccaagcacaccccgaucaaccugguccggggccugccccagggguucagcgcccucgagccccugguggaccugcccaucggcaucaacaucacccgcuuccagacccuccacaucuccuaccucacgccgggggacagcagcuccggcuggaccgcgggcgccgccgccuacuacgugggguaccugcagccccgcaccuuccugcucaaguacaacgagaacggcaccaucacggacgcggucgacugcgcccuggacccccugagcgagaccaagugcacccucaaguccuucaccguggagaaggggaucuaccagacgagcaacuuccgggugcagcccaccgaguccaucguccgcuucccgaacaucaccaaccugugccccuucggcgagguguucaacgccacccgguucgccagcgucuacgccuggaaccgcaagcggaucuccaacugcguggcggacuacagcgugcuguacaacuccgccagcuucuccacguucaagugcuacggcgucagccccaccaagcucaacgaccugugcuucaccaacguguacgccgacuccuucgugauccgcggggacgagguccggcagaucgcccccggccagaccgggaacaucgccgacuacaacuacaagcugccggacgacuucacgggcugcgugaucgcguggaacagcaacaaccucgacuccaaggucgggggcaacuacaacuaccuguaccgccuguuccgcaagagcaaccucaagcccuucgagcgggacaucuccaccgagaucuaccaggccggcagcacccccugcaacggggugaagggcuucaacugcuacuucccccugcaguccuacggguuccagccgaccuacggcgugggguaccagcccuaccggguggucgugcugagcuucgagcuccugcacgcccccgccacggugugcggccccaagaaguccaccaaccuggucaagaacaagugcgugaacuucaacuucaacggccucaccgggaccggcgugcugaccgagagcaacaagaaguuccugccguuccagcaguucgggcgcgacaucgccgacacgaccgacgcgguccgcgacccccagacccuggagauccucgacaucacccccugcagcuucggcgggguguccgugaucacgccgggcaccaacaccagcaaccaggucgccgugcuguaccagggcgugaacugcaccgagguccccguggccauccacgccgaccagcugacgcccaccuggcggguguacuccaccggcagcaacgucuuccagacccgcgccgggugccucaucggcgcggagcacgugaacaacuccuacgagugcgacauccccaucggggccggcaucugcgccagcuaccagacgcagaccaacuccccgcggcgcgcccggagcguggcgucccagagcaucaucgccuacaccaugucccugggcguggagaacagcgucgccuacuccaacaacagcaucgccauccccaccaacuucacgaucuccgugaccaccgagauccugcccgugagcaugaccaagacgagcgucgacugcaccauguacaucugcggggacuccaccgagugcagcaaccuccugcugcaguacggcuccuucugcacccagcucaaccgcgcgcugacggggaucgccguggagcaggacaagaacacccaggagguguucgcccaggucaagcagaucuacaagacgcccccgaucaaggacuucggcggguucaacuucagccagauccugcccgaccccuccaagcccagcaagcgguccuucaucgaggaccuccuguucaacaaggugacccuggccgacgccggcuucaucaagcaguacggcgacugccucggggacaucgcggcccgcgaccugaucugcgcccagaaguucaacggccugaccgugcucccgccccugcugaccgacgagaugaucgcccaguacaccagcgcccuccuggcggggaccaucacguccggcuggaccuucggggccggcgccgcccugcagauccccuucgcgaugcagauggccuaccgguucaacggcaucggggucacccagaacgugcucuacgagaaccagaagcugaucgccaaccaguucaacagcgccaucggcaagauccaggacucccugagcuccaccgccagcgcgcucgggaagcugcaggacguggucaaccagaacgcccaggcccugaacacgcucgugaagcagcuguccagcaacuucggcgccaucuccagcgugcugaacgacauccucucccgccuggacaaggucgaggccgaggugcagaucgaccggcugaucaccgggcgccuccagagccugcagaccuacgugacccagcagcugauccgggcggccgagauccgcgccagcgccaaccucgccgcgaccaagauguccgagugcguccugggccagagcaagcggguggacuucugcggcaagggguaccaccugauguccuucccccagagcgccccgcacggcguggucuuccuccacgugacguacguccccgcccaggagaagaacuucaccaccgcccccgcgaucugccacgacgggaaggcccacuucccccgcgagggcguguucguguccaacgggacccacugguucgucacgcagcggaacuucuacgagccgcagaucaucaccaccgacaacaccuucgugagcggcaacugcgacguggucaucggcaucgugaacaacacgguguacgacccccugcagcccgagcuggacuccuucaaggaggagcucgacaaguacuucaagaaccacaccagccccgacgucgaccugggggacaucuccggcaucaacgccagcguggugaacauccagaaggagaucgaccgccugaacgaggucgccaagaaccucaacgagucccugaucgaccugcaggagcucgggaaguacgagcaguacaucaaguggccgugguacaucuggcugggcuucaucgccggccugaucgcgaucgugauggugaccaucaugcucugcugcaugaccagcugcugcuccugccugaaggggugcugcagcugcggcuccugcugcaaguucgacgaggacgacagcgagcccguccugaagggggugaagcuccacuacacgugaggacuaguguccaccugucccuccugggcugcuggauugucucguuuuccugccaaauaaacaggaucagcgcuuuacagaucuaaaaaaaaaaaaaaaaaaaaaaaaaaaaaaaaaaaaaaaaaaaaaaaaaaaaaaaaaaaaaaaaaaaaaaaaaaaaaaaaaaaaaaaaaaaaaaaaaaaa

SEQ ID NO: 25184 - RNA, 4105 nt, Artificial Sequence
  SARS-CoV-2/Wuhan/WIV05/2019__EPI_ISL_402128 spike protein mRNA gc (1-1273)(E484K_D614G)
aggagacccgugacccggaaguuguacggcuacgcgacuuucccucccacaaacccucgcgcccuuccuuuccuacuugggcccggcagaaagcuuaccauguucguguuccugguccuccugccccuggugagcucccagugcgugaaccucaccacccgcacgcagcugccgcccgccuacaccaacagcuucacccggggcgucuacuaccccgacaagguguuccgcuccagcgugcugcacuccacccaggaccucuuccugcccuucuucagcaacgucacgugguuccacgccauccacguguccgggaccaacggcaccaagcgguucgacaacccggugcugcccuucaacgacggggucuacuucgcgagcaccgagaaguccaacaucauccgcggcuggaucuucgggacgacccucgacagcaagacccagucccugcugaucgugaacaacgccaccaacguggucaucaaggugugcgaguuccaguucugcaacgaccccuuccucggcguguacuaccacaagaacaacaagagcuggauggaguccgaguuccgggucuacagcuccgccaacaacugcacguucgaguacgugagccagcccuuccugauggaccuggagggcaagcaggggaacuucaagaaccuccgcgaguucguguucaagaacaucgacggcuacuucaagaucuacuccaagcacaccccgaucaaccugguccgggaccugccccagggguucagcgcccucgagccccugguggaccugcccaucggcaucaacaucacccgcuuccagacccuccuggcccugcaccgguccuaccucacgccgggggacagcagcuccggcuggaccgcgggcgccgccgccuacuacgugggguaccugcagccccgcaccuuccugcucaaguacaacgagaacggcaccaucacggacgcggucgacugcgcccuggacccccugagcgagaccaagugcacccucaaguccuucaccguggagaaggggaucuaccagacgagcaacuuccgggugcagcccaccgaguccaucguccgcuucccgaacaucaccaaccugugccccuucggcgagguguucaacgccacccgguucgccagcgucuacgccuggaaccgcaagcggaucuccaacugcguggcggacuacagcgugcuguacaacuccgccagcuucuccacguucaagugcuacggcgucagccccaccaagcucaacgaccugugcuucaccaacguguacgccgacuccuucgugauccgcggggacgagguccggcagaucgcccccggccagaccgggaagaucgccgacuacaacuacaagcugccggacgacuucacgggcugcgugaucgcguggaacagcaacaaccucgacuccaaggucgggggcaacuacaacuaccuguaccgccuguuccgcaagagcaaccucaagcccuucgagcgggacaucuccaccgagaucuaccaggccggcagcacccccugcaacggggugaagggcuucaacugcuacuucccccugcaguccuacggguuccagccgaccaacggcgugggguaccagcccuaccggguggucgugcugagcuucgagcuccugcacgcccccgccacggugugcggccccaagaaguccaccaaccuggucaagaacaagugcgugaacuucaacuucaacggccucaccgggaccggcgugcugaccgagagcaacaagaaguuccugccguuccagcaguucgggcgcgacaucgccgacacgaccgacgcgguccgcgacccccagacccuggagauccucgacaucacccccugcagcuucggcgggguguccgugaucacgccgggcaccaacaccagcaaccaggucgccgugcuguaccagggcgugaacugcaccgagguccccguggccauccacgccgaccagcugacgcccaccuggcggguguacuccaccggcagcaacgucuuccagacccgcgccgggugccucaucggcgcggagcacgugaacaacuccuacgagugcgacauccccaucggggccggcaucugcgccagcuaccagacgcagaccaacuccccgcggcgcgcccggagcguggcgucccagagcaucaucgccuacaccaugucccugggcgccgagaacagcgucgccuacuccaacaacagcaucgccauccccaccaacuucacgaucuccgugaccaccgagauccugcccgugagcaugaccaagacgagcgucgacugcaccauguacaucugcggggacuccaccgagugcagcaaccuccugcugcaguacggcuccuucugcacccagcucaaccgcgcgcugacggggaucgccguggagcaggacaagaacacccaggagguguucgcccaggucaagcagaucuacaagacgcccccgaucaaggacuucggcggguucaacuucagccagauccugcccgaccccuccaagcccagcaagcgguccuucaucgaggaccuccuguucaacaaggugacccuggccgacgccggcuucaucaagcaguacggcgacugccucggggacaucgcggcccgcgaccugaucugcgcccagaaguucaacggccugaccgugcucccgccccugcugaccgacgagaugaucgcccaguacaccagcgcccuccuggcggggaccaucacguccggcuggaccuucggggccggcgccgcccugcagauccccuucgcgaugcagauggccuaccgguucaacggcaucggggucacccagaacgugcucuacgagaaccagaagcugaucgccaaccaguucaacagcgccaucggcaagauccaggacucccugagcuccaccgccagcgcgcucgggaagcugcaggacguggucaaccagaacgcccaggcccugaacacgcucgugaagcagcuguccagcaacuucggcgccaucuccagcgugcugaacgacauccucucccgccuggacaaggucgaggccgaggugcagaucgaccggcugaucaccgggcgccuccagagccugcagaccuacgugacccagcagcugauccgggcggccgagauccgcgccagcgccaaccucgccgcgaccaagauguccgagugcguccugggccagagcaagcggguggacuucugcggcaagggguaccaccugauguccuucccccagagcgccccgcacggcguggucuuccuccacgugacguacguccccgcccaggagaagaacuucaccaccgcccccgcgaucugccacgacgggaaggcccacuucccccgcgagggcguguucguguccaacgggacccacugguucgucacgcagcggaacuucuacgagccgcagaucaucaccaccgacaacaccuucgugagcggcaacugcgacguggucaucggcaucgugaacaacacgguguacgacccccugcagcccgagcuggacuccuucaaggaggagcucgacaaguacuucaagaaccacaccagccccgacgucgaccugggggacaucuccggcaucaacgccagcguggugaacauccagaaggagaucgaccgccugaacgaggucgccaagaaccucaacgagucccugaucgaccugcaggagcucgggaaguacgagcaguacaucaaguggccgugguacaucuggcugggcuucaucgccggccugaucgcgaucgugauggugaccaucaugcucugcugcaugaccagcugcugcuccugccugaaggggugcugcagcugcggcuccugcugcaaguucgacgaggacgacagcgagcccguccugaagggggugaagcuccacuacacgugaggacuaguguccaccugucccuccugggcugcuggauugucucguuuuccugccaaauaaacaggaucagcgcuuuacagaucuaaaaaaaaaaaaaaaaaaaaaaaaaaaaaaaaaaaaaaaaaaaaaaaaaaaaaaaaaaaaaaaaaaaaaaaaaaaaaaaaaaaaaaaaaaaaaaaaaaaa

SEQ ID NO: 25185 - RNA, 4105 nt, Artificial Sequence
  SARS-CoV-2/Wuhan/WIV05/2019__EPI_ISL_402128 spike protein mRNA gc (1-1273)(L18F_T20N_P26S_D138Y_R190S_K417T_E484K_N501Y_D614G_H655Y _T1027I)
aggagacccgugacccggaaguuguacggcuacgcgacuuucccucccacaaacccucgcgcccuuccuuuccuacuugggcccggcagaaagcuuaccauguucguguuccugguccuccugccccuggugagcucccagugcgugaacuucaccaaccgcacgcagcugccgagcgccuacaccaacagcuucacccggggcgucuacuaccccgacaagguguuccgcuccagcgugcugcacuccacccaggaccucuuccugcccuucuucagcaacgucacgugguuccacgccauccacguguccgggaccaacggcaccaagcgguucgacaacccggugcugcccuucaacgacggggucuacuucgcgagcaccgagaaguccaacaucauccgcggcuggaucuucgggacgacccucgacagcaagacccagucccugcugaucgugaacaacgccaccaacguggucaucaaggugugcgaguuccaguucugcaacuaccccuuccucggcguguacuaccacaagaacaacaagagcuggauggaguccgaguuccgggucuacagcuccgccaacaacugcacguucgaguacgugagccagcccuuccugauggaccuggagggcaagcaggggaacuucaagaaccucagcgaguucguguucaagaacaucgacggcuacuucaagaucuacuccaagcacaccccgaucaaccugguccgggaccugccccagggguucagcgcccucgagccccugguggaccugcccaucggcaucaacaucacccgcuuccagacccuccuggcccugcaccgguccuaccucacgccgggggacagcagcuccggcuggaccgcgggcgccgccgccuacuacgugggguaccugcagccccgcaccuuccugcucaaguacaacgagaacggcaccaucacggacgcggucgacugcgcccuggacccccugagcgagaccaagugcacccucaaguccuucaccguggagaaggggaucuaccagacgagcaacuuccgggugcagcccaccgaguccaucguccgcuucccgaacaucaccaaccugugccccuucggcgagguguucaacgccacccgguucgccagcgucuacgccuggaaccgcaagcggaucuccaacugcguggcggacuacagcgugcuguacaacuccgccagcuucuccacguucaagugcuacggcgucagccccaccaagcucaacgaccugugcuucaccaacguguacgccgacuccuucgugauccgcggggacgagguccggcagaucgcccccggccagaccgggaccaucgccgacuacaacuacaagcugccggacgacuucacgggcugcgugaucgcguggaacagcaacaaccucgacuccaaggucgggggcaacuacaacuaccuguaccgccuguuccgcaagagcaaccucaagcccuucgagcgggacaucuccaccgagaucuaccaggccggcagcacccccugcaacggggugaagggcuucaacugcuacuucccccugcaguccuacggguuccagccgaccuacggcgugggguaccagcccuaccggguggucgugcugagcuucgagcuccugcacgcccccgccacggugugcggccccaagaaguccaccaaccuggucaagaacaagugcgugaacuucaacuucaacggccucaccgggaccggcgugcugaccgagagcaacaagaaguuccugccguuccagcaguucgggcgcgacaucgccgacacgaccgacgcgguccgcgacccccagacccuggagauccucgacaucacccccugcagcuucggcgggguguccgugaucacgccgggcaccaacaccagcaaccaggucgccgugcuguaccagggcgugaacugcaccgagguccccguggccauccacgccgaccagcugacgcccaccuggcggguguacuccaccggcagcaacgucuuccagacccgcgccgggugccucaucggcgcggaguacgugaacaacuccuacgagugcgacauccccaucggggccggcaucugcgccagcuaccagacgcagaccaacuccccgcggcgcgcccggagcguggcgucccagagcaucaucgccuacaccaugucccugggcgccgagaacagcgucgccuacuccaacaacagcaucgccauccccaccaacuucacgaucuccgugaccaccgagauccugcccgugagcaugaccaagacgagcgucgacugcaccauguacaucugcggggacuccaccgagugcagcaaccuccugcugcaguacggcuccuucugcacccagcucaaccgcgcgcugacggggaucgccguggagcaggacaagaacacccaggagguguucgcccaggucaagcagaucuacaagacgcccccgaucaaggacuucggcggguucaacuucagccagauccugcccgaccccuccaagcccagcaagcgguccuucaucgaggaccuccuguucaacaaggugacccuggccgacgccggcuucaucaagcaguacggcgacugccucggggacaucgcggcccgcgaccugaucugcgcccagaaguucaacggccugaccgugcucccgccccugcugaccgacgagaugaucgcccaguacaccagcgcccuccuggcggggaccaucacguccggcuggaccuucggggccggcgccgcccugcagauccccuucgcgaugcagauggccuaccgguucaacggcaucggggucacccagaacgugcucuacgagaaccagaagcugaucgccaaccaguucaacagcgccaucggcaagauccaggacucccugagcuccaccgccagcgcgcucgggaagcugcaggacguggucaaccagaacgcccaggcccugaacacgcucgugaagcagcuguccagcaacuucggcgccaucuccagcgugcugaacgacauccucucccgccuggacaaggucgaggccgaggugcagaucgaccggcugaucaccgggcgccuccagagccugcagaccuacgugacccagcagcugauccgggcggccgagauccgcgccagcgccaaccucgccgcgaucaagauguccgagugcguccugggccagagcaagcggguggacuucugcggcaagggguaccaccugauguccuucccccagagcgccccgcacggcguggucuuccuccacgugacguacguccccgcccaggagaagaacuucaccaccgcccccgcgaucugccacgacgggaaggcccacuucccccgcgagggcguguucguguccaacgggacccacugguucgucacgcagcggaacuucuacgagccgcagaucaucaccaccgacaacaccuucgugagcggcaacugcgacguggucaucggcaucgugaacaacacgguguacgacccccugcagcccgagcuggacuccuucaaggaggagcucgacaaguacuucaagaaccacaccagccccgacgucgaccugggggacaucuccggcaucaacgccagcguggugaacauccagaaggagaucgaccgccugaacgaggucgccaagaaccucaacgagucccugaucgaccugcaggagcucgggaaguacgagcaguacaucaaguggccgugguacaucuggcugggcuucaucgccggccugaucgcgaucgugauggugaccaucaugcucugcugcaugaccagcugcugcuccugccugaaggggugcugcagcugcggcuccugcugcaaguucgacgaggacgacagcgagcccguccugaagggggugaagcuccacuacacgugaggacuaguguccaccugucccuccugggcugcuggauugucucguuuuccugccaaauaaacaggaucagcgcuuuacagaucuaaaaaaaaaaaaaaaaaaaaaaaaaaaaaaaaaaaaaaaaaaaaaaaaaaaaaaaaaaaaaaaaaaaaaaaaaaaaaaaaaaaaaaaaaaaaaaaaaaaa

SEQ ID NO: 25186 - RNA, 4105 nt, Artificial Sequence
  SARS-CoV-2/Wuhan/WIV05/2019__EPI_ISL_402128 spike protein mRNA gc (1-1273)(S13I_W152C_L452R_D614G)
aggagacccgugacccggaaguuguacggcuacgcgacuuucccucccacaaacccucgcgcccuuccuuuccuacuugggcccggcagaaagcuuaccauguucguguuccugguccuccugccccuggugagcauccagugcgugaaccucaccacccgcacgcagcugccgcccgccuacaccaacagcuucacccggggcgucuacuaccccgacaagguguuccgcuccagcgugcugcacuccacccaggaccucuuccugcccuucuucagcaacgucacgugguuccacgccauccacguguccgggaccaacggcaccaagcgguucgacaacccggugcugcccuucaacgacggggucuacuucgcgagcaccgagaaguccaacaucauccgcggcuggaucuucgggacgacccucgacagcaagacccagucccugcugaucgugaacaacgccaccaacguggucaucaaggugugcgaguuccaguucugcaacgaccccuuccucggcguguacuaccacaagaacaacaagagcugcauggaguccgaguuccgggucuacagcuccgccaacaacugcacguucgaguacgugagccagcccuuccugauggaccuggagggcaagcaggggaacuucaagaaccuccgcgaguucguguucaagaacaucgacggcuacuucaagaucuacuccaagcacaccccgaucaaccugguccgggaccugccccagggguucagcgcccucgagccccugguggaccugcccaucggcaucaacaucacccgcuuccagacccuccuggcccugcaccgguccuaccucacgccgggggacagcagcuccggcuggaccgcgggcgccgccgccuacuacgugggguaccugcagccccgcaccuuccugcucaaguacaacgagaacggcaccaucacggacgcggucgacugcgcccuggacccccugagcgagaccaagugcacccucaaguccuucaccguggagaaggggaucuaccagacgagcaacuuccgggugcagcccaccgaguccaucguccgcuucccgaacaucaccaaccugugccccuucggcgagguguucaacgccacccgguucgccagcgucuacgccuggaaccgcaagcggaucuccaacugcguggcggacuacagcgugcuguacaacuccgccagcuucuccacguucaagugcuacggcgucagccccaccaagcucaacgaccugugcuucaccaacguguacgccgacuccuucgugauccgcggggacgagguccggcagaucgcccccggccagaccgggaagaucgccgacuacaacuacaagcugccggacgacuucacgggcugcgugaucgcguggaacagcaacaaccucgacuccaaggucgggggcaacuacaacuaccgcuaccgccuguuccgcaagagcaaccucaagcccuucgagcgggacaucuccaccgagaucuaccaggccggcagcacccccugcaacgggguggagggcuucaacugcuacuucccccugcaguccuacggguuccagccgaccaacggcgugggguaccagcccuaccggguggucgugcugagcuucgagcuccugcacgcccccgccacggugugcggccccaagaaguccaccaaccuggucaagaacaagugcgugaacuucaacuucaacggccucaccgggaccggcgugcugaccgagagcaacaagaaguuccugccguuccagcaguucgggcgcgacaucgccgacacgaccgacgcgguccgcgacccccagacccuggagauccucgacaucacccccugcagcuucggcgggguguccgugaucacgccgggcaccaacaccagcaaccaggucgccgugcuguaccagggcgugaacugcaccgagguccccguggccauccacgccgaccagcugacgcccaccuggcggguguacuccaccggcagcaacgucuuccagacccgcgccgggugccucaucggcgcggagcacgugaacaacuccuacgagugcgacauccccaucggggccggcaucugcgccagcuaccagacgcagaccaacuccccgcggcgcgcccggagcguggcgucccagagcaucaucgccuacaccaugucccugggcgccgagaacagcgucgccuacuccaacaacagcaucgccauccccaccaacuucacgaucuccgugaccaccgagauccugcccgugagcaugaccaagacgagcgucgacugcaccauguacaucugcggggacuccaccgagugcagcaaccuccugcugcaguacggcuccuucugcacccagcucaaccgcgcgcugacggggaucgccguggagcaggacaagaacacccaggagguguucgcccaggucaagcagaucuacaagacgcccccgaucaaggacuucggcggguucaacuucagccagauccugcccgaccccuccaagcccagcaagcgguccuucaucgaggaccuccuguucaacaaggugacccuggccgacgccggcuucaucaagcaguacggcgacugccucggggacaucgcggcccgcgaccugaucugcgcccagaaguucaacggccugaccgugcucccgccccugcugaccgacgagaugaucgcccaguacaccagcgcccuccuggcggggaccaucacguccggcuggaccuucggggccggcgccgcccugcagauccccuucgcgaugcagauggccuaccgguucaacggcaucggggucacccagaacgugcucuacgagaaccagaagcugaucgccaaccaguucaacagcgccaucggcaagauccaggacucccugagcuccaccgccagcgcgcucgggaagcugcaggacguggucaaccagaacgcccaggcccugaacacgcucgugaagcagcuguccagcaacuucggcgccaucuccagcgugcugaacgacauccucucccgccuggacaaggucgaggccgaggugcagaucgaccggcugaucaccgggcgccuccagagccugcagaccuacgugacccagcagcugauccgggcggccgagauccgcgccagcgccaaccucgccgcgaccaagauguccgagugcguccugggccagagcaagcggguggacuucugcggcaagggguaccaccugauguccuucccccagagcgccccgcacggcguggucuuccuccacgugacguacguccccgcccaggagaagaacuucaccaccgcccccgcgaucugccacgacgggaaggcccacuucccccgcgagggcguguucguguccaacgggacccacugguucgucacgcagcggaacuucuacgagccgcagaucaucaccaccgacaacaccuucgugagcggcaacugcgacguggucaucggcaucgugaacaacacgguguacgacccccugcagcccgagcuggacuccuucaaggaggagcucgacaaguacuucaagaaccacaccagccccgacgucgaccugggggacaucuccggcaucaacgccagcguggugaacauccagaaggagaucgaccgccugaacgaggucgccaagaaccucaacgagucccugaucgaccugcaggagcucgggaaguacgagcaguacaucaaguggccgugguacaucuggcugggcuucaucgccggccugaucgcgaucgugauggugaccaucaugcucugcugcaugaccagcugcugcuccugccugaaggggugcugcagcugcggcuccugcugcaaguucgacgaggacgacagcgagcccguccugaagggggugaagcuccacuacacgugaggacuaguguccaccugucccuccugggcugcuggauugucucguuuuccugccaaauaaacaggaucagcgcuuuacagaucuaaaaaaaaaaaaaaaaaaaaaaaaaaaaaaaaaaaaaaaaaaaaaaaaaaaaaaaaaaaaaaaaaaaaaaaaaaaaaaaaaaaaaaaaaaaaaaaaaaaa

SEQ ID NO: 25187 - RNA, 4105 nt, Artificial Sequence; identical to SEQ ID NO: 25169
  SARS-CoV-2/Wuhan/WIV05/2019__EPI_ISL_402128 spike protein mRNA gc (1-1273)

SEQ ID NO: 25188 - RNA, 4105 nt, Artificial Sequence
  SARS-CoV-2/Wuhan/WIV05/2019__EPI_ISL_402128 spike protein mRNA gc (1-1273)(D614G)
aggagacccgugacccggaaguuguacggcuacgcgacuuucccucccacaaacccucgcgcccuuccuuuccuacuugggcccggcagaaagcuuaccauguucguguuccugguccuccugccccuggugagcucccagugcgugaaccucaccacccgcacgcagcugccgcccgccuacaccaacagcuucacccggggcgucuacuaccccgacaagguguuccgcuccagcgugcugcacuccacccaggaccucuuccugcccuucuucagcaacgucacgugguuccacgccauccacguguccgggaccaacggcaccaagcgguucgacaacccggugcugcccuucaacgacggggucuacuucgcgagcaccgagaaguccaacaucauccgcggcuggaucuucgggacgacccucgacagcaagacccagucccugcugaucgugaacaacgccaccaacguggucaucaaggugugcgaguuccaguucugcaacgaccccuuccucggcguguacuaccacaagaacaacaagagcuggauggaguccgaguuccgggucuacagcuccgccaacaacugcacguucgaguacgugagccagcccuuccugauggaccuggagggcaagcaggggaacuucaagaaccuccgcgaguucguguucaagaacaucgacggcuacuucaagaucuacuccaagcacaccccgaucaaccugguccgggaccugccccagggguucagcgcccucgagccccugguggaccugcccaucggcaucaacaucacccgcuuccagacccuccuggcccugcaccgguccuaccucacgccgggggacagcagcuccggcuggaccgcgggcgccgccgccuacuacgugggguaccugcagccccgcaccuuccugcucaaguacaacgagaacggcaccaucacggacgcggucgacugcgcccuggacccccugagcgagaccaagugcacccucaaguccuucaccguggagaaggggaucuaccagacgagcaacuuccgggugcagcccaccgaguccaucguccgcuucccgaacaucaccaaccugugccccuucggcgagguguucaacgccacccgguucgccagcgucuacgccuggaaccgcaagcggaucuccaacugcguggcggacuacagcgugcuguacaacuccgccagcuucuccacguucaagugcuacggcgucagccccaccaagcucaacgaccugugcuucaccaacguguacgccgacuccuucgugauccgcggggacgagguccggcagaucgcccccggccagaccgggaagaucgccgacuacaacuacaagcugccggacgacuucacgggcugcgugaucgcguggaacagcaacaaccucgacuccaaggucgggggcaacuacaacuaccuguaccgccuguuccgcaagagcaaccucaagcccuucgagcgggacaucuccaccgagaucuaccaggccggcagcacccccugcaacgggguggagggcuucaacugcuacuucccccugcaguccuacggguuccagccgaccaacggcgugggguaccagcccuaccggguggucgugcugagcuucgagcuccugcacgcccccgccacggugugcggccccaagaaguccaccaaccuggucaagaacaagugcgugaacuucaacuucaacggccucaccgggaccggcgugcugaccgagagcaacaagaaguuccugccguuccagcaguucgggcgcgacaucgccgacacgaccgacgcgguccgcgacccccagacccuggagauccucgacaucacccccugcagcuucggcgggguguccgugaucacgccgggcaccaacaccagcaaccaggucgccgugcuguaccagggcgugaacugcaccgagguccccguggccauccacgccgaccagcugacgcccaccuggcggguguacuccaccgggagcaacgucuuccagacccgcgccggcugccucaucggggcggagcacgugaacaacuccuacgagugcgacauccccaucggcgccggcaucugcgccagcuaccagacgcagaccaacuccccgcggcgcgcccggagcguggcgucccagagcaucaucgccuacaccaugucccugggggccgagaacagcgucgccuacuccaacaacagcaucgccauccccaccaacuucacgaucuccgugaccaccgagauccugcccgugagcaugaccaagacgagcgucgacugcaccauguacaucugcggcgacuccaccgagugcagcaaccuccugcugcaguacggguccuucugcacccagcucaaccgcgcgcugacgggcaucgccguggagcaggacaagaacacccaggagguguucgcccaggucaagcagaucuacaagacgcccccgaucaaggacuucgggggcuucaacuucagccagauccugcccgaccccuccaagcccagcaagcgguccuucaucgaggaccuccuguucaacaaggugacccuggccgacgccggcuucaucaagcaguacggggacugccucggcgacaucgcggcccgcgaccugaucugcgcccagaaguucaacgggcugaccgugcucccgccccugcugaccgacgagaugaucgcccaguacaccagcgcccuccuggcgggcaccaucacguccggguggaccuucggcgccggcgccgcccugcagauccccuucgcgaugcagauggccuaccgguucaacgggaucggcgucacccagaacgugcucuacgagaaccagaagcugaucgccaaccaguucaacagcgccaucgggaagauccaggacucccugagcuccaccgccagcgcgcucggcaagcugcaggacguggucaaccagaacgcccaggcccugaacacgcucgugaagcagcuguccagcaacuucggggccaucuccagcgugcugaacgacauccucucccgccuggacaaggucgaggccgaggugcagaucgaccggcugaucaccggccgccuccagagccugcagaccuacgugacccagcagcugauccgggcggccgagauccgcgccagcgccaaccucgccgcgaccaagauguccgagugcguccugggccagagcaagcggguggacuucugcgggaagggcuaccaccugauguccuucccccagagcgccccgcacgggguggucuuccuccacgugacguacguccccgcccaggagaagaacuucaccaccgcccccgcgaucugccacgacggcaaggcccacuucccccgcgaggggguguucguguccaacggcacccacugguucgucacgcagcggaacuucuacgagccgcagaucaucaccaccgacaacaccuucgugagcggcaacugcgacguggucaucgggaucgugaacaacacgguguacgacccccugcagcccgagcuggacuccuucaaggaggagcucgacaaguacuucaagaaccacaccagccccgacgucgaccugggcgacaucuccgggaucaacgccagcguggugaacauccagaaggagaucgaccgccugaacgaggucgccaagaaccucaacgagucccugaucgaccugcaggagcucggcaaguacgagcaguacaucaaguggccgugguacaucuggcugggcuucaucgccgggcugaucgcgaucgugauggugaccaucaugcucugcugcaugaccagcugcugcuccugccugaagggcugcugcagcugcggguccugcugcaaguucgacgaggacgacagcgagcccguccugaagggcgugaagcuccacuacacgugaggacuaguguccaccugucccuccugggcugcuggauugucucguuuuccugccaaauaaacaggaucagcgcuuuacagaucuaaaaaaaaaaaaaaaaaaaaaaaaaaaaaaaaaaaaaaaaaaaaaaaaaaaaaaaaaaaaaaaaaaaaaaaaaaaaaaaaaaaaaaaaaaaaaaaaaaaa

SEQ ID NO: 25189 - RNA, 4105 nt, Artificial Sequence
  SARS-CoV-2/Wuhan/WIV05/2019__EPI_ISL_402128 spike protein mRNA gc (1-1273)(A222V_D614G)
aggagacccgugacccggaaguuguacggcuacgcgacuuucccucccacaaacccucgcgcccuuccuuuccuacuugggcccggcagaaagcuuaccauguucguguuccugguccuccugccccuggugagcucccagugcgugaaccucaccacccgcacgcagcugccgcccgccuacaccaacagcuucacccggggcgucuacuaccccgacaagguguuccgcuccagcgugcugcacuccacccaggaccucuuccugcccuucuucagcaacgucacgugguuccacgccauccacguguccgggaccaacggcaccaagcgguucgacaacccggugcugcccuucaacgacggggucuacuucgcgagcaccgagaaguccaacaucauccgcggcuggaucuucgggacgacccucgacagcaagacccagucccugcugaucgugaacaacgccaccaacguggucaucaaggugugcgaguuccaguucugcaacgaccccuuccucggcguguacuaccacaagaacaacaagagcuggauggaguccgaguuccgggucuacagcuccgccaacaacugcacguucgaguacgugagccagcccuuccugauggaccuggagggcaagcaggggaacuucaagaaccuccgcgaguucguguucaagaacaucgacggcuacuucaagaucuacuccaagcacaccccgaucaaccugguccgggaccugccccagggguucagcgugcucgagccccugguggaccugcccaucggcaucaacaucacccgcuuccagacccuccuggcccugcaccgguccuaccucacgccgggggacagcagcuccggcuggaccgccggcgcggccgccuacuacgucggguaccugcagccccgcaccuuccugcucaaguacaacgagaacggcaccaucacggacgccguggacugcgcgcuggacccccugagcgagaccaagugcacccucaaguccuucaccguggagaaggggaucuaccagacgagcaacuuccggguccagcccaccgaguccaucgugcgcuucccgaacaucaccaaccugugccccuucggcgaggucuucaacgccacccgguucgccagcguguacgccuggaaccgcaagcggaucuccaacugcguggccgacuacagcguccuguacaacuccgcgagcuucuccacguucaagugcuacggcgugagccccaccaagcucaacgaccugugcuucaccaacguguacgccgacuccuucgucauccgcggggacgaggugcggcagaucgcccccggccagaccgggaagaucgccgacuacaacuacaagcugccggacgacuucacgggcugcgugaucgccuggaacagcaacaaccucgacuccaaggucgggggcaacuacaacuaccuguaccgccuguuccgcaagagcaaccucaagcccuucgagcgggacaucuccaccgagaucuaccaggcgggcagcacccccugcaacgggguggagggcuucaacugcuacuucccccugcaguccuacggguuccagccgaccaacggcgugggguaccagcccuaccgggucguggugcugagcuucgagcuccugcacgcccccgccacggucugcggccccaagaaguccaccaaccuggugaagaacaagugcgugaacuucaacuucaacggccucaccgggaccggcguccugaccgagagcaacaagaaguuccugccguuccagcaguucgggcgcgacaucgccgacacgaccgacgccgugcgcgacccccagacccuggagauccucgacaucacccccugcagcuucggcgggguguccgucaucacgccgggcaccaacaccagcaaccagguggcggugcuguaccagggcgucaacugcaccgaggugcccguggccauccacgccgaccagcugacgcccaccuggcgggucuacuccaccgggagcaacguguuccagacccgcgccggcugccucaucggggccgagcacgugaacaacuccuacgagugcgacauccccaucggcgcgggcaucugcgccagcuaccagacgcagaccaacuccccgcggcgcgcccggagcgucgccucccagagcaucaucgcguacaccaugucccugggggccgagaacagcguggccuacuccaacaacagcaucgccauccccaccaacuucacgaucuccgugaccaccgagauccugcccgucagcaugaccaagacgagcguggacugcaccauguacaucugcggcgacuccaccgagugcagcaaccuccugcugcaguacggguccuucugcacccagcucaaccgcgcccugacgggcaucgcgguggagcaggacaagaacacccaggaggucuucgcccaggugaagcagaucuacaagacgcccccgaucaaggacuucgggggcuucaacuucagccagauccugcccgaccccuccaagcccagcaagcgguccuucaucgaggaccuccuguucaacaaggugacccuggccgacgccggcuucaucaagcaguacggggacugccucggcgacaucgccgcgcgcgaccugaucugcgcccagaaguucaacgggcugaccguccucccgccccugcugaccgacgagaugaucgcccaguacaccagcgcccuccuggccggcaccaucacguccggguggaccuucggcgcgggcgccgcccugcagauccccuucgccaugcagauggcguaccgguucaacgggaucggcgugacccagaacgugcucuacgagaaccagaagcugaucgccaaccaguucaacagcgccaucgggaagauccaggacucccugagcuccaccgccagcgcccucggcaagcugcaggacgucgugaaccagaacgcgcaggcccugaacacgcucgugaagcagcuguccagcaacuucggggccaucuccagcguccugaacgacauccucucccgccuggacaagguggaggccgaggugcagaucgaccggcugaucaccggccgccuccagagccugcagaccuacgucacccagcagcugauccgggccgcggagauccgcgccagcgccaaccucgccgccaccaagauguccgagugcgugcugggccagagcaagcggguggacuucugcgggaagggcuaccaccugauguccuucccccagagcgcgccgcacggggucguguuccuccacgucacguacgugcccgcccaggagaagaacuucaccaccgcccccgccaucugccacgacggcaaggcgcacuucccccgcgaggggguguucgucuccaacggcacccacugguucgugacgcagcggaacuucuacgagccgcagaucaucaccaccgacaacaccuucgugagcggcaacugcgacgucgugaucgggaucgugaacaacacggucuacgacccccugcagcccgagcuggacuccuucaaggaggagcucgacaaguacuucaagaaccacaccagccccgacguggaccugggcgacaucuccgggaucaacgccagcguggucaacauccagaaggagaucgaccgccugaacgagguggccaagaaccucaacgagucccugaucgaccugcaggagcucggcaaguacgagcaguacaucaaguggccgugguacaucuggcugggcuucaucgccgggcugaucgccaucgugauggucaccaucaugcucugcugcaugaccagcugcugcuccugccugaagggcugcugcagcugcggguccugcugcaaguucgacgaggacgacagcgagcccgugcugaagggcgugaagcuccacuacacgugaggacuaguguccaccugucccuccugggcugcuggauugucucguuuuccugccaaauaaacaggaucagcgcuuuacagaucuaaaaaaaaaaaaaaaaaaaaaaaaaaaaaaaaaaaaaaaaaaaaaaaaaaaaaaaaaaaaaaaaaaaaaaaaaaaaaaaaaaaaaaaaaaaaaaaaaaaa

SEQ ID NO: 25190 - RNA, 4105 nt, Artificial Sequence
  SARS-CoV-2/Wuhan/WIV05/2019__EPI_ISL_402128 spike protein mRNA gc (1-1273)(N439K_D614G)
aggagacccgugacccggaaguuguacggcuacgcgacuuucccucccacaaacccucgcgcccuuccuuuccuacuugggcccggcagaaagcuuaccauguucguguuccugguccuccugccccuggugagcucccagugcgugaaccucaccacccgcacgcagcugccgcccgccuacaccaacagcuucacccggggcgucuacuaccccgacaagguguuccgcuccagcgugcugcacuccacccaggaccucuuccugcccuucuucagcaacgucacgugguuccacgccauccacguguccgggaccaacggcaccaagcgguucgacaacccggugcugcccuucaacgacggggucuacuucgcgagcaccgagaaguccaacaucauccgcggcuggaucuucgggacgacccucgacagcaagacccagucccugcugaucgugaacaacgccaccaacguggucaucaaggugugcgaguuccaguucugcaacgaccccuuccucggcguguacuaccacaagaacaacaagagcuggauggaguccgaguuccgggucuacagcuccgccaacaacugcacguucgaguacgugagccagcccuuccugauggaccuggagggcaagcaggggaacuucaagaaccuccgcgaguucguguucaagaacaucgacggcuacuucaagaucuacuccaagcacaccccgaucaaccugguccgggaccugccccagggguucagcgcccucgagccccugguggaccugcccaucggcaucaacaucacccgcuuccagacccuccuggcccugcaccgguccuaccucacgccgggggacagcagcuccggcuggaccgcgggcgccgccgccuacuacgugggguaccugcagccccgcaccuuccugcucaaguacaacgagaacggcaccaucacggacgcggucgacugcgcccuggacccccugagcgagaccaagugcacccucaaguccuucaccguggagaaggggaucuaccagacgagcaacuuccgggugcagcccaccgaguccaucguccgcuucccgaacaucaccaaccugugccccuucggcgagguguucaacgccacccgguucgccagcgucuacgccuggaaccgcaagcggaucuccaacugcguggcggacuacagcgugcuguacaacuccgccagcuucuccacguucaagugcuacggcgucagccccaccaagcucaacgaccugugcuucaccaacguguacgccgacuccuucgugauccgcggggacgagguccggcagaucgcccccggccagaccgggaagaucgccgacuacaacuacaagcugccggacgacuucacgggcugcgugaucgcguggaacagcaagaaccucgacuccaaggucgggggcaacuacaacuaccuguaccgccuguuccgcaagagcaaccucaagcccuucgagcgggacaucuccaccgagaucuaccaggccggcagcacccccugcaacgggguggagggcuucaacugcuacuucccccugcaguccuacggguuccagccgaccaacggcgugggguaccagcccuaccggguggucgugcugagcuucgagcuccugcacgcccccgccacggugugcggccccaagaaguccaccaaccuggucaagaacaagugcgugaacuucaacuucaacggccucaccgggaccggcgugcugaccgagagcaacaagaaguuccugccguuccagcaguucgggcgcgacaucgccgacacgaccgacgcgguccgcgacccccagacccuggagauccucgacaucacccccugcagcuucggcgggguguccgugaucacgccgggcaccaacaccagcaaccaggucgccgugcuguaccagggcgugaacugcaccgagguccccguggccauccacgccgaccagcugacgcccaccuggcggguguacuccaccgggagcaacgucuuccagacccgcgccggcugccucaucggggcggagcacgugaacaacuccuacgagugcgacauccccaucggcgccggcaucugcgccagcuaccagacgcagaccaacuccccgcggcgcgcccggagcguggcgucccagagcaucaucgccuacaccaugucccugggggccgagaacagcgucgccuacuccaacaacagcaucgccauccccaccaacuucacgaucuccgugaccaccgagauccugcccgugagcaugaccaagacgagcgucgacugcaccauguacaucugcggcgacuccaccgagugcagcaaccuccugcugcaguacggguccuucugcacccagcucaaccgcgcgcugacgggcaucgccguggagcaggacaagaacacccaggagguguucgcccaggucaagcagaucuacaagacgcccccgaucaaggacuucgggggcuucaacuucagccagauccugcccgaccccuccaagcccagcaagcgguccuucaucgaggaccuccuguucaacaaggugacccuggccgacgccggcuucaucaagcaguacggggacugccucggcgacaucgcggcccgcgaccugaucugcgcccagaaguucaacgggcugaccgugcucccgccccugcugaccgacgagaugaucgcccaguacaccagcgcccuccuggcgggcaccaucacguccggguggaccuucggcgccggcgccgcccugcagauccccuucgcgaugcagauggccuaccgguucaacgggaucggcgucacccagaacgugcucuacgagaaccagaagcugaucgccaaccaguucaacagcgccaucgggaagauccaggacucccugagcuccaccgccagcgcgcucggcaagcugcaggacguggucaaccagaacgcccaggcccugaacacgcucgugaagcagcuguccagcaacuucggggccaucuccagcgugcugaacgacauccucucccgccuggacaaggucgaggccgaggugcagaucgaccggcugaucaccggccgccuccagagccugcagaccuacgugacccagcagcugauccgggcggccgagauccgcgccagcgccaaccucgccgcgaccaagauguccgagugcguccugggccagagcaagcggguggacuucugcgggaagggcuaccaccugauguccuucccccagagcgccccgcacgggguggucuuccuccacgugacguacguccccgcccaggagaagaacuucaccaccgcccccgcgaucugccacgacggcaaggcccacuucccccgcgaggggguguucguguccaacggcacccacugguucgucacgcagcggaacuucuacgagccgcagaucaucaccaccgacaacaccuucgugagcggcaacugcgacguggucaucgggaucgugaacaacacgguguacgacccccugcagcccgagcuggacuccuucaaggaggagcucgacaaguacuucaagaaccacaccagccccgacgucgaccugggcgacaucuccgggaucaacgccagcguggugaacauccagaaggagaucgaccgccugaacgaggucgccaagaaccucaacgagucccugaucgaccugcaggagcucggcaaguacgagcaguacaucaaguggccgugguacaucuggcugggcuucaucgccgggcugaucgcgaucgugauggugaccaucaugcucugcugcaugaccagcugcugcuccugccugaagggcugcugcagcugcggguccugcugcaaguucgacgaggacgacagcgagcccguccugaagggcgugaagcuccacuacacgugaggacuaguguccaccugucccuccugggcugcuggauugucucguuuuccugccaaauaaacaggaucagcgcuuuacagaucuaaaaaaaaaaaaaaaaaaaaaaaaaaaaaaaaaaaaaaaaaaaaaaaaaaaaaaaaaaaaaaaaaaaaaaaaaaaaaaaaaaaaaaaaaaaaaaaaaaaa

SEQ ID NO: 25191 - RNA, 4105 nt, Artificial Sequence
  SARS-CoV-2/Wuhan/WIV05/2019__EPI_ISL_402128 spike protein mRNA gc (1-1273)(S477N_D614G)
aggagacccgugacccggaaguuguacggcuacgcgacuuucccucccacaaacccucgcgcccuuccuuuccuacuugggcccggcagaaagcuuaccauguucguguuccugguccuccugccccuggugagcucccagugcgugaaccucaccacccgcacgcagcugccgcccgccuacaccaacagcuucacccggggcgucuacuaccccgacaagguguuccgcuccagcgugcugcacuccacccaggaccucuuccugcccuucuucagcaacgucacgugguuccacgccauccacguguccgggaccaacggcaccaagcgguucgacaacccggugcugcccuucaacgacggggucuacuucgcgagcaccgagaaguccaacaucauccgcggcuggaucuucgggacgacccucgacagcaagacccagucccugcugaucgugaacaacgccaccaacguggucaucaaggugugcgaguuccaguucugcaacgaccccuuccucggcguguacuaccacaagaacaacaagagcuggauggaguccgaguuccgggucuacagcuccgccaacaacugcacguucgaguacgugagccagcccuuccugauggaccuggagggcaagcaggggaacuucaagaaccuccgcgaguucguguucaagaacaucgacggcuacuucaagaucuacuccaagcacaccccgaucaaccugguccgggaccugccccagggguucagcgcccucgagccccugguggaccugcccaucggcaucaacaucacccgcuuccagacccuccuggcccugcaccgguccuaccucacgccgggggacagcagcuccggcuggaccgcgggcgccgccgccuacuacgugggguaccugcagccccgcaccuuccugcucaaguacaacgagaacggcaccaucacggacgcggucgacugcgcccuggacccccugagcgagaccaagugcacccucaaguccuucaccguggagaaggggaucuaccagacgagcaacuuccgggugcagcccaccgaguccaucguccgcuucccgaacaucaccaaccugugccccuucggcgagguguucaacgccacccgguucgccagcgucuacgccuggaaccgcaagcggaucuccaacugcguggcggacuacagcgugcuguacaacuccgccagcuucuccacguucaagugcuacggcgucagccccaccaagcucaacgaccugugcuucaccaacguguacgccgacuccuucgugauccgcggggacgagguccggcagaucgcccccggccagaccgggaagaucgccgacuacaacuacaagcugccggacgacuucacgggcugcgugaucgcguggaacagcaacaaccucgacuccaaggucgggggcaacuacaacuaccuguaccgccuguuccgcaagagcaaccucaagcccuucgagcgggacaucuccaccgagaucuaccaggccggcaacacccccugcaacgggguggagggcuucaacugcuacuucccccugcagagcuacggguuccagccgaccaacggcgugggguaccagcccuaccggguggucgugcuguccuucgagcuccugcacgcccccgccacggugugcggccccaagaaguccaccaaccuggucaagaacaagugcgugaacuucaacuucaacggccucaccgggaccggcgugcugaccgagagcaacaagaaguuccugccguuccagcaguucgggcgcgacaucgccgacacgaccgacgcgguccgcgacccccagacccuggagauccucgacaucacccccugcagcuucggcggggugagcgugaucacgccgggcaccaacaccuccaaccaggucgccgugcuguaccagggcgugaacugcaccgagguccccguggccauccacgccgaccagcugacgcccaccuggcggguguacagcaccggguccaacgucuuccagacccgcgccggcugccucaucggggcggagcacgugaacaacagcuacgagugcgacauccccaucggcgccggcaucugcgccuccuaccagacgcagaccaacagcccgcggcgcgcccgguccguggcgagccaguccaucaucgccuacaccaugagccugggggccgagaacuccgucgccuacagcaacaacuccaucgccauccccaccaacuucacgaucagcgugaccaccgagauccugcccguguccaugaccaagacgagcgucgacugcaccauguacaucugcggcgacagcaccgagugcuccaaccuccugcugcaguacgggagcuucugcacccagcucaaccgcgcgcugacgggcaucgccguggagcaggacaagaacacccaggagguguucgcccaggucaagcagaucuacaagacgcccccgaucaaggacuucgggggcuucaacuucucccagauccugcccgaccccagcaagcccuccaagcggagcuucaucgaggaccuccuguucaacaaggugacccuggccgacgccggcuucaucaagcaguacggggacugccucggcgacaucgcggcccgcgaccugaucugcgcccagaaguucaacgggcugaccgugcucccgccccugcugaccgacgagaugaucgcccaguacaccuccgcccuccuggcgggcaccaucacgagcggguggaccuucggcgccggcgccgcccugcagauccccuucgcgaugcagauggccuaccgguucaacgggaucggcgucacccagaacgugcucuacgagaaccagaagcugaucgccaaccaguucaacuccgccaucgggaagauccaggacagccuguccagcaccgccuccgcgcucggcaagcugcaggacguggucaaccagaacgcccaggcccugaacacgcucgugaagcagcugagcuccaacuucggggccaucagcuccgugcugaacgacauccucagccgccuggacaaggucgaggccgaggugcagaucgaccggcugaucaccggccgccuccagucccugcagaccuacgugacccagcagcugauccgggcggccgagauccgcgccagcgccaaccucgccgcgaccaagaugagcgagugcguccugggccaguccaagcggguggacuucugcgggaagggcuaccaccugaugagcuucccccaguccgccccgcacgggguggucuuccuccacgugacguacguccccgcccaggagaagaacuucaccaccgcccccgcgaucugccacgacggcaaggcccacuucccccgcgaggggguguucgugagcaacggcacccacugguucgucacgcagcggaacuucuacgagccgcagaucaucaccaccgacaacaccuucguguccggcaacugcgacguggucaucgggaucgugaacaacacgguguacgacccccugcagcccgagcuggacagcuucaaggaggagcucgacaaguacuucaagaaccacaccucccccgacgucgaccugggcgacaucagcgggaucaacgccuccguggugaacauccagaaggagaucgaccgccugaacgaggucgccaagaaccucaacgagagccugaucgaccugcaggagcucggcaaguacgagcaguacaucaaguggccgugguacaucuggcugggcuucaucgccgggcugaucgcgaucgugauggugaccaucaugcucugcugcaugaccuccugcugcagcugccugaagggcugcugcuccugcgggagcugcugcaaguucgacgaggacgacuccgagcccguccugaagggcgugaagcuccacuacacgugaggacuaguguccaccugucccuccugggcugcuggauugucucguuuuccugccaaauaaacaggaucagcgcuuuacagaucuaaaaaaaaaaaaaaaaaaaaaaaaaaaaaaaaaaaaaaaaaaaaaaaaaaaaaaaaaaaaaaaaaaaaaaaaaaaaaaaaaaaaaaaaaaaaaaaaaaaa

SEQ ID NO: 25192 - RNA, 4105 nt, Artificial Sequence
  SARS-CoV-2/Wuhan/WIV05/2019__EPI_ISL_402128 spike protein mRNA gc (1-1273)(N501Y_D614G)
aggagacccgugacccggaaguuguacggcuacgcgacuuucccucccacaaacccucgcgcccuuccuuuccuacuugggcccggcagaaagcuuaccauguucguguuccugguccuccugccccuggugagcucccagugcgugaaccucaccacccgcacgcagcugccgcccgccuacaccaacagcuucacccggggcgucuacuaccccgacaagguguuccgcuccagcgugcugcacuccacccaggaccucuuccugcccuucuucagcaacgucacgugguuccacgccauccacguguccgggaccaacggcaccaagcgguucgacaacccggugcugcccuucaacgacggggucuacuucgcgagcaccgagaaguccaacaucauccgcggcuggaucuucgggacgacccucgacagcaagacccagucccugcugaucgugaacaacgccaccaacguggucaucaaggugugcgaguuccaguucugcaacgaccccuuccucggcguguacuaccacaagaacaacaagagcuggauggaguccgaguuccgggucuacagcuccgccaacaacugcacguucgaguacgugagccagcccuuccugauggaccuggagggcaagcaggggaacuucaagaaccuccgcgaguucguguucaagaacaucgacggcuacuucaagaucuacuccaagcacaccccgaucaaccugguccgggaccugccccagggguucagcgcccucgagccccugguggaccugcccaucggcaucaacaucacccgcuuccagacccuccuggcccugcaccgguccuaccucacgccgggggacagcagcuccggcuggaccgcgggcgccgccgccuacuacgugggguaccugcagccccgcaccuuccugcucaaguacaacgagaacggcaccaucacggacgcggucgacugcgcccuggacccccugagcgagaccaagugcacccucaaguccuucaccguggagaaggggaucuaccagacgagcaacuuccgggugcagcccaccgaguccaucguccgcuucccgaacaucaccaaccugugccccuucggcgagguguucaacgccacccgguucgccagcgucuacgccuggaaccgcaagcggaucuccaacugcguggcggacuacagcgugcuguacaacuccgccagcuucuccacguucaagugcuacggcgucagccccaccaagcucaacgaccugugcuucaccaacguguacgccgacuccuucgugauccgcggggacgagguccggcagaucgcccccggccagaccgggaagaucgccgacuacaacuacaagcugccggacgacuucacgggcugcgugaucgcguggaacagcaacaaccucgacuccaaggucgggggcaacuacaacuaccuguaccgccuguuccgcaagagcaaccucaagcccuucgagcgggacaucuccaccgagaucuaccaggccggcagcacccccugcaacgggguggagggcuucaacugcuacuucccccugcaguccuacggguuccagccgaccuacggcgugggguaccagcccuaccggguggucgugcugagcuucgagcuccugcacgcccccgccacggugugcggccccaagaaguccaccaaccuggucaagaacaagugcgugaacuucaacuucaacggccucaccgggaccggcgugcugaccgagagcaacaagaaguuccugccguuccagcaguucgggcgcgacaucgccgacacgaccgacgcgguccgcgacccccagacccuggagauccucgacaucacccccugcagcuucggcgggguguccgugaucacgccgggcaccaacaccagcaaccaggucgccgugcuguaccagggcgugaacugcaccgagguccccguggccauccacgccgaccagcugacgcccaccuggcggguguacuccaccgggagcaacgucuuccagacccgcgccggcugccucaucggggcggagcacgugaacaacuccuacgagugcgacauccccaucggcgccggcaucugcgccagcuaccagacgcagaccaacuccccgcggcgcgcccggagcguggcgucccagagcaucaucgccuacaccaugucccugggggccgagaacagcgucgccuacuccaacaacagcaucgccauccccaccaacuucacgaucuccgugaccaccgagauccugcccgugagcaugaccaagacgagcgucgacugcaccauguacaucugcggcgacuccaccgagugcagcaaccuccugcugcaguacggguccuucugcacccagcucaaccgcgcgcugacgggcaucgccguggagcaggacaagaacacccaggagguguucgcccaggucaagcagaucuacaagacgcccccgaucaaggacuucgggggcuucaacuucagccagauccugcccgaccccuccaagcccagcaagcgguccuucaucgaggaccuccuguucaacaaggugacccuggccgacgccggcuucaucaagcaguacggggacugccucggcgacaucgcggcccgcgaccugaucugcgcccagaaguucaacgggcugaccgugcucccgccccugcugaccgacgagaugaucgcccaguacaccagcgcccuccuggcgggcaccaucacguccggguggaccuucggcgccggcgccgcccugcagauccccuucgcgaugcagauggccuaccgguucaacgggaucggcgucacccagaacgugcucuacgagaaccagaagcugaucgccaaccaguucaacagcgccaucgggaagauccaggacucccugagcuccaccgccagcgcgcucggcaagcugcaggacguggucaaccagaacgcccaggcccugaacacgcucgugaagcagcuguccagcaacuucggggccaucuccagcgugcugaacgacauccucucccgccuggacaaggucgaggccgaggugcagaucgaccggcugaucaccggccgccuccagagccugcagaccuacgugacccagcagcugauccgggcggccgagauccgcgccagcgccaaccucgccgcgaccaagauguccgagugcguccugggccagagcaagcggguggacuucugcgggaagggcuaccaccugauguccuucccccagagcgccccgcacgggguggucuuccuccacgugacguacguccccgcccaggagaagaacuucaccaccgcccccgcgaucugccacgacggcaaggcccacuucccccgcgaggggguguucguguccaacggcacccacugguucgucacgcagcggaacuucuacgagccgcagaucaucaccaccgacaacaccuucgugagcggcaacugcgacguggucaucgggaucgugaacaacacgguguacgacccccugcagcccgagcuggacuccuucaaggaggagcucgacaaguacuucaagaaccacaccagccccgacgucgaccugggcgacaucuccgggaucaacgccagcguggugaacauccagaaggagaucgaccgccugaacgaggucgccaagaaccucaacgagucccugaucgaccugcaggagcucggcaaguacgagcaguacaucaaguggccgugguacaucuggcugggcuucaucgccgggcugaucgcgaucgugauggugaccaucaugcucugcugcaugaccagcugcugcuccugccugaagggcugcugcagcugcggguccugcugcaaguucgacgaggacgacagcgagcccguccugaagggcgugaagcuccacuacacgugaggacuaguguccaccugucccuccugggcugcuggauugucucguuuuccugccaaauaaacaggaucagcgcuuuacagaucuaaaaaaaaaaaaaaaaaaaaaaaaaaaaaaaaaaaaaaaaaaaaaaaaaaaaaaaaaaaaaaaaaaaaaaaaaaaaaaaaaaaaaaaaaaaaaaaaaaaa

SEQ ID NO: 25193 - RNA, 4099 nt, Artificial Sequence
  SARS-CoV-2/Wuhan/WIV05/2019__EPI_ISL_402128 spike protein mRNA gc (1-1273)(H69del_V70del_D614G)
aggagacccgugacccggaaguuguacggcuacgcgacuuucccucccacaaacccucgcgcccuuccuuuccuacuugggcccggcagaaagcuuaccauguucguguuccugguccuccugccccuggugagcucccagugcgugaaccucaccacccgcacgcagcugccgcccgccuacaccaacagcuucacccggggcgucuacuaccccgacaagguguuccgcuccagcgugcugcacuccacccaggaccucuuccugcccuucuucagcaacgucacgugguuccacgccaucuccgggaccaacggcaccaagcgguucgacaacccggugcugcccuucaacgacgggguguacuucgcgagcaccgagaaguccaacaucauccgcggcuggaucuucgggacgacccucgacagcaagacccagucccugcugaucgucaacaacgccaccaacguggugaucaaggucugcgaguuccaguucugcaacgaccccuuccucggcguguacuaccacaagaacaacaagagcuggauggaguccgaguuccggguguacagcuccgccaacaacugcacguucgaguacgucagccagcccuuccugauggaccuggagggcaagcaggggaacuucaagaaccuccgcgaguucguguucaagaacaucgacggcuacuucaagaucuacuccaagcacaccccgaucaaccuggugcgggaccugccccagggguucagcgcccucgagccccuggucgaccugcccaucggcaucaacaucacccgcuuccagacccuccuggcccugcaccgguccuaccucacgccgggggacagcagcuccggcuggaccgcgggcgccgccgccuacuacgugggguaccugcagccccgcaccuuccugcucaaguacaacgagaacggcaccaucacggacgcgguggacugcgcccuggacccccugagcgagaccaagugcacccucaaguccuucaccgucgagaaggggaucuaccagacgagcaacuuccgggugcagcccaccgaguccaucgugcgcuucccgaacaucaccaaccugugccccuucggcgaggucuucaacgccacccgguucgccagcguguacgccuggaaccgcaagcggaucuccaacugcgucgcggacuacagcgugcuguacaacuccgccagcuucuccacguucaagugcuacggcgugagccccaccaagcucaacgaccugugcuucaccaacgucuacgccgacuccuucgugauccgcggggacgaggugcggcagaucgcccccggccagaccgggaagaucgccgacuacaacuacaagcugccggacgacuucacgggcugcgucaucgcguggaacagcaacaaccucgacuccaaggucgggggcaacuacaacuaccuguaccgccuguuccgcaagagcaaccucaagcccuucgagcgggacaucuccaccgagaucuaccaggccggcagcacccccugcaacgggguggagggcuucaacugcuacuucccccugcaguccuacggguuccagccgaccaacggcgugggguaccagcccuaccggguggugguccugagcuucgagcuccugcacgcccccgccacggugugcggccccaagaaguccaccaaccuggugaagaacaagugcgucaacuucaacuucaacggccucaccgggaccggcgugcugaccgagagcaacaagaaguuccugccguuccagcaguucgggcgcgacaucgccgacacgaccgacgcggugcgcgacccccagacccuggagauccucgacaucacccccugcagcuucggcggggucuccgugaucacgccgggcaccaacaccagcaaccagguggccguccuguaccagggcgugaacugcaccgaggugcccgucgccauccacgccgaccagcugacgcccaccuggcggguguacuccaccgggagcaacguguuccagacccgcgccggcugccucaucggggcggagcacgucaacaacuccuacgagugcgacauccccaucggcgccggcaucugcgccagcuaccagacgcagaccaacuccccgcggcgcgcccggagcguggcgucccagagcaucaucgccuacaccaugucccugggggccgagaacagcguggccuacuccaacaacagcaucgccauccccaccaacuucacgaucuccgucaccaccgagauccugcccgugagcaugaccaagacgagcguggacugcaccauguacaucugcggcgacuccaccgagugcagcaaccuccugcugcaguacggguccuucugcacccagcucaaccgcgcgcugacgggcaucgccgucgagcaggacaagaacacccaggagguguucgcccaggugaagcagaucuacaagacgcccccgaucaaggacuucgggggcuucaacuucagccagauccugcccgaccccuccaagcccagcaagcgguccuucaucgaggaccuccuguucaacaaggucacccuggccgacgccggcuucaucaagcaguacggggacugccucggcgacaucgcggcccgcgaccugaucugcgcccagaaguucaacgggcugaccgugcucccgccccugcugaccgacgagaugaucgcccaguacaccagcgcccuccuggcgggcaccaucacguccggguggaccuucggcgccggcgccgcccugcagauccccuucgcgaugcagauggccuaccgguucaacgggaucggcgugacccagaacguccucuacgagaaccagaagcugaucgccaaccaguucaacagcgccaucgggaagauccaggacucccugagcuccaccgccagcgcgcucggcaagcugcaggacguggugaaccagaacgcccaggcccugaacacgcucgucaagcagcuguccagcaacuucggggccaucuccagcgugcugaacgacauccucucccgccuggacaagguggaggccgagguccagaucgaccggcugaucaccggccgccuccagagccugcagaccuacgugacccagcagcugauccgggcggccgagauccgcgccagcgccaaccucgccgcgaccaagauguccgagugcgugcugggccagagcaagcgggucgacuucugcgggaagggcuaccaccugauguccuucccccagagcgccccgcacggggugguguuccuccacgucacguacgugcccgcccaggagaagaacuucaccaccgcccccgcgaucugccacgacggcaaggcccacuucccccgcgagggggucuucguguccaacggcacccacugguucgugacgcagcggaacuucuacgagccgcagaucaucaccaccgacaacaccuucgucagcggcaacugcgacguggugaucgggaucgucaacaacacgguguacgacccccugcagcccgagcuggacuccuucaaggaggagcucgacaaguacuucaagaaccacaccagccccgacguggaccugggcgacaucuccgggaucaacgccagcgucgugaacauccagaaggagaucgaccgccugaacgagguggccaagaaccucaacgagucccugaucgaccugcaggagcucggcaaguacgagcaguacaucaaguggccgugguacaucuggcugggcuucaucgccgggcugaucgcgaucgucauggugaccaucaugcucugcugcaugaccagcugcugcuccugccugaagggcugcugcagcugcggguccugcugcaaguucgacgaggacgacagcgagcccgugcugaagggcgucaagcuccacuacacgugaggacuaguguccaccugucccuccugggcugcuggauugucucguuuuccugccaaauaaacaggaucagcgcuuuacagaucuaaaaaaaaaaaaaaaaaaaaaaaaaaaaaaaaaaaaaaaaaaaaaaaaaaaaaaaaaaaaaaaaaaaaaaaaaaaaaaaaaaaaaaaaaaaaaaaaaaaa

SEQ ID NO: 25194 - RNA, 4105 nt, Artificial Sequence
  SARS-CoV-2/Wuhan/WIV05/2019__EPI_ISL_402128 spike protein mRNA gc (1-1273)(Y453F_D614G)
aggagacccgugacccggaaguuguacggcuacgcgacuuucccucccacaaacccucgcgcccuuccuuuccuacuugggcccggcagaaagcuuaccauguucguguuccugguccuccugccccuggugagcucccagugcgugaaccucaccacccgcacgcagcugccgcccgccuacaccaacagcuucacccggggcgucuacuaccccgacaagguguuccgcuccagcgugcugcacuccacccaggaccucuuccugcccuucuucagcaacgucacgugguuccacgccauccacguguccgggaccaacggcaccaagcgguucgacaacccggugcugcccuucaacgacggggucuacuucgcgagcaccgagaaguccaacaucauccgcggcuggaucuucgggacgacccucgacagcaagacccagucccugcugaucgugaacaacgccaccaacguggucaucaaggugugcgaguuccaguucugcaacgaccccuuccucggcguguacuaccacaagaacaacaagagcuggauggaguccgaguuccgggucuacagcuccgccaacaacugcacguucgaguacgugagccagcccuuccugauggaccuggagggcaagcaggggaacuucaagaaccuccgcgaguucguguucaagaacaucgacggcuacuucaagaucuacuccaagcacaccccgaucaaccugguccgggaccugccccagggguucagcgcccucgagccccugguggaccugcccaucggcaucaacaucacccgcuuccagacccuccuggcccugcaccgguccuaccucacgccgggggacagcagcuccggcuggaccgcgggcgccgccgccuacuacgugggguaccugcagccccgcaccuuccugcucaaguacaacgagaacggcaccaucacggacgcggucgacugcgcccuggacccccugagcgagaccaagugcacccucaaguccuucaccguggagaaggggaucuaccagacgagcaacuuccgggugcagcccaccgaguccaucguccgcuucccgaacaucaccaaccugugccccuucggcgagguguucaacgccacccgguucgccagcgucuacgccuggaaccgcaagcggaucuccaacugcguggcggacuacagcgugcuguacaacuccgccagcuucuccacguucaagugcuacggcgucagccccaccaagcucaacgaccugugcuucaccaacguguacgccgacuccuucgugauccgcggggacgagguccggcagaucgcccccggccagaccgggaagaucgccgacuacaacuacaagcugccggacgacuucacgggcugcgugaucgcguggaacagcaacaaccucgacuccaaggucgggggcaacuacaacuaccuguuccgccuguuccgcaagagcaaccucaagcccuucgagcgggacaucuccaccgagaucuaccaggccggcagcacccccugcaacgggguggagggcuucaacugcuacuucccccugcaguccuacggguuccagccgaccaacggcgugggguaccagcccuaccggguggucgugcugagcuucgagcuccugcacgcccccgccacggugugcggccccaagaaguccaccaaccuggucaagaacaagugcgugaacuucaacuucaacggccucaccgggaccggcgugcugaccgagagcaacaagaaguuccugccguuccagcaguucgggcgcgacaucgccgacacgaccgacgcgguccgcgacccccagacccuggagauccucgacaucacccccugcagcuucggcgggguguccgugaucacgccgggcaccaacaccagcaaccaggucgccgugcuguaccagggcgugaacugcaccgagguccccguggccauccacgccgaccagcugacgcccaccuggcggguguacuccaccgggagcaacgucuuccagacccgcgccggcugccucaucggggcggagcacgugaacaacuccuacgagugcgacauccccaucggcgccggcaucugcgccagcuaccagacgcagaccaacuccccgcggcgcgcccggagcguggcgucccagagcaucaucgccuacaccaugucccugggggccgagaacagcgucgccuacuccaacaacagcaucgccauccccaccaacuucacgaucuccgugaccaccgagauccugcccgugagcaugaccaagacgagcgucgacugcaccauguacaucugcggcgacuccaccgagugcagcaaccuccugcugcaguacggguccuucugcacccagcucaaccgcgcgcugacgggcaucgccguggagcaggacaagaacacccaggagguguucgcccaggucaagcagaucuacaagacgcccccgaucaaggacuucgggggcuucaacuucagccagauccugcccgaccccuccaagcccagcaagcgguccuucaucgaggaccuccuguucaacaaggugacccuggccgacgccggcuucaucaagcaguacggggacugccucggcgacaucgcggcccgcgaccugaucugcgcccagaaguucaacgggcugaccgugcucccgccccugcugaccgacgagaugaucgcccaguacaccagcgcccuccuggcgggcaccaucacguccggguggaccuucggcgccggcgccgcccugcagauccccuucgcgaugcagauggccuaccgguucaacgggaucggcgucacccagaacgugcucuacgagaaccagaagcugaucgccaaccaguucaacagcgccaucgggaagauccaggacucccugagcuccaccgccagcgcgcucggcaagcugcaggacguggucaaccagaacgcccaggcccugaacacgcucgugaagcagcuguccagcaacuucggggccaucuccagcgugcugaacgacauccucucccgccuggacaaggucgaggccgaggugcagaucgaccggcugaucaccggccgccuccagagccugcagaccuacgugacccagcagcugauccgggcggccgagauccgcgccagcgccaaccucgccgcgaccaagauguccgagugcguccugggccagagcaagcggguggacuucugcgggaagggcuaccaccugauguccuucccccagagcgccccgcacgggguggucuuccuccacgugacguacguccccgcccaggagaagaacuucaccaccgcccccgcgaucugccacgacggcaaggcccacuucccccgcgaggggguguucguguccaacggcacccacugguucgucacgcagcggaacuucuacgagccgcagaucaucaccaccgacaacaccuucgugagcggcaacugcgacguggucaucgggaucgugaacaacacgguguacgacccccugcagcccgagcuggacuccuucaaggaggagcucgacaaguacuucaagaaccacaccagccccgacgucgaccugggcgacaucuccgggaucaacgccagcguggugaacauccagaaggagaucgaccgccugaacgaggucgccaagaaccucaacgagucccugaucgaccugcaggagcucggcaaguacgagcaguacaucaaguggccgugguacaucuggcugggcuucaucgccgggcugaucgcgaucgugauggugaccaucaugcucugcugcaugaccagcugcugcuccugccugaagggcugcugcagcugcggguccugcugcaaguucgacgaggacgacagcgagcccguccugaagggcgugaagcuccacuacacgugaggacuaguguccaccugucccuccugggcugcuggauugucucguuuuccugccaaauaaacaggaucagcgcuuuacagaucuaaaaaaaaaaaaaaaaaaaaaaaaaaaaaaaaaaaaaaaaaaaaaaaaaaaaaaaaaaaaaaaaaaaaaaaaaaaaaaaaaaaaaaaaaaaaaaaaaaaa

SEQ ID NO: 25195 - RNA, 4105 nt, Artificial Sequence
  SARS-CoV-2/Wuhan/WIV05/2019__EPI_ISL_402128 spike protein mRNA gc (1-1273)(D614G_I692V)
aggagacccgugacccggaaguuguacggcuacgcgacuuucccucccacaaacccucgcgcccuuccuuuccuacuugggcccggcagaaagcuuaccauguucguguuccugguccuccugccccuggugagcucccagugcgugaaccucaccacccgcacgcagcugccgcccgccuacaccaacagcuucacccggggcgucuacuaccccgacaagguguuccgcuccagcgugcugcacuccacccaggaccucuuccugcccuucuucagcaacgucacgugguuccacgccauccacguguccgggaccaacggcaccaagcgguucgacaacccggugcugcccuucaacgacggggucuacuucgcgagcaccgagaaguccaacaucauccgcggcuggaucuucgggacgacccucgacagcaagacccagucccugcugaucgugaacaacgccaccaacguggucaucaaggugugcgaguuccaguucugcaacgaccccuuccucggcguguacuaccacaagaacaacaagagcuggauggaguccgaguuccgggucuacagcuccgccaacaacugcacguucgaguacgugagccagcccuuccugauggaccuggagggcaagcaggggaacuucaagaaccuccgcgaguucguguucaagaacaucgacggcuacuucaagaucuacuccaagcacaccccgaucaaccugguccgggaccugccccagggguucagcgcccucgagccccugguggaccugcccaucggcaucaacaucacccgcuuccagacccuccuggcccugcaccgguccuaccucacgccgggggacagcagcuccggcuggaccgcgggcgccgccgccuacuacgugggguaccugcagccccgcaccuuccugcucaaguacaacgagaacggcaccaucacggacgcggucgacugcgcccuggacccccugagcgagaccaagugcacccucaaguccuucaccguggagaaggggaucuaccagacgagcaacuuccgggugcagcccaccgaguccaucguccgcuucccgaacaucaccaaccugugccccuucggcgagguguucaacgccacccgguucgccagcgucuacgccuggaaccgcaagcggaucuccaacugcguggcggacuacagcgugcuguacaacuccgccagcuucuccacguucaagugcuacggcgucagccccaccaagcucaacgaccugugcuucaccaacguguacgccgacuccuucgugauccgcggggacgagguccggcagaucgcccccggccagaccgggaagaucgccgacuacaacuacaagcugccggacgacuucacgggcugcgugaucgcguggaacagcaacaaccucgacuccaaggucgggggcaacuacaacuaccuguaccgccuguuccgcaagagcaaccucaagcccuucgagcgggacaucuccaccgagaucuaccaggccggcagcacccccugcaacgggguggagggcuucaacugcuacuucccccugcaguccuacggguuccagccgaccaacggcgugggguaccagcccuaccggguggucgugcugagcuucgagcuccugcacgcccccgccacggugugcggccccaagaaguccaccaaccuggucaagaacaagugcgugaacuucaacuucaacggccucaccgggaccggcgugcugaccgagagcaacaagaaguuccugccguuccagcaguucgggcgcgacaucgccgacacgaccgacgcgguccgcgacccccagacccuggagauccucgacaucacccccugcagcuucggcgggguguccgugaucacgccgggcaccaacaccagcaaccaggucgccgugcuguaccagggcgugaacugcaccgagguccccguggccauccacgccgaccagcugacgcccaccuggcggguguacuccaccgggagcaacgucuuccagacccgcgccggcugccucaucggggcggagcacgugaacaacuccuacgagugcgacauccccaucggcgccggcaucugcgccagcuaccagacgcagaccaacuccccgcggcgcgcccggagcguggcgucccagagcgucaucgccuacaccaugucccugggggccgagaacagcguggccuacuccaacaacagcaucgccauccccaccaacuucacgaucuccgugaccaccgagauccugcccgucagcaugaccaagacgagcguggacugcaccauguacaucugcggcgacuccaccgagugcagcaaccuccugcugcaguacggguccuucugcacccagcucaaccgcgcgcugacgggcaucgccguggagcaggacaagaacacccaggaggucuucgcccaggugaagcagaucuacaagacgcccccgaucaaggacuucgggggcuucaacuucagccagauccugcccgaccccuccaagcccagcaagcgguccuucaucgaggaccuccuguucaacaaggugacccuggccgacgccggcuucaucaagcaguacggggacugccucggcgacaucgcggcccgcgaccugaucugcgcccagaaguucaacgggcugaccguccucccgccccugcugaccgacgagaugaucgcccaguacaccagcgcccuccuggcgggcaccaucacguccggguggaccuucggcgccggcgccgcccugcagauccccuucgcgaugcagauggccuaccgguucaacgggaucggcgugacccagaacgugcucuacgagaaccagaagcugaucgccaaccaguucaacagcgccaucgggaagauccaggacucccugagcuccaccgccagcgcgcucggcaagcugcaggacgucgugaaccagaacgcccaggcccugaacacgcucgugaagcagcuguccagcaacuucggggccaucuccagcguccugaacgacauccucucccgccuggacaagguggaggccgaggugcagaucgaccggcugaucaccggccgccuccagagccugcagaccuacgucacccagcagcugauccgggcggccgagauccgcgccagcgccaaccucgccgcgaccaagauguccgagugcgugcugggccagagcaagcggguggacuucugcgggaagggcuaccaccugauguccuucccccagagcgccccgcacggggucguguuccuccacgucacguacgugcccgcccaggagaagaacuucaccaccgcccccgcgaucugccacgacggcaaggcccacuucccccgcgaggggguguucgucuccaacggcacccacugguucgugacgcagcggaacuucuacgagccgcagaucaucaccaccgacaacaccuucgugagcggcaacugcgacgucgugaucgggaucgugaacaacacggucuacgacccccugcagcccgagcuggacuccuucaaggaggagcucgacaaguacuucaagaaccacaccagccccgacguggaccugggcgacaucuccgggaucaacgccagcguggucaacauccagaaggagaucgaccgccugaacgagguggccaagaaccucaacgagucccugaucgaccugcaggagcucggcaaguacgagcaguacaucaaguggccgugguacaucuggcugggcuucaucgccgggcugaucgcgaucgugauggucaccaucaugcucugcugcaugaccagcugcugcuccugccugaagggcugcugcagcugcggguccugcugcaaguucgacgaggacgacagcgagcccgugcugaagggcgugaagcuccacuacacgugaggacuaguguccaccugucccuccugggcugcuggauugucucguuuuccugccaaauaaacaggaucagcgcuuuacagaucuaaaaaaaaaaaaaaaaaaaaaaaaaaaaaaaaaaaaaaaaaaaaaaaaaaaaaaaaaaaaaaaaaaaaaaaaaaaaaaaaaaaaaaaaaaaaaaaaaaaa

SEQ ID NO: 25196 - RNA, 4105 nt, Artificial Sequence
  SARS-CoV-2/Wuhan/WIV05/2019__EPI_ISL_402128 spike protein mRNA gc (1-1273)(D614G_M1229I)
aggagacccgugacccggaaguuguacggcuacgcgacuuucccucccacaaacccucgcgcccuuccuuuccuacuugggcccggcagaaagcuuaccauguucguguuccugguccuccugccccuggugagcucccagugcgugaaccucaccacccgcacgcagcugccgcccgccuacaccaacagcuucacccggggcgucuacuaccccgacaagguguuccgcuccagcgugcugcacuccacccaggaccucuuccugcccuucuucagcaacgucacgugguuccacgccauccacguguccgggaccaacggcaccaagcgguucgacaacccggugcugcccuucaacgacggggucuacuucgcgagcaccgagaaguccaacaucauccgcggcuggaucuucgggacgacccucgacagcaagacccagucccugcugaucgugaacaacgccaccaacguggucaucaaggugugcgaguuccaguucugcaacgaccccuuccucggcguguacuaccacaagaacaacaagagcuggauggaguccgaguuccgggucuacagcuccgccaacaacugcacguucgaguacgugagccagcccuuccugauggaccuggagggcaagcaggggaacuucaagaaccuccgcgaguucguguucaagaacaucgacggcuacuucaagaucuacuccaagcacaccccgaucaaccugguccgggaccugccccagggguucagcgcccucgagccccugguggaccugcccaucggcaucaacaucacccgcuuccagacccuccuggcccugcaccgguccuaccucacgccgggggacagcagcuccggcuggaccgcgggcgccgccgccuacuacgugggguaccugcagccccgcaccuuccugcucaaguacaacgagaacggcaccaucacggacgcggucgacugcgcccuggacccccugagcgagaccaagugcacccucaaguccuucaccguggagaaggggaucuaccagacgagcaacuuccgggugcagcccaccgaguccaucguccgcuucccgaacaucaccaaccugugccccuucggcgagguguucaacgccacccgguucgccagcgucuacgccuggaaccgcaagcggaucuccaacugcguggcggacuacagcgugcuguacaacuccgccagcuucuccacguucaagugcuacggcgucagccccaccaagcucaacgaccugugcuucaccaacguguacgccgacuccuucgugauccgcggggacgagguccggcagaucgcccccggccagaccgggaagaucgccgacuacaacuacaagcugccggacgacuucacgggcugcgugaucgcguggaacagcaacaaccucgacuccaaggucgggggcaacuacaacuaccuguaccgccuguuccgcaagagcaaccucaagcccuucgagcgggacaucuccaccgagaucuaccaggccggcagcacccccugcaacgggguggagggcuucaacugcuacuucccccugcaguccuacggguuccagccgaccaacggcgugggguaccagcccuaccggguggucgugcugagcuucgagcuccugcacgcccccgccacggugugcggccccaagaaguccaccaaccuggucaagaacaagugcgugaacuucaacuucaacggccucaccgggaccggcgugcugaccgagagcaacaagaaguuccugccguuccagcaguucgggcgcgacaucgccgacacgaccgacgcgguccgcgacccccagacccuggagauccucgacaucacccccugcagcuucggcgggguguccgugaucacgccgggcaccaacaccagcaaccaggucgccgugcuguaccagggcgugaacugcaccgagguccccguggccauccacgccgaccagcugacgcccaccuggcggguguacuccaccgggagcaacgucuuccagacccgcgccggcugccucaucggggcggagcacgugaacaacuccuacgagugcgacauccccaucggcgccggcaucugcgccagcuaccagacgcagaccaacuccccgcggcgcgcccggagcguggcgucccagagcaucaucgccuacaccaugucccugggggccgagaacagcgucgccuacuccaacaacagcaucgccauccccaccaacuucacgaucuccgugaccaccgagauccugcccgugagcaugaccaagacgagcgucgacugcaccauguacaucugcggcgacuccaccgagugcagcaaccuccugcugcaguacggguccuucugcacccagcucaaccgcgcgcugacgggcaucgccguggagcaggacaagaacacccaggagguguucgcccaggucaagcagaucuacaagacgcccccgaucaaggacuucgggggcuucaacuucagccagauccugcccgaccccuccaagcccagcaagcgguccuucaucgaggaccuccuguucaacaaggugacccuggccgacgccggcuucaucaagcaguacggggacugccucggcgacaucgcggcccgcgaccugaucugcgcccagaaguucaacgggcugaccgugcucccgccccugcugaccgacgagaugaucgcccaguacaccagcgcccuccuggcgggcaccaucacguccggguggaccuucggcgccggcgccgcccugcagauccccuucgcgaugcagauggccuaccgguucaacgggaucggcgucacccagaacgugcucuacgagaaccagaagcugaucgccaaccaguucaacagcgccaucgggaagauccaggacucccugagcuccaccgccagcgcgcucggcaagcugcaggacguggucaaccagaacgcccaggcccugaacacgcucgugaagcagcuguccagcaacuucggggccaucuccagcgugcugaacgacauccucucccgccuggacaaggucgaggccgaggugcagaucgaccggcugaucaccggccgccuccagagccugcagaccuacgugacccagcagcugauccgggcggccgagauccgcgccagcgccaaccucgccgcgaccaagauguccgagugcguccugggccagagcaagcggguggacuucugcgggaagggcuaccaccugauguccuucccccagagcgccccgcacgggguggucuuccuccacgugacguacguccccgcccaggagaagaacuucaccaccgcccccgcgaucugccacgacggcaaggcccacuucccccgcgaggggguguucguguccaacggcacccacugguucgucacgcagcggaacuucuacgagccgcagaucaucaccaccgacaacaccuucgugagcggcaacugcgacguggucaucgggaucgugaacaacacgguguacgacccccugcagcccgagcuggacuccuucaaggaggagcucgacaaguacuucaagaaccacaccagccccgacgucgaccugggcgacaucuccgggaucaacgccagcguggugaacauccagaaggagaucgaccgccugaacgaggucgccaagaaccucaacgagucccugaucgaccugcaggagcucggcaaguacgagcaguacaucaaguggccgugguacaucuggcugggcuucaucgccgggcugaucgcgaucgugaucgugaccaucaugcucugcugcaugaccagcugcugcuccugccugaagggcugcugcagcugcggguccugcugcaaguucgacgaggacgacagcgagcccguccugaagggcgugaagcuccacuacacgugaggacuaguguccaccugucccuccugggcugcuggauugucucguuuuccugccaaauaaacaggaucagcgcuuuacagaucuaaaaaaaaaaaaaaaaaaaaaaaaaaaaaaaaaaaaaaaaaaaaaaaaaaaaaaaaaaaaaaaaaaaaaaaaaaaaaaaaaaaaaaaaaaaaaaaaaaaa

SEQ ID NO: 25197 - RNA, 4099 nt, Artificial Sequence
  SARS-CoV-2/Wuhan/WIV05/2019__EPI_ISL_402128 spike protein mRNA gc (1-1273)(H69del_V70del_A222V_Y453F_S477N_D614G_I692V)
aggagacccgugacccggaaguuguacggcuacgcgacuuucccucccacaaacccucgcgcccuuccuuuccuacuugggcccggcagaaagcuuaccauguucguguuccugguccuccugccccuggugagcucccagugcgugaaccucaccacccgcacgcagcugccgcccgccuacaccaacagcuucacccggggcgucuacuaccccgacaagguguuccgcuccagcgugcugcacuccacccaggaccucuuccugcccuucuucagcaacgucacgugguuccacgccaucuccgggaccaacggcaccaagcgguucgacaacccggugcugcccuucaacgacgggguguacuucgcgagcaccgagaaguccaacaucauccgcggcuggaucuucgggacgacccucgacagcaagacccagucccugcugaucgucaacaacgccaccaacguggugaucaaggucugcgaguuccaguucugcaacgaccccuuccucggcguguacuaccacaagaacaacaagagcuggauggaguccgaguuccggguguacagcuccgccaacaacugcacguucgaguacgucagccagcccuuccugauggaccuggagggcaagcaggggaacuucaagaaccuccgcgaguucguguucaagaacaucgacggcuacuucaagaucuacuccaagcacaccccgaucaaccuggugcgggaccugccccagggguucagcguccucgagccccugguggaccugcccaucggcaucaacaucacccgcuuccagacccuccuggcccugcaccgguccuaccucacgccgggggacagcagcuccggcuggaccgccggcgcggccgccuacuacgugggguaccugcagccccgcaccuuccugcucaaguacaacgagaacggcaccaucacggacgccgucgacugcgcgcuggacccccugagcgagaccaagugcacccucaaguccuucaccguggagaaggggaucuaccagacgagcaacuuccgggugcagcccaccgaguccaucguccgcuucccgaacaucaccaaccugugccccuucggcgagguguucaacgccacccgguucgccagcgucuacgccuggaaccgcaagcggaucuccaacugcguggccgacuacagcgugcuguacaacuccgcgagcuucuccacguucaagugcuacggcgucagccccaccaagcucaacgaccugugcuucaccaacguguacgccgacuccuucgugauccgcggggacgagguccggcagaucgcccccggccagaccgggaagaucgccgacuacaacuacaagcugccggacgacuucacgggcugcgugaucgccuggaacagcaacaaccucgacuccaaggucgggggcaacuacaacuaccuguuccgccuguuccgcaagagcaaccucaagcccuucgagcgggacaucuccaccgagaucuaccaggcgggcaacacccccugcaacgggguggagggcuucaacugcuacuucccccugcagagcuacggguuccagccgaccaacggcgugggguaccagcccuaccggguggucgugcuguccuucgagcuccugcacgcccccgccacggugugcggccccaagaaguccaccaaccuggucaagaacaagugcgugaacuucaacuucaacggccucaccgggaccggcgugcugaccgagagcaacaagaaguuccugccguuccagcaguucgggcgcgacaucgccgacacgaccgacgccguccgcgacccccagacccuggagauccucgacaucacccccugcagcuucggcggggugagcgugaucacgccgggcaccaacaccuccaaccaggucgcggugcuguaccagggcgugaacugcaccgagguccccguggccauccacgccgaccagcugacgcccaccuggcggguguacagcaccggguccaacgucuuccagacccgcgccggcugccucaucggggccgagcacgugaacaacagcuacgagugcgacauccccaucggcgcgggcaucugcgccuccuaccagacgcagaccaacagcccgcggcgcgcccgguccguggccagccaguccgucaucgcguacaccaugagccugggggccgagaacuccguggccuacagcaacaacuccaucgccauccccaccaacuucacgaucagcgugaccaccgagauccugcccgucuccaugaccaagacgagcguggacugcaccauguacaucugcggcgacagcaccgagugcuccaaccuccugcugcaguacgggagcuucugcacccagcucaaccgcgcccugacgggcaucgcgguggagcaggacaagaacacccaggaggucuucgcccaggugaagcagaucuacaagacgcccccgaucaaggacuucgggggcuucaacuucucccagauccugcccgaccccagcaagcccuccaagcggagcuucaucgaggaccuccuguucaacaaggugacccuggccgacgccggcuucaucaagcaguacggggacugccucggcgacaucgccgcgcgcgaccugaucugcgcccagaaguucaacgggcugaccguccucccgccccugcugaccgacgagaugaucgcccaguacaccuccgcccuccuggccggcaccaucacgagcggguggaccuucggcgcgggcgccgcccugcagauccccuucgccaugcagauggcguaccgguucaacgggaucggcgugacccagaacgugcucuacgagaaccagaagcugaucgccaaccaguucaacuccgccaucgggaagauccaggacagccuguccagcaccgccuccgcccucggcaagcugcaggacgucgugaaccagaacgcgcaggcccugaacacgcucgugaagcagcugagcuccaacuucggggccaucagcuccguccugaacgacauccucagccgccuggacaagguggaggccgaggugcagaucgaccggcugaucaccggccgccuccagucccugcagaccuacgucacccagcagcugauccgggccgcggagauccgcgccagcgccaaccucgccgccaccaagaugagcgagugcgugcugggccaguccaagcggguggacuucugcgggaagggcuaccaccugaugagcuucccccaguccgcgccgcacggggucguguuccuccacgucacguacgugcccgcccaggagaagaacuucaccaccgcccccgccaucugccacgacggcaaggcgcacuucccccgcgaggggguguucgucagcaacggcacccacugguucgugacgcagcggaacuucuacgagccgcagaucaucaccaccgacaacaccuucguguccggcaacugcgacgucgugaucgggaucgugaacaacacggucuacgacccccugcagcccgagcuggacagcuucaaggaggagcucgacaaguacuucaagaaccacaccucccccgacguggaccugggcgacaucagcgggaucaacgccuccguggucaacauccagaaggagaucgaccgccugaacgagguggccaagaaccucaacgagagccugaucgaccugcaggagcucggcaaguacgagcaguacaucaaguggccgugguacaucuggcugggcuucaucgccgggcugaucgccaucgugauggucaccaucaugcucugcugcaugaccuccugcugcagcugccugaagggcugcugcuccugcgggagcugcugcaaguucgacgaggacgacuccgagcccgugcugaagggcgugaagcuccacuacacgugaggacuaguguccaccugucccuccugggcugcuggauugucucguuuuccugccaaauaaacaggaucagcgcuuuacagaucuaaaaaaaaaaaaaaaaaaaaaaaaaaaaaaaaaaaaaaaaaaaaaaaaaaaaaaaaaaaaaaaaaaaaaaaaaaaaaaaaaaaaaaaaaaaaaaaaaaaa

SEQ ID NO: 25198 - RNA, 4099 nt, Artificial Sequence
  SARS-CoV-2/Wuhan/WIV05/2019__EPI_ISL_402128 spike protein mRNA gc (1-1273)(H69del_V70del_Y453F_D614G_I692V_M1229I)
aggagacccgugacccggaaguuguacggcuacgcgacuuucccucccacaaacccucgcgcccuuccuuuccuacuugggcccggcagaaagcuuaccauguucguguuccugguccuccugccccuggugagcucccagugcgugaaccucaccacccgcacgcagcugccgcccgccuacaccaacagcuucacccggggcgucuacuaccccgacaagguguuccgcuccagcgugcugcacuccacccaggaccucuuccugcccuucuucagcaacgucacgugguuccacgccaucuccgggaccaacggcaccaagcgguucgacaacccggugcugcccuucaacgacgggguguacuucgcgagcaccgagaaguccaacaucauccgcggcuggaucuucgggacgacccucgacagcaagacccagucccugcugaucgucaacaacgccaccaacguggugaucaaggucugcgaguuccaguucugcaacgaccccuuccucggcguguacuaccacaagaacaacaagagcuggauggaguccgaguuccggguguacagcuccgccaacaacugcacguucgaguacgucagccagcccuuccugauggaccuggagggcaagcaggggaacuucaagaaccuccgcgaguucguguucaagaacaucgacggcuacuucaagaucuacuccaagcacaccccgaucaaccuggugcgggaccugccccagggguucagcgcccucgagccccuggucgaccugcccaucggcaucaacaucacccgcuuccagacccuccuggcccugcaccgguccuaccucacgccgggggacagcagcuccggcuggaccgcgggcgccgccgccuacuacgugggguaccugcagccccgcaccuuccugcucaaguacaacgagaacggcaccaucacggacgcgguggacugcgcccuggacccccugagcgagaccaagugcacccucaaguccuucaccgucgagaaggggaucuaccagacgagcaacuuccgggugcagcccaccgaguccaucgugcgcuucccgaacaucaccaaccugugccccuucggcgaggucuucaacgccacccgguucgccagcguguacgccuggaaccgcaagcggaucuccaacugcgucgcggacuacagcgugcuguacaacuccgccagcuucuccacguucaagugcuacggcgugagccccaccaagcucaacgaccugugcuucaccaacgucuacgccgacuccuucgugauccgcggggacgaggugcggcagaucgcccccggccagaccgggaagaucgccgacuacaacuacaagcugccggacgacuucacgggcugcgucaucgcguggaacagcaacaaccucgacuccaaggucgggggcaacuacaacuaccuguuccgccuguuccgcaagagcaaccucaagcccuucgagcgggacaucuccaccgagaucuaccaggccggcagcacccccugcaacgggguggagggcuucaacugcuacuucccccugcaguccuacggguuccagccgaccaacggcgugggguaccagcccuaccggguggugguccugagcuucgagcuccugcacgcccccgccacggugugcggccccaagaaguccaccaaccuggugaagaacaagugcgucaacuucaacuucaacggccucaccgggaccggcgugcugaccgagagcaacaagaaguuccugccguuccagcaguucgggcgcgacaucgccgacacgaccgacgcggugcgcgacccccagacccuggagauccucgacaucacccccugcagcuucggcggggucuccgugaucacgccgggcaccaacaccagcaaccagguggccguccuguaccagggcgugaacugcaccgaggugcccgucgccauccacgccgaccagcugacgcccaccuggcggguguacuccaccgggagcaacguguuccagacccgcgccggcugccucaucggggcggagcacgucaacaacuccuacgagugcgacauccccaucggcgccggcaucugcgccagcuaccagacgcagaccaacuccccgcggcgcgcccggagcguggcgucccagagcgugaucgccuacaccaugucccugggggccgagaacagcgucgccuacuccaacaacagcaucgccauccccaccaacuucacgaucuccgugaccaccgagauccugcccgugagcaugaccaagacgagcgucgacugcaccauguacaucugcggcgacuccaccgagugcagcaaccuccugcugcaguacggguccuucugcacccagcucaaccgcgcgcugacgggcaucgccguggagcaggacaagaacacccaggagguguucgcccaggucaagcagaucuacaagacgcccccgaucaaggacuucgggggcuucaacuucagccagauccugcccgaccccuccaagcccagcaagcgguccuucaucgaggaccuccuguucaacaaggugacccuggccgacgccggcuucaucaagcaguacggggacugccucggcgacaucgcggcccgcgaccugaucugcgcccagaaguucaacgggcugaccgugcucccgccccugcugaccgacgagaugaucgcccaguacaccagcgcccuccuggcgggcaccaucacguccggguggaccuucggcgccggcgccgcccugcagauccccuucgcgaugcagauggccuaccgguucaacgggaucggcgucacccagaacgugcucuacgagaaccagaagcugaucgccaaccaguucaacagcgccaucgggaagauccaggacucccugagcuccaccgccagcgcgcucggcaagcugcaggacguggucaaccagaacgcccaggcccugaacacgcucgugaagcagcuguccagcaacuucggggccaucuccagcgugcugaacgacauccucucccgccuggacaaggucgaggccgaggugcagaucgaccggcugaucaccggccgccuccagagccugcagaccuacgugacccagcagcugauccgggcggccgagauccgcgccagcgccaaccucgccgcgaccaagauguccgagugcguccugggccagagcaagcggguggacuucugcgggaagggcuaccaccugauguccuucccccagagcgccccgcacgggguggucuuccuccacgugacguacguccccgcccaggagaagaacuucaccaccgcccccgcgaucugccacgacggcaaggcccacuucccccgcgaggggguguucguguccaacggcacccacugguucgucacgcagcggaacuucuacgagccgcagaucaucaccaccgacaacaccuucgugagcggcaacugcgacguggucaucgggaucgugaacaacacgguguacgacccccugcagcccgagcuggacuccuucaaggaggagcucgacaaguacuucaagaaccacaccagccccgacgucgaccugggcgacaucuccgggaucaacgccagcguggugaacauccagaaggagaucgaccgccugaacgaggucgccaagaaccucaacgagucccugaucgaccugcaggagcucggcaaguacgagcaguacaucaaguggccgugguacaucuggcugggcuucaucgccgggcugaucgcgaucgugaucgugaccaucaugcucugcugcaugaccagcugcugcuccugccugaagggcugcugcagcugcggguccugcugcaaguucgacgaggacgacagcgagcccguccugaagggcgugaagcuccacuacacgugaggacuaguguccaccugucccuccugggcugcuggauugucucguuuuccugccaaauaaacaggaucagcgcuuuacagaucuaaaaaaaaaaaaaaaaaaaaaaaaaaaaaaaaaaaaaaaaaaaaaaaaaaaaaaaaaaaaaaaaaaaaaaaaaaaaaaaaaaaaaaaaaaaaaaaaaaaa

SEQ ID NO: 25199 - RNA, 4096 nt, Artificial Sequence
  SARS-CoV-2/Wuhan/WIV05/2019__EPI_ISL_402128 spike protein mRNA gc (1-1273)(H69del_V70del_Y144del_N501Y_A570D_D614G_P681H_T716I_S982 A_D1118H)
aggagacccgugacccggaaguuguacggcuacgcgacuuucccucccacaaacccucgcgcccuuccuuuccuacuugggcccggcagaaagcuuaccauguucguguuccugguccuccugccccuggugagcucccagugcgugaaccucaccacccgcacgcagcugccgcccgccuacaccaacagcuucacccggggcgucuacuaccccgacaagguguuccgcuccagcgugcugcacuccacccaggaccucuuccugcccuucuucagcaacgucacgugguuccacgccaucuccgggaccaacggcaccaagcgguucgacaacccggugcugcccuucaacgacgggguguacuucgcgagcaccgagaaguccaacaucauccgcggcuggaucuucgggacgacccucgacagcaagacccagucccugcugaucgucaacaacgccaccaacguggugaucaaggucugcgaguuccaguucugcaacgaccccuuccucggcguguaccacaagaacaacaagagcuggauggaguccgaguuccggguguacagcuccgccaacaacugcacguucgaguacgucagccagcccuuccugauggaccuggagggcaagcaggggaacuucaagaaccuccgcgaguucguguucaagaacaucgacggcuacuucaagaucuacuccaagcacaccccgaucaaccuggugcgggaccugccccagggguucagcgcccucgagccccuggucgaccugcccaucggcaucaacaucacccgcuuccagacccuccuggcccugcaccgguccuaccucacgccgggggacagcagcuccggcuggaccgcgggcgccgccgccuacuacgugggguaccugcagccccgcaccuuccugcucaaguacaacgagaacggcaccaucacggacgcgguggacugcgcccuggacccccugagcgagaccaagugcacccucaaguccuucaccgucgagaaggggaucuaccagacgagcaacuuccgggugcagcccaccgaguccaucgugcgcuucccgaacaucaccaaccugugccccuucggcgaggucuucaacgccacccgguucgccagcguguacgccuggaaccgcaagcggaucuccaacugcgucgcggacuacagcgugcuguacaacuccgccagcuucuccacguucaagugcuacggcgugagccccaccaagcucaacgaccugugcuucaccaacgucuacgccgacuccuucgugauccgcggggacgaggugcggcagaucgcccccggccagaccgggaagaucgccgacuacaacuacaagcugccggacgacuucacgggcugcgucaucgcguggaacagcaacaaccucgacuccaaggucgggggcaacuacaacuaccuguaccgccuguuccgcaagagcaaccucaagcccuucgagcgggacaucuccaccgagaucuaccaggccggcagcacccccugcaacgggguggagggcuucaacugcuacuucccccugcaguccuacggguuccagccgaccuacggcgugggguaccagcccuaccggguggugguccugagcuucgagcuccugcacgcccccgccacggugugcggccccaagaaguccaccaaccuggugaagaacaagugcgucaacuucaacuucaacggccucaccgggaccggcgugcugaccgagagcaacaagaaguuccugccguuccagcaguucgggcgcgacaucgacgacacgaccgacgccgugcgcgacccccagacccuggagauccucgacaucacccccugcagcuucggcggggucuccgugaucacgccgggcaccaacaccagcaaccagguggcgguccuguaccagggcgugaacugcaccgaggugcccgucgccauccacgccgaccagcugacgcccaccuggcggguguacuccaccgggagcaacguguuccagacccgcgccggcugccucaucggggccgagcacgucaacaacuccuacgagugcgacauccccaucggcgcgggcaucugcgccagcuaccagacgcagaccaacucccaccggcgcgcccggagcguggccucccagagcaucaucgcguacaccaugucccugggggccgagaacagcguggccuacuccaacaacagcaucgccaucccgaucaacuucaccaucuccgucacgaccgagauccugcccgugagcaugaccaagaccagcguggacugcacgauguacaucugcggcgacuccaccgagugcagcaaccuccugcugcaguacggguccuucugcacccagcucaaccgcgcccugaccggcaucgcggucgagcaggacaagaacacgcaggagguguucgcccaggugaagcagaucuacaagaccccgcccaucaaggacuucgggggcuucaacuucagccagauccugcccgaccccuccaagcccagcaagcgguccuucaucgaggaccuccuguucaacaaggucacccuggccgacgccggcuucaucaagcaguacggggacugccucggcgacaucgccgcgcgcgaccugaucugcgcccagaaguucaacgggcugaccgugcugcccccgcuccugacggacgagaugaucgcccaguacaccagcgcccuccuggccggcaccaucaccuccggguggacguucggcgcgggcgccgcccugcagauccccuucgccaugcagauggcguaccgguucaacgggaucggcgugacccagaacguccucuacgagaaccagaagcugaucgccaaccaguucaacagcgccaucgggaagauccaggacucccugagcuccaccgccagcgcccucggcaagcugcaggacguggugaaccagaacgcgcaggcccugaacacccucgucaagcagcuguccagcaacuucggggccaucuccagcgugcugaacgacauccucgcccgccuggacaagguggaggccgagguccagaucgaccggcugaucacgggccgccuccagucccugcagaccuacgugacccagcagcugauccgggcggccgagauccgcgccagcgccaaccucgccgcgaccaagaugagcgagugcgugcugggccaguccaagcgggucgacuucugcgggaagggcuaccaccugaugagcuucccccaguccgcgccccacggggugguguuccuccacgucaccuacgugccggcccaggagaagaacuucacgaccgcccccgccaucugccacgacggcaaggcccacuucccccgcgagggggucuucgugagcaacggcacccacugguucgugacccagcggaacuucuacgagccccagaucaucacgacccacaacaccuucgucuccggcaacugcgacguggugaucgggaucgucaacaacaccguguacgacccgcugcagcccgagcuggacagcuucaaggaggagcucgacaaguacuucaagaaccacacgucccccgacguggaccugggcgacaucagcgggaucaacgccuccgucgugaacauccagaaggagaucgaccgccugaacgagguggccaagaaccucaacgagagccugaucgaccugcaggagcucggcaaguacgagcaguacaucaaguggcccugguacaucuggcugggcuucaucgccgggcugaucgcgaucgucauggugaccaucaugcucugcugcaugaccuccugcugcagcugccugaagggcugcugcuccugcgggagcugcugcaaguucgacgaggacgacuccgagccggugcugaagggcgucaagcuccacuacaccugaggacuaguguccaccugucccuccugggcugcuggauugucucguuuuccugccaaauaaacaggaucagcgcuuuacagaucuaaaaaaaaaaaaaaaaaaaaaaaaaaaaaaaaaaaaaaaaaaaaaaaaaaaaaaaaaaaaaaaaaaaaaaaaaaaaaaaaaaaaaaaaaaaaaaaaaaaa

SEQ ID NO: 25200 - RNA, 4105 nt, Artificial Sequence
  SARS-CoV-2/Wuhan/WIV05/2019__EPI_ISL_402128 spike protein mRNA gc (1-1273)(K417N_E484K_N501Y_D614G)
aggagacccgugacccggaaguuguacggcuacgcgacuuucccucccacaaacccucgcgcccuuccuuuccuacuugggcccggcagaaagcuuaccauguucguguuccugguccuccugccccuggugagcucccagugcgugaaccucaccacccgcacgcagcugccgcccgccuacaccaacagcuucacccggggcgucuacuaccccgacaagguguuccgcuccagcgugcugcacuccacccaggaccucuuccugcccuucuucagcaacgucacgugguuccacgccauccacguguccgggaccaacggcaccaagcgguucgacaacccggugcugcccuucaacgacggggucuacuucgcgagcaccgagaaguccaacaucauccgcggcuggaucuucgggacgacccucgacagcaagacccagucccugcugaucgugaacaacgccaccaacguggucaucaaggugugcgaguuccaguucugcaacgaccccuuccucggcguguacuaccacaagaacaacaagagcuggauggaguccgaguuccgggucuacagcuccgccaacaacugcacguucgaguacgugagccagcccuuccugauggaccuggagggcaagcaggggaacuucaagaaccuccgcgaguucguguucaagaacaucgacggcuacuucaagaucuacuccaagcacaccccgaucaaccugguccgggaccugccccagggguucagcgcccucgagccccugguggaccugcccaucggcaucaacaucacccgcuuccagacccuccuggcccugcaccgguccuaccucacgccgggggacagcagcuccggcuggaccgcgggcgccgccgccuacuacgugggguaccugcagccccgcaccuuccugcucaaguacaacgagaacggcaccaucacggacgcggucgacugcgcccuggacccccugagcgagaccaagugcacccucaaguccuucaccguggagaaggggaucuaccagacgagcaacuuccgggugcagcccaccgaguccaucguccgcuucccgaacaucaccaaccugugccccuucggcgagguguucaacgccacccgguucgccagcgucuacgccuggaaccgcaagcggaucuccaacugcguggcggacuacagcgugcuguacaacuccgccagcuucuccacguucaagugcuacggcgucagccccaccaagcucaacgaccugugcuucaccaacguguacgccgacuccuucgugauccgcggggacgagguccggcagaucgcccccggccagaccgggaacaucgccgacuacaacuacaagcugccggacgacuucacgggcugcgugaucgcguggaacagcaacaaccucgacuccaaggucgggggcaacuacaacuaccuguaccgccuguuccgcaagagcaaccucaagcccuucgagcgggacaucuccaccgagaucuaccaggccggcagcacccccugcaacggggugaagggcuucaacugcuacuucccccugcaguccuacggguuccagccgaccuacggcgugggguaccagcccuaccggguggucgugcugagcuucgagcuccugcacgcccccgccacggugugcggccccaagaaguccaccaaccuggucaagaacaagugcgugaacuucaacuucaacggccucaccgggaccggcgugcugaccgagagcaacaagaaguuccugccguuccagcaguucgggcgcgacaucgccgacacgaccgacgcgguccgcgacccccagacccuggagauccucgacaucacccccugcagcuucggcgggguguccgugaucacgccgggcaccaacaccagcaaccaggucgccgugcuguaccagggcgugaacugcaccgagguccccguggccauccacgccgaccagcugacgcccaccuggcggguguacuccaccgggagcaacgucuuccagacccgcgccggcugccucaucggggcggagcacgugaacaacuccuacgagugcgacauccccaucggcgccggcaucugcgccagcuaccagacgcagaccaacuccccgcggcgcgcccggagcguggcgucccagagcaucaucgccuacaccaugucccugggggccgagaacagcgucgccuacuccaacaacagcaucgccauccccaccaacuucacgaucuccgugaccaccgagauccugcccgugagcaugaccaagacgagcgucgacugcaccauguacaucugcggcgacuccaccgagugcagcaaccuccugcugcaguacggguccuucugcacccagcucaaccgcgcgcugacgggcaucgccguggagcaggacaagaacacccaggagguguucgcccaggucaagcagaucuacaagacgcccccgaucaaggacuucgggggcuucaacuucagccagauccugcccgaccccuccaagcccagcaagcgguccuucaucgaggaccuccuguucaacaaggugacccuggccgacgccggcuucaucaagcaguacggggacugccucggcgacaucgcggcccgcgaccugaucugcgcccagaaguucaacgggcugaccgugcucccgccccugcugaccgacgagaugaucgcccaguacaccagcgcccuccuggcgggcaccaucacguccggguggaccuucggcgccggcgccgcccugcagauccccuucgcgaugcagauggccuaccgguucaacgggaucggcgucacccagaacgugcucuacgagaaccagaagcugaucgccaaccaguucaacagcgccaucgggaagauccaggacucccugagcuccaccgccagcgcgcucggcaagcugcaggacguggucaaccagaacgcccaggcccugaacacgcucgugaagcagcuguccagcaacuucggggccaucuccagcgugcugaacgacauccucucccgccuggacaaggucgaggccgaggugcagaucgaccggcugaucaccggccgccuccagagccugcagaccuacgugacccagcagcugauccgggcggccgagauccgcgccagcgccaaccucgccgcgaccaagauguccgagugcguccugggccagagcaagcggguggacuucugcgggaagggcuaccaccugauguccuucccccagagcgccccgcacgggguggucuuccuccacgugacguacguccccgcccaggagaagaacuucaccaccgcccccgcgaucugccacgacggcaaggcccacuucccccgcgaggggguguucguguccaacggcacccacugguucgucacgcagcggaacuucuacgagccgcagaucaucaccaccgacaacaccuucgugagcggcaacugcgacguggucaucgggaucgugaacaacacgguguacgacccccugcagcccgagcuggacuccuucaaggaggagcucgacaaguacuucaagaaccacaccagccccgacgucgaccugggcgacaucuccgggaucaacgccagcguggugaacauccagaaggagaucgaccgccugaacgaggucgccaagaaccucaacgagucccugaucgaccugcaggagcucggcaaguacgagcaguacaucaaguggccgugguacaucuggcugggcuucaucgccgggcugaucgcgaucgugauggugaccaucaugcucugcugcaugaccagcugcugcuccugccugaagggcugcugcagcugcggguccugcugcaaguucgacgaggacgacagcgagcccguccugaagggcgugaagcuccacuacacgugaggacuaguguccaccugucccuccugggcugcuggauugucucguuuuccugccaaauaaacaggaucagcgcuuuacagaucuaaaaaaaaaaaaaaaaaaaaaaaaaaaaaaaaaaaaaaaaaaaaaaaaaaaaaaaaaaaaaaaaaaaaaaaaaaaaaaaaaaaaaaaaaaaaaaaaaaaa

SEQ ID NO: 25201 - RNA, 4096 nt, Artificial Sequence
  SARS-CoV-2/Wuhan/WIV05/2019__EPI_ISL_402128 spike protein mRNA gc (1-1273)(L18F_D80A_D215G_L242del_A243del_L244del_R246I_K417N_E484 K_N501Y_D614G_A701V)
aggagacccgugacccggaaguuguacggcuacgcgacuuucccucccacaaacccucgcgcccuuccuuuccuacuugggcccggcagaaagcuuaccauguucguguuccugguccuccugccccuggugagcucccagugcgugaacuucaccacccgcacgcagcucccgcccgccuacaccaacagcuucacccggggcgucuacuaccccgacaagguguuccgcuccagcgugcugcacuccacccaggaccuguuccuccccuucuucagcaacgucacgugguuccacgccauccacguguccgggaccaacggcaccaagcgguucgcgaacccggugcugcccuucaacgacggggucuacuucgccagcaccgagaaguccaacaucauccgcggcuggaucuucgggacgacccuggacagcaagacccagucccuccugaucgugaacaacgccaccaacguggucaucaaggugugcgaguuccaguucugcaacgaccccuuccugggcguguacuaccacaagaacaacaagagcuggauggaguccgaguuccgggucuacagcuccgccaacaacugcacguucgaguacgugagccagcccuuccucauggaccuggagggcaagcaggggaacuucaagaaccugcgcgaguucguguucaagaacaucgacggcuacuucaagaucuacuccaagcacaccccgaucaaccucguccgggggcugccccagggcuucagcgcccuggagccccucguggaccugcccaucgggaucaacaucacccgcuuccagacccugcacaucuccuaccucacgccgggcgacagcagcuccggcuggaccgcgggggccgccgccuacuacgugggcuaccugcagccccggaccuuccugcucaaguacaacgagaacgggaccaucacggacgcggucgacugcgcccuggacccccugagcgagaccaagugcacccucaaguccuucaccguggagaagggcaucuaccagacgagcaacuuccgcgugcagcccaccgaguccaucguccgguucccgaacaucaccaaccugugccccuucggcgagguguucaacgccacccgcuucgccagcgucuacgccuggaaccggaagcgcaucuccaacugcguggcggacuacagcgugcuguacaacuccgccagcuucuccacguucaagugcuacggggucagccccaccaagcucaacgaccugugcuucaccaacguguacgccgacuccuucgugauccggggcgacgagguccgccagaucgcccccgggcagaccggcaacaucgccgacuacaacuacaagcugccggacgacuucacggggugcgugaucgcguggaacagcaacaaccucgacuccaaggugggcggcaacuacaacuaccuguaccggcuguuccgcaagagcaaccucaagcccuucgagcgggacaucuccaccgagaucuaccaggccgggagcacccccugcaacggcgucaagggguucaacugcuacuucccccugcaguccuacggcuuccagccgaccuacggggugggcuaccagcccuaccgcguggucgugcugagcuucgagcuccugcacgcccccgccacggugugcggccccaagaaguccaccaaccuggucaagaacaagugcgugaacuucaacuucaacgggcucaccggcaccggggugcugaccgagagcaacaagaaguuccugccguuccagcaguucggccgggacaucgccgacacgaccgacgcgguccgcgacccccagacccucgagauccuggacaucacccccugcagcuucgggggcguguccgugaucacgccgggcaccaacaccagcaaccaggucgccgugcuguaccagggggugaacugcaccgagguccccguggccauccacgccgaccagcugacgcccaccuggcgcguguacuccaccggcagcaacgucuuccagacccgggccgggugccucaucggcgcggagcacgugaacaacuccuacgagugcgacauccccaucggcgccgggaucugcgccagcuaccagacgcagaccaacuccccgcgccgggcccgcagcguggcgucccagagcaucaucgccuacaccaugucccugggcgucgagaacagcguggccuacuccaacaacagcaucgccauccccaccaacuucacgaucuccgugaccaccgagauccugcccgucagcaugaccaagacgagcguggacugcaccauguacaucugcggggacuccaccgagugcagcaaccuccugcugcaguacggcuccuucugcacccagcucaaccgggcccugacggggaucgcgguggagcaggacaagaacacccaggaggucuucgcccaggugaagcagaucuacaagacgcccccgaucaaggacuucggcggcuucaacuucagccagauccugcccgaccccuccaagcccagcaagcgcuccuucaucgaggaccuccuguucaacaaggugacccuggccgacgccggguucaucaagcaguacggcgacugccucggggacaucgccgcgcgggaccugaucugcgcccagaaguucaacggccugaccguccucccgccccugcugaccgacgagaugaucgcccaguacaccagcgcccuccuggccgggaccaucacguccggcuggaccuucggcgcgggggccgcccugcagauccccuucgccaugcagauggcguaccgcuucaacggcaucggggugacccagaacgugcucuacgagaaccagaagcugaucgccaaccaguucaacagcgccaucggcaagauccaggacucccugagcuccaccgccagcgcccucgggaagcugcaggacgucgugaaccagaacgcgcaggcccugaacacgcucgugaagcagcuguccagcaacuucggcgccaucuccagcguccugaacgacauccucucccggcuggacaagguggaggccgaggugcagaucgaccgccugaucaccggccggcuccagagccugcagaccuacgucacccagcagcugauccgcgccgcggagauccgggccagcgccaaccucgccgccaccaagauguccgagugcgugcuggggcagagcaagcgcguggacuucugcggcaagggguaccaccugauguccuucccccagagcgcgccgcacggcgucguguuccuccacgucacguacgugcccgcccaggagaagaacuucaccaccgcccccgccaucugccacgacgggaaggcgcacuucccccgggagggcguguucgucuccaacggcacccacugguucgugacgcagcgcaacuucuacgagccgcagaucaucaccaccgacaacaccuucgugagcgggaacugcgacgucgugaucggcaucgugaacaacacggucuacgacccccugcagcccgagcuggacuccuucaaggaggagcucgacaaguacuucaagaaccacaccagccccgacguggaccugggggacaucuccggcaucaacgccagcguggucaacauccagaaggagaucgaccggcugaacgagguggccaagaaccucaacgagucccugaucgaccugcaggagcucggcaaguacgagcaguacaucaaguggccgugguacaucuggcugggguucaucgccggccugaucgccaucgugauggucaccaucaugcucugcugcaugaccagcugcugcuccugccugaaggggugcugcagcugcggcuccugcugcaaguucgacgaggacgacagcgagcccgugcugaagggggugaagcuccacuacacgugaggacuaguguccaccugucccuccugggcugcuggauugucucguuuuccugccaaauaaacaggaucagcgcuuuacagaucuaaaaaaaaaaaaaaaaaaaaaaaaaaaaaaaaaaaaaaaaaaaaaaaaaaaaaaaaaaaaaaaaaaaaaaaaaaaaaaaaaaaaaaaaaaaaaaaaaaaa

SEQ ID NO: 25202 - RNA, 4105 nt, Artificial Sequence
  SARS-CoV-2/Wuhan/WIV05/2019__EPI_ISL_402128 spike protein mRNA gc (1-1273)(E484K_D614G)
aggagacccgugacccggaaguuguacggcuacgcgacuuucccucccacaaacccucgcgcccuuccuuuccuacuugggcccggcagaaagcuuaccauguucguguuccugguccuccugccccuggugagcucccagugcgugaaccucaccacccgcacgcagcugccgcccgccuacaccaacagcuucacccggggcgucuacuaccccgacaagguguuccgcuccagcgugcugcacuccacccaggaccucuuccugcccuucuucagcaacgucacgugguuccacgccauccacguguccgggaccaacggcaccaagcgguucgacaacccggugcugcccuucaacgacggggucuacuucgcgagcaccgagaaguccaacaucauccgcggcuggaucuucgggacgacccucgacagcaagacccagucccugcugaucgugaacaacgccaccaacguggucaucaaggugugcgaguuccaguucugcaacgaccccuuccucggcguguacuaccacaagaacaacaagagcuggauggaguccgaguuccgggucuacagcuccgccaacaacugcacguucgaguacgugagccagcccuuccugauggaccuggagggcaagcaggggaacuucaagaaccuccgcgaguucguguucaagaacaucgacggcuacuucaagaucuacuccaagcacaccccgaucaaccugguccgggaccugccccagggguucagcgcccucgagccccugguggaccugcccaucggcaucaacaucacccgcuuccagacccuccuggcccugcaccgguccuaccucacgccgggggacagcagcuccggcuggaccgcgggcgccgccgccuacuacgugggguaccugcagccccgcaccuuccugcucaaguacaacgagaacggcaccaucacggacgcggucgacugcgcccuggacccccugagcgagaccaagugcacccucaaguccuucaccguggagaaggggaucuaccagacgagcaacuuccgggugcagcccaccgaguccaucguccgcuucccgaacaucaccaaccugugccccuucggcgagguguucaacgccacccgguucgccagcgucuacgccuggaaccgcaagcggaucuccaacugcguggcggacuacagcgugcuguacaacuccgccagcuucuccacguucaagugcuacggcgucagccccaccaagcucaacgaccugugcuucaccaacguguacgccgacuccuucgugauccgcggggacgagguccggcagaucgcccccggccagaccgggaagaucgccgacuacaacuacaagcugccggacgacuucacgggcugcgugaucgcguggaacagcaacaaccucgacuccaaggucgggggcaacuacaacuaccuguaccgccuguuccgcaagagcaaccucaagcccuucgagcgggacaucuccaccgagaucuaccaggccggcagcacccccugcaacggggugaagggcuucaacugcuacuucccccugcaguccuacggguuccagccgaccaacggcgugggguaccagcccuaccggguggucgugcugagcuucgagcuccugcacgcccccgccacggugugcggccccaagaaguccaccaaccuggucaagaacaagugcgugaacuucaacuucaacggccucaccgggaccggcgugcugaccgagagcaacaagaaguuccugccguuccagcaguucgggcgcgacaucgccgacacgaccgacgcgguccgcgacccccagacccuggagauccucgacaucacccccugcagcuucggcgggguguccgugaucacgccgggcaccaacaccagcaaccaggucgccgugcuguaccagggcgugaacugcaccgagguccccguggccauccacgccgaccagcugacgcccaccuggcggguguacuccaccgggagcaacgucuuccagacccgcgccggcugccucaucggggcggagcacgugaacaacuccuacgagugcgacauccccaucggcgccggcaucugcgccagcuaccagacgcagaccaacuccccgcggcgcgcccggagcguggcgucccagagcaucaucgccuacaccaugucccugggggccgagaacagcgucgccuacuccaacaacagcaucgccauccccaccaacuucacgaucuccgugaccaccgagauccugcccgugagcaugaccaagacgagcgucgacugcaccauguacaucugcggcgacuccaccgagugcagcaaccuccugcugcaguacggguccuucugcacccagcucaaccgcgcgcugacgggcaucgccguggagcaggacaagaacacccaggagguguucgcccaggucaagcagaucuacaagacgcccccgaucaaggacuucgggggcuucaacuucagccagauccugcccgaccccuccaagcccagcaagcgguccuucaucgaggaccuccuguucaacaaggugacccuggccgacgccggcuucaucaagcaguacggggacugccucggcgacaucgcggcccgcgaccugaucugcgcccagaaguucaacgggcugaccgugcucccgccccugcugaccgacgagaugaucgcccaguacaccagcgcccuccuggcgggcaccaucacguccggguggaccuucggcgccggcgccgcccugcagauccccuucgcgaugcagauggccuaccgguucaacgggaucggcgucacccagaacgugcucuacgagaaccagaagcugaucgccaaccaguucaacagcgccaucgggaagauccaggacucccugagcuccaccgccagcgcgcucggcaagcugcaggacguggucaaccagaacgcccaggcccugaacacgcucgugaagcagcuguccagcaacuucggggccaucuccagcgugcugaacgacauccucucccgccuggacaaggucgaggccgaggugcagaucgaccggcugaucaccggccgccuccagagccugcagaccuacgugacccagcagcugauccgggcggccgagauccgcgccagcgccaaccucgccgcgaccaagauguccgagugcguccugggccagagcaagcggguggacuucugcgggaagggcuaccaccugauguccuucccccagagcgccccgcacgggguggucuuccuccacgugacguacguccccgcccaggagaagaacuucaccaccgcccccgcgaucugccacgacggcaaggcccacuucccccgcgaggggguguucguguccaacggcacccacugguucgucacgcagcggaacuucuacgagccgcagaucaucaccaccgacaacaccuucgugagcggcaacugcgacguggucaucgggaucgugaacaacacgguguacgacccccugcagcccgagcuggacuccuucaaggaggagcucgacaaguacuucaagaaccacaccagccccgacgucgaccugggcgacaucuccgggaucaacgccagcguggugaacauccagaaggagaucgaccgccugaacgaggucgccaagaaccucaacgagucccugaucgaccugcaggagcucggcaaguacgagcaguacaucaaguggccgugguacaucuggcugggcuucaucgccgggcugaucgcgaucgugauggugaccaucaugcucugcugcaugaccagcugcugcuccugccugaagggcugcugcagcugcggguccugcugcaaguucgacgaggacgacagcgagcccguccugaagggcgugaagcuccacuacacgugaggacuaguguccaccugucccuccugggcugcuggauugucucguuuuccugccaaauaaacaggaucagcgcuuuacagaucuaaaaaaaaaaaaaaaaaaaaaaaaaaaaaaaaaaaaaaaaaaaaaaaaaaaaaaaaaaaaaaaaaaaaaaaaaaaaaaaaaaaaaaaaaaaaaaaaaaaa

SEQ ID NO: 25203 - RNA, 4105 nt, Artificial Sequence
  SARS-CoV-2/Wuhan/WIV05/2019__EPI_ISL_402128 spike protein mRNA gc (1-1273)(L18F_T20N_P26S_D138Y_R190S_K417T_E484K_N501Y_D614G_H655Y _T1027I)
aggagacccgugacccggaaguuguacggcuacgcgacuuucccucccacaaacccucgcgcccuuccuuuccuacuugggcccggcagaaagcuuaccauguucguguuccugguccuccugccccuggugagcucccagugcgugaacuucaccaaccgcacccagcucccgagcgccuacacgaacuccuucacccggggcgucuacuaccccgacaagguguuccgcagcuccgugcugcacagcacccaggaccuguuccuccccuucuucuccaacgucaccugguuccacgccauccacgugagcgggacgaacggcaccaagcgguucgacaaccccgugcugccguucaacgacggggucuacuucgcguccaccgagaaguccaacaucauccgcggcuggaucuucgggaccacgcuggacuccaagacccagagccuccugaucgugaacaacgccaccaacguggucaucaaggugugcgaguuccaguucugcaacuaccccuuccugggcguguacuaccacaagaacaacaaguccuggauggagagcgaguuccgggucuacuccagcgccaacaacugcaccuucgaguacgugucccagcccuuccucauggaccuggagggcaagcaggggaacuucaagaaccugagcgaguucguguucaagaacaucgacggcuacuucaagaucuacuccaagcacacgcccaucaaccucguccgcgaccugccgcagggguucagcgcccuggagccccucguggaccugcccaucggcaucaacaucacccgguuccagacccugcucgcccugcaccgcagcuaccugacccccggggacuccagcuccggcuggacggcgggcgccgccgccuacuacgugggguaccuccagccgcggaccuuccugcugaaguacaacgagaacggcaccaucaccgacgcggucgacugcgcccucgacccccugagcgagacgaagugcacccugaaguccuucaccguggagaaggggaucuaccagaccagcaacuuccgcgugcagcccacggaguccaucguccgguuccccaacaucaccaaccucugcccguucggcgagguguucaacgccacccgcuucgccagcgucuacgccuggaaccggaagcgcaucuccaacugcguggcggacuacagcgugcuguacaacuccgccagcuucuccaccuucaagugcuacggcgucagccccacgaagcugaacgaccucugcuucaccaacguguacgccgacuccuucgugauccgcggggacgagguccggcagaucgcccccggccagaccgggaccaucgccgacuacaacuacaagcugcccgacgacuucacgggcugcgugaucgcguggaacagcaacaaccuggacuccaaggucgggggcaacuacaacuaccucuaccggcuguuccgcaagagcaaccugaagccguucgagcgggacaucuccaccgagaucuaccaggccggcagcacccccugcaacggggugaagggcuucaacugcuacuucccccuccagagcuacggguuccagcccaccuacggcgugggguaccagccguaccgcguggucgugcuguccuucgagcugcuccacgcccccgccacggugugcggccccaagaaguccaccaaccuggucaagaacaagugcgugaacuucaacuucaacggccugaccgggaccggcgugcucaccgagagcaacaagaaguuccugcccuuccagcaguucgggcgggacaucgccgacacgaccgacgcgguccgcgacccgcagacccuggagauccuggacaucacccccugcagcuucggcgggguguccgugaucacgcccggcaccaacaccagcaaccaggucgccgugcucuaccagggcgugaacugcaccgaggucccgguggccauccacgccgaccagcugacgcccaccuggcgcguguacuccaccgggagcaacgucuuccagacccgggccggcugccugaucggggcggaguacgugaacaacuccuacgagugcgacauccccaucggcgccggcaucugcgccagcuaccagacgcagaccaacagcccccgccgggcccgcagcguggcgucccagagcaucaucgccuacaccaugucccucggggccgagaacagcgucgccuacuccaacaacagcaucgccaucccgaccaacuucacgaucagcgugaccaccgagauccugcccguguccaugaccaagacgagcgucgacugcaccauguacaucugcggcgacuccaccgagugcagcaaccugcuccugcaguacggguccuucugcacccagcugaaccgggcgcucacgggcaucgccguggagcaggacaagaacacccaggagguguucgcccaggucaagcagaucuacaagaccccgcccaucaaggacuucgggggcuucaacuucagccagauccugcccgaccccuccaagcccagcaagcgcuccuucaucgaggaccuccuguucaacaaggugacccuggccgacgccggcuucaucaagcaguacggggacugccugggcgacaucgcggcccgggaccucaucugcgcccagaaguucaacgggcugacggugcugcccccgcuccugaccgacgagaugaucgcccaguacaccagcgcccugcucgcgggcaccaucacguccggguggaccuucggcgccggcgccgcccugcagauccccuucgcgaugcagauggccuaccgcuucaacgggaucggcgucacccagaacgugcuguacgagaaccagaagcucaucgccaaccaguucaacagcgccaucgggaagauccaggacucccugagcuccaccgccagcgcgcugggcaagcuccaggacguggucaaccagaacgcccaggcccugaacacgcuggugaagcagcucuccagcaacuucggggccaucuccagcgugcugaacgacauccugagccggcucgacaaggucgaggccgaggugcagaucgaccgccugaucaccggccggcugcagucccuccagaccuacgugacccagcagcugauccgcgcggccgagauccgggccagcgccaaccuggccgcgaucaagauguccgagugcguccucggccagagcaagcgcguggacuucugcgggaagggcuaccaccugauguccuucccccagagcgcgccccacgggguggucuuccugcacgugaccuacgucccggcccaggagaagaacuucacgaccgcccccgccaucugccacgacggcaaggcccacuucccccgggaggggguguucguguccaacggcacccacugguucgucacccagcgcaacuucuacgagccccagaucaucacgaccgacaacaccuucgugagcggcaacugcgacguggucaucgggaucgugaacaacaccguguacgacccgcuccagcccgagcuggacuccuucaaggaggagcuggacaaguacuucaagaaccacacgagccccgacgucgaccucggcgacaucuccgggaucaacgccagcguggugaacauccagaaggagaucgaccggcugaacgaggucgccaagaaccugaacgagucccucaucgaccugcaggagcugggcaaguacgagcaguacaucaaguggcccugguacaucuggcucggcuucaucgccgggcugaucgcgaucgugauggugaccaucaugcugugcugcaugaccagcugcugcuccugccucaagggcugcugcagcugcggguccugcugcaaguucgacgaggacgacagcgagccgguccugaagggcgugaagcugcacuacaccugaggacuaguguccaccugucccuccugggcugcuggauugucucguuuuccugccaaauaaacaggaucagcgcuuuacagaucuaaaaaaaaaaaaaaaaaaaaaaaaaaaaaaaaaaaaaaaaaaaaaaaaaaaaaaaaaaaaaaaaaaaaaaaaaaaaaaaaaaaaaaaaaaaaaaaaaaaa

SEQ ID NO: 25204 - RNA, 4105 nt, Artificial Sequence
  SARS-CoV-2/Wuhan/WIV05/2019__EPI_ISL_402128 spike protein mRNA gc (1-1273)(S13I_W152C_L452R_D614G)
aggagacccgugacccggaaguuguacggcuacgcgacuuucccucccacaaacccucgcgcccuuccuuuccuacuugggcccggcagaaagcuuaccauguucguguuccugguccuccugccccuggugagcauccagugcgugaaccucaccacccgcacgcagcugccgcccgccuacaccaacuccuucacccggggcgucuacuaccccgacaagguguuccgcagcuccgugcugcacagcacccaggaccucuuccugcccuucuucuccaacgucacgugguuccacgccauccacgugagcgggaccaacggcaccaagcgguucgacaacccggugcugcccuucaacgacggggucuacuucgcguccaccgagaaguccaacaucauccgcggcuggaucuucgggacgacccucgacagcaagacccagagccugcugaucgugaacaacgccaccaacguggucaucaaggugugcgaguuccaguucugcaacgaccccuuccucggcguguacuaccacaagaacaacaaguccugcauggagagcgaguuccgggucuacuccagcgccaacaacugcacguucgaguacgugucccagcccuuccugauggaccuggagggcaagcaggggaacuucaagaaccuccgcgaguucguguucaagaacaucgacggcuacuucaagaucuacagcaagcacaccccgaucaaccugguccgggaccugccccagggguucuccgcccucgagccccugguggaccugcccaucggcaucaacaucacccgcuuccagacccuccuggcccugcaccggagcuaccucacgccgggggacuccagcagcggcuggaccgcgggcgccgccgccuacuacgugggguaccugcagccccgcaccuuccugcucaaguacaacgagaacggcaccaucacggacgcggucgacugcgcccuggacccccuguccgagaccaagugcacccucaagagcuucaccguggagaaggggaucuaccagacguccaacuuccgggugcagcccaccgagagcaucguccgcuucccgaacaucaccaaccugugccccuucggcgagguguucaacgccacccgguucgccuccgucuacgccuggaaccgcaagcggaucagcaacugcguggcggacuacuccgugcuguacaacagcgccuccuucagcacguucaagugcuacggcgucucccccaccaagcucaacgaccugugcuucaccaacguguacgccgacagcuucgugauccgcggggacgagguccggcagaucgcccccggccagaccgggaagaucgccgacuacaacuacaagcugccggacgacuucacgggcugcgugaucgcguggaacuccaacaaccucgacagcaaggucgggggcaacuacaacuaccgcuaccggcuguuccgcaaguccaaccugaagcccuucgagcgggacaucagcaccgagaucuaccaggccggcuccacccccugcaacgggguggagggcuucaacugcuacuucccccuccagagcuacggguuccagccgaccaacggcgugggguaccagcccuaccgcguggucgugcuguccuucgagcugcuccacgcccccgccacggugugcggccccaagaaguccaccaaccuggucaagaacaagugcgugaacuucaacuucaacggccugaccgggaccggcgugcucaccgagagcaacaagaaguuccugccguuccagcaguucgggcgcgacaucgccgacacgaccgacgcgguccgggacccccagacccuggagauccuggacaucacccccugcagcuucggcggggugagcgugaucacgccgggcaccaacaccuccaaccaggucgccgugcucuaccagggcgugaacugcaccgagguccccguggccauccacgccgaccagcugacgcccaccuggcgcguguacagcaccggguccaacgucuuccagacccgggccggcugccugaucggggcggagcacgugaacaacagcuacgagugcgacauccccaucggcgccggcaucugcgccuccuaccagacgcagaccaacagcccgcgccgggcccgcuccguggcgagccaguccaucaucgccuacaccaugagccucggggccgagaacuccgucgccuacagcaacaacuccaucgccauccccaccaacuucacgaucagcgugaccaccgagauccugcccguguccaugaccaagacgagcgucgacugcaccauguacaucugcggcgacagcaccgagugcuccaaccugcuccugcaguacgggagcuucugcacccagcugaaccgggcgcucacgggcaucgccguggagcaggacaagaacacccaggagguguucgcccaggucaagcagaucuacaagacgcccccgaucaaggacuucgggggcuucaacuucucccagauccugcccgaccccagcaagcccuccaagcgcagcuucaucgaggaccuccuguucaacaaggugacccuggccgacgccggcuucaucaagcaguacggggacugccugggcgacaucgcggcccgggaccucaucugcgcccagaaguucaacgggcugaccgugcugccgccccuccugaccgacgagaugaucgcccaguacaccuccgcccugcucgcgggcaccaucacgagcggguggaccuucggcgccggcgccgcccugcagauccccuucgcgaugcagauggccuaccgcuucaacgggaucggcgucacccagaacgugcuguacgagaaccagaagcucaucgccaaccaguucaacuccgccaucgggaagauccaggacagccuguccagcaccgccuccgcgcugggcaagcuccaggacguggucaaccagaacgcccaggcccugaacacgcuggugaagcagcucagcuccaacuucggggccaucagcuccgugcugaacgacauccugagccggcucgacaaggucgaggccgaggugcagaucgaccgccugaucaccggccggcugcagucccuccagaccuacgugacccagcagcugauccgcgcggccgagauccgggccagcgccaaccuggccgcgaccaagaugagcgagugcguccucggccaguccaagcgcguggacuucugcgggaagggcuaccaccugaugagcuucccccaguccgccccgcacgggguggucuuccugcacgugacguacguccccgcccaggagaagaacuucaccaccgcccccgcgaucugccacgacggcaaggcccacuucccccgggaggggguguucgugagcaacggcacccacugguucgucacgcagcgcaacuucuacgagccgcagaucaucaccaccgacaacaccuucguguccggcaacugcgacguggucaucgggaucgugaacaacacgguguacgacccccuccagcccgagcuggacagcuucaaggaggagcuggacaaguacuucaagaaccacaccucccccgacgucgaccucggcgacaucagcgggaucaacgccuccguggugaacauccagaaggagaucgaccggcugaacgaggucgccaagaaccugaacgagagccucaucgaccugcaggagcugggcaaguacgagcaguacaucaaguggccgugguacaucuggcucggcuucaucgccgggcugaucgcgaucgugauggugaccaucaugcugugcugcaugaccuccugcugcagcugccucaagggcugcugcuccugcgggagcugcugcaaguucgacgaggacgacuccgagcccguccugaagggcgugaagcugcacuacacgugaggacuaguguccaccugucccuccugggcugcuggauugucucguuuuccugccaaauaaacaggaucagcgcuuuacagaucuaaaaaaaaaaaaaaaaaaaaaaaaaaaaaaaaaaaaaaaaaaaaaaaaaaaaaaaaaaaaaaaaaaaaaaaaaaaaaaaaaaaaaaaaaaaaaaaaaaaa

SEQ ID NO: 25205 - RNA, 4105 nt, Artificial Sequence
  SARS-CoV-2/Wuhan/WIV05/2019__EPI_ISL_402128 spike protein mRNA gc (1-1273)
aggagacccgugacccggaaguuguacggcuacgcgacuuucccucccacaaacccucgcgcccuuccuuuccuacuugggcccggcagaaagcuuaccauguucguguuccuggugcugcugccccuggugagcagccagugcgugaaccugaccacccggacccagcugccaccagccuacaccaacagcuucacccggggcgucuacuaccccgacaagguguuccggagcagcguccugcacagcacccaggaccuguuccugcccuucuucagcaacgugaccugguuccacgccauccacgugagcggcaccaacggcaccaagcgguucgacaaccccgugcugcccuucaacgacggcguguacuucgccagcaccgagaagagcaacaucauccggggcuggaucuucggcaccacccuggacagcaagacccagagccugcugaucgugaauaacgccaccaacguggugaucaaggugugcgaguuccaguucugcaacgaccccuuccugggcguguacuaccacaagaacaacaagagcuggauggagagcgaguuccggguguacagcagcgccaacaacugcaccuucgaguacgugagccagcccuuccugauggaccuggagggcaagcagggcaacuucaagaaccugcgggaguucguguucaagaacaucgacggcuacuucaagaucuacagcaagcacaccccaaucaaccuggugcgggaucugccccagggcuucucagcccuggagccccugguggaccugcccaucggcaucaacaucacccgguuccagacccugcuggcccugcaccggagcuaccugaccccaggcgacagcagcagcggguggacagcaggcgcggcugcuuacuacgugggcuaccugcagccccggaccuuccugcugaaguacaacgagaacggcaccaucaccgacgccguggacugcgcccuggacccucugagcgagaccaagugcacccugaagagcuucaccguggagaagggcaucuaccagaccagcaacuuccgggugcagcccaccgagagcaucgugcgguuccccaacaucaccaaccugugccccuucggcgagguguucaacgccacccgguucgccagcguguacgccuggaaccggaagcggaucagcaacugcguggccgacuacagcgugcuguacaacagcgccagcuucagcaccuucaagugcuacggcgugagccccaccaagcugaacgaccugugcuucaccaacguguacgccgacagcuucgugauccguggcgacgaggugcggcagaucgcacccggccagacaggcaagaucgccgacuacaacuacaagcugcccgacgacuucaccggcugcgugaucgccuggaacagcaacaaccucgacagcaaggugggcggcaacuacaacuaccuguaccggcuguuccggaagagcaaccugaagcccuucgagcgggacaucagcaccgagaucuaccaagccggcuccaccccuugcaacggcguggagggcuucaacugcuacuucccucugcagagcuacggcuuccagcccaccaacggcgugggcuaccagcccuaccgggugguggugcugagcuucgagcugcugcacgccccagccaccguguguggccccaagaagagcaccaaccuggugaagaacaagugcgugaacuucaacuucaacggccuuaccggcaccggcgugcugaccgagagcaacaagaaauuccugcccuuucagcaguucggccgggacaucgccgacaccaccgacgcugugcgggauccccagacccuggagauccuggacaucaccccuugcagcuucggcggcgugagcgugaucaccccaggcaccaacaccagcaaccagguggccgugcuguaccaggacgugaacugcaccgaggugcccguggccauccacgccgaccagcugacacccaccuggcgggucuacagcaccggcagcaacguguuccagacccgggccgguugccugaucggcgccgagcacgugaacaacagcuacgagugcgacauccccaucggcgccggcaucugugccagcuaccagacccagaccaauucaccccggagggcaaggagcguggccagccagagcaucaucgccuacaccaugagccugggcgccgagaacagcguggccuacagcaacaacagcaucgccauccccaccaacuucaccaucagcgugaccaccgagauucugcccgugagcaugaccaagaccagcguggacugcaccauguacaucugcggcgacagcaccgagugcagcaaccugcugcugcaguacggcagcuucugcacccagcugaaccgggcccugaccggcaucgccguggagcaggacaagaacacccaggagguguucgcccaggugaagcagaucuacaagaccccucccaucaaggacuucggcggcuucaacuucagccagauccugcccgaccccagcaagcccagcaagcggagcuucaucgaggaccugcuguucaacaaggugacccuagccgacgccggcuucaucaagcaguacggcgacugccucggcgacauagccgcccgggaccugaucugcgcccagaaguucaacggccugaccgugcugccuccccugcugaccgacgagaugaucgcccaguacaccagcgcccuguuagccggaaccaucaccagcggcuggacuuucggcgcuggagccgcucugcagauccccuucgccaugcagauggccuaccgguucaacggcaucggcgugacccagaacgugcuguacgagaaccagaagcugaucgccaaccaguucaacagcgccaucggcaagauccaggacagccugagcagcaccgcuagcgcccugggcaagcugcaggacguggugaaccagaacgcccaggcccugaacacccuggugaagcagcugagcagcaacuucggcgccaucagcagcgugcugaacgacauccugagccggcuggacaaggucgaggccgaggugcagaucgaccggcugaucacuggccggcugcagagccugcagaccuacgugacccagcagcugauccgggccgccgagauucgggccagcgccaaccuggccgccaccaagaugagcgagugcgugcugggccagagcaagcggguggacuucugcggcaagggcuaccaccugaugagcuuuccccagagcgcaccccacggagugguguuccugcacgugaccuacgugcccgcccaggagaagaacuucaccaccgccccagccaucugccacgacggcaaggcccacuuuccccgggagggcguguucgugagcaacggcacccacugguucgugacccagcggaacuucuacgagccccagaucaucaccaccgacaacaccuucgugagcggcaacugcgacguggugaucggcaucgugaacaacaccguguacgauccccugcagcccgagcuggacagcuucaaggaggagcuggacaaguacuucaagaaucacaccagccccgacguggaccugggcgacaucagcggcaucaacgccagcguggugaacauccagaaggagaucgaucggcugaacgagguggccaagaaccugaacgagagccugaucgaccugcaggagcugggcaaguacgagcaguacaucaaguggcccugguacaucuggcugggcuucaucgccggccugaucgccaucgugauggugaccaucaugcugugcugcaugaccagcugcugcagcugccugaagggcuguugcagcugcggcagcugcugcaaguucgacgaggacgacagcgagcccgugcugaagggcgugaagcugcacuacaccugaggacuaguguccaccugucccuccugggcugcuggauugucucguuuuccugccaaauaaacaggaucagcgcuuuacagaucuaaaaaaaaaaaaaaaaaaaaaaaaaaaaaaaaaaaaaaaaaaaaaaaaaaaaaaaaaaaaaaaaaaaaaaaaaaaaaaaaaaaaaaaaaaaaaaaaaaaa

SEQ ID NO: 25206 - RNA, 4105 nt, Artificial Sequence
  SARS-CoV-2/Wuhan/WIV05/2019__EPI_ISL_402128 spike protein mRNA gc (1-1273)(D614G)
aggagacccgugacccggaaguuguacggcuacgcgacuuucccucccacaaacccucgcgcccuuccuuuccuacuugggcccggcagaaagcuuaccauguucguguuccuggugcugcugccccuggugagcagccagugcgugaaccugaccacccggacccagcugccaccagccuacaccaacagcuucacccggggcgucuacuaccccgacaagguguuccggagcagcguccugcacagcacccaggaccuguuccugcccuucuucagcaacgugaccugguuccacgccauccacgugagcggcaccaacggcaccaagcgguucgacaaccccgugcugcccuucaacgacggcguguacuucgccagcaccgagaagagcaacaucauccggggcuggaucuucggcaccacccuggacagcaagacccagagccugcugaucgugaauaacgccaccaacguggugaucaaggugugcgaguuccaguucugcaacgaccccuuccugggcguguacuaccacaagaacaacaagagcuggauggagagcgaguuccggguguacagcagcgccaacaacugcaccuucgaguacgugagccagcccuuccugauggaccuggagggcaagcagggcaacuucaagaaccugcgggaguucguguucaagaacaucgacggcuacuucaagaucuacagcaagcacaccccaaucaaccuggugcgggaucugccccagggcuucucagcccuggagccccugguggaccugcccaucggcaucaacaucacccgguuccagacccugcuggcccugcaccggagcuaccugaccccaggcgacagcagcagcggguggacagcaggcgcggcugcuuacuacgugggcuaccugcagccccggaccuuccugcugaaguacaacgagaacggcaccaucaccgacgccguggacugcgcccuggacccucugagcgagaccaagugcacccugaagagcuucaccguggagaagggcaucuaccagaccagcaacuuccgggugcagcccaccgagagcaucgugcgguuccccaacaucaccaaccugugccccuucggcgagguguucaacgccacccgguucgccagcguguacgccuggaaccggaagcggaucagcaacugcguggccgacuacagcgugcuguacaacagcgccagcuucagcaccuucaagugcuacggcgugagccccaccaagcugaacgaccugugcuucaccaacguguacgccgacagcuucgugauccguggcgacgaggugcggcagaucgcacccggccagacaggcaagaucgccgacuacaacuacaagcugcccgacgacuucaccggcugcgugaucgccuggaacagcaacaaccucgacagcaaggugggcggcaacuacaacuaccuguaccggcuguuccggaagagcaaccugaagcccuucgagcgggacaucagcaccgagaucuaccaagccggcuccaccccuugcaacggcguggagggcuucaacugcuacuucccucugcagagcuacggcuuccagcccaccaacggcgugggcuaccagcccuaccgggugguggugcugagcuucgagcugcugcacgccccagccaccguguguggccccaagaagagcaccaaccuggugaagaacaagugcgugaacuucaacuucaacggccuuaccggcaccggcgugcugaccgagagcaacaagaaauuccugcccuuucagcaguucggccgggacaucgccgacaccaccgacgcugugcgggauccccagacccuggagauccuggacaucaccccuugcagcuucggcggcgugagcgugaucaccccaggcaccaacaccagcaaccagguggccgugcuguaccagggcgugaacugcaccgaggugcccguggccauccacgccgaccagcugacacccaccuggcgggucuacagcaccggcagcaacguguuccagacccgggccgguugccugaucggcgccgagcacgugaacaacagcuacgagugcgacauccccaucggcgccggcaucugugccagcuaccagacccagaccaauucaccccggagggcaaggagcguggccagccagagcaucaucgccuacaccaugagccugggcgccgagaacagcguggccuacagcaacaacagcaucgccauccccaccaacuucaccaucagcgugaccaccgagauucugcccgugagcaugaccaagaccagcguggacugcaccauguacaucugcggcgacagcaccgagugcagcaaccugcugcugcaguacggcagcuucugcacccagcugaaccgggcccugaccggcaucgccguggagcaggacaagaacacccaggagguguucgcccaggugaagcagaucuacaagaccccucccaucaaggacuucggcggcuucaacuucagccagauccugcccgaccccagcaagcccagcaagcggagcuucaucgaggaccugcuguucaacaaggugacccuagccgacgccggcuucaucaagcaguacggcgacugccucggcgacauagccgcccgggaccugaucugcgcccagaaguucaacggccugaccgugcugccuccccugcugaccgacgagaugaucgcccaguacaccagcgcccuguuagccggaaccaucaccagcggcuggacuuucggcgcuggagccgcucugcagauccccuucgccaugcagauggccuaccgguucaacggcaucggcgugacccagaacgugcuguacgagaaccagaagcugaucgccaaccaguucaacagcgccaucggcaagauccaggacagccugagcagcaccgcuagcgcccugggcaagcugcaggacguggugaaccagaacgcccaggcccugaacacccuggugaagcagcugagcagcaacuucggcgccaucagcagcgugcugaacgacauccugagccggcuggacaaggucgaggccgaggugcagaucgaccggcugaucacuggccggcugcagagccugcagaccuacgugacccagcagcugauccgggccgccgagauucgggccagcgccaaccuggccgccaccaagaugagcgagugcgugcugggccagagcaagcggguggacuucugcggcaagggcuaccaccugaugagcuuuccccagagcgcaccccacggagugguguuccugcacgugaccuacgugcccgcccaggagaagaacuucaccaccgccccagccaucugccacgacggcaaggcccacuuuccccgggagggcguguucgugagcaacggcacccacugguucgugacccagcggaacuucuacgagccccagaucaucaccaccgacaacaccuucgugagcggcaacugcgacguggugaucggcaucgugaacaacaccguguacgauccccugcagcccgagcuggacagcuucaaggaggagcuggacaaguacuucaagaaucacaccagccccgacguggaccugggcgacaucagcggcaucaacgccagcguggugaacauccagaaggagaucgaucggcugaacgagguggccaagaaccugaacgagagccugaucgaccugcaggagcugggcaaguacgagcaguacaucaaguggcccugguacaucuggcugggcuucaucgccggccugaucgccaucgugauggugaccaucaugcugugcugcaugaccagcugcugcagcugccugaagggcuguugcagcugcggcagcugcugcaaguucgacgaggacgacagcgagcccgugcugaagggcgugaagcugcacuacaccugaggacuaguguccaccugucccuccugggcugcuggauugucucguuuuccugccaaauaaacaggaucagcgcuuuacagaucuaaaaaaaaaaaaaaaaaaaaaaaaaaaaaaaaaaaaaaaaaaaaaaaaaaaaaaaaaaaaaaaaaaaaaaaaaaaaaaaaaaaaaaaaaaaaaaaaaaaa

SEQ ID NO: 25207 - RNA, 4105 nt, Artificial Sequence
  SARS-CoV-2/Wuhan/WIV05/2019__EPI_ISL_402128 spike protein mRNA gc (1-1273)(A222V_D614G)
aggagacccgugacccggaaguuguacggcuacgcgacuuucccucccacaaacccucgcgcccuuccuuuccuacuugggcccggcagaaagcuuaccauguucguguuccuggugcugcugccccuggugagcagccagugcgugaaccugaccacccggacccagcugccaccagccuacaccaacagcuucacccggggcgucuacuaccccgacaagguguuccggagcagcguccugcacagcacccaggaccuguuccugcccuucuucagcaacgugaccugguuccacgccauccacgugagcggcaccaacggcaccaagcgguucgacaaccccgugcugcccuucaacgacggcguguacuucgccagcaccgagaagagcaacaucauccggggcuggaucuucggcaccacccuggacagcaagacccagagccugcugaucgugaauaacgccaccaacguggugaucaaggugugcgaguuccaguucugcaacgaccccuuccugggcguguacuaccacaagaacaacaagagcuggauggagagcgaguuccggguguacagcagcgccaacaacugcaccuucgaguacgugagccagcccuuccugauggaccuggagggcaagcagggcaacuucaagaaccugcgggaguucguguucaagaacaucgacggcuacuucaagaucuacagcaagcacaccccaaucaaccuggugcgggaucugccccagggcuucucagugcuggagccccugguggaccugcccaucggcaucaacaucacccgguuccagacccugcuggcccugcaccggagcuaccugaccccaggcgacagcagcagcggguggacagcaggcgcggcugcuuacuacgugggcuaccugcagccccggaccuuccugcugaaguacaacgagaacggcaccaucaccgacgccguggacugcgcccuggacccucugagcgagaccaagugcacccugaagagcuucaccguggagaagggcaucuaccagaccagcaacuuccgggugcagcccaccgagagcaucgugcgguuccccaacaucaccaaccugugccccuucggcgagguguucaacgccacccgguucgccagcguguacgccuggaaccggaagcggaucagcaacugcguggccgacuacagcgugcuguacaacagcgccagcuucagcaccuucaagugcuacggcgugagccccaccaagcugaacgaccugugcuucaccaacguguacgccgacagcuucgugauccguggcgacgaggugcggcagaucgcacccggccagacaggcaagaucgccgacuacaacuacaagcugcccgacgacuucaccggcugcgugaucgccuggaacagcaacaaccucgacagcaaggugggcggcaacuacaacuaccuguaccggcuguuccggaagagcaaccugaagcccuucgagcgggacaucagcaccgagaucuaccaagccggcuccaccccuugcaacggcguggagggcuucaacugcuacuucccucugcagagcuacggcuuccagcccaccaacggcgugggcuaccagcccuaccgggugguggugcugagcuucgagcugcugcacgccccagccaccguguguggccccaagaagagcaccaaccuggugaagaacaagugcgugaacuucaacuucaacggccuuaccggcaccggcgugcugaccgagagcaacaagaaauuccugcccuuucagcaguucggccgggacaucgccgacaccaccgacgcugugcgggauccccagacccuggagauccuggacaucaccccuugcagcuucggcggcgugagcgugaucaccccaggcaccaacaccagcaaccagguggccgugcuguaccagggcgugaacugcaccgaggugcccguggccauccacgccgaccagcugacacccaccuggcgggucuacagcaccggcagcaacguguuccagacccgggccgguugccugaucggcgccgagcacgugaacaacagcuacgagugcgacauccccaucggcgccggcaucugugccagcuaccagacccagaccaauucaccccggagggcaaggagcguggccagccagagcaucaucgccuacaccaugagccugggcgccgagaacagcguggccuacagcaacaacagcaucgccauccccaccaacuucaccaucagcgugaccaccgagauucugcccgugagcaugaccaagaccagcguggacugcaccauguacaucugcggcgacagcaccgagugcagcaaccugcugcugcaguacggcagcuucugcacccagcugaaccgggcccugaccggcaucgccguggagcaggacaagaacacccaggagguguucgcccaggugaagcagaucuacaagaccccucccaucaaggacuucggcggcuucaacuucagccagauccugcccgaccccagcaagcccagcaagcggagcuucaucgaggaccugcuguucaacaaggugacccuagccgacgccggcuucaucaagcaguacggcgacugccucggcgacauagccgcccgggaccugaucugcgcccagaaguucaacggccugaccgugcugccuccccugcugaccgacgagaugaucgcccaguacaccagcgcccuguuagccggaaccaucaccagcggcuggacuuucggcgcuggagccgcucugcagauccccuucgccaugcagauggccuaccgguucaacggcaucggcgugacccagaacgugcuguacgagaaccagaagcugaucgccaaccaguucaacagcgccaucggcaagauccaggacagccugagcagcaccgcuagcgcccugggcaagcugcaggacguggugaaccagaacgcccaggcccugaacacccuggugaagcagcugagcagcaacuucggcgccaucagcagcgugcugaacgacauccugagccggcuggacaaggucgaggccgaggugcagaucgaccggcugaucacuggccggcugcagagccugcagaccuacgugacccagcagcugauccgggccgccgagauucgggccagcgccaaccuggccgccaccaagaugagcgagugcgugcugggccagagcaagcggguggacuucugcggcaagggcuaccaccugaugagcuuuccccagagcgcaccccacggagugguguuccugcacgugaccuacgugcccgcccaggagaagaacuucaccaccgccccagccaucugccacgacggcaaggcccacuuuccccgggagggcguguucgugagcaacggcacccacugguucgugacccagcggaacuucuacgagccccagaucaucaccaccgacaacaccuucgugagcggcaacugcgacguggugaucggcaucgugaacaacaccguguacgauccccugcagcccgagcuggacagcuucaaggaggagcuggacaaguacuucaagaaucacaccagccccgacguggaccugggcgacaucagcggcaucaacgccagcguggugaacauccagaaggagaucgaucggcugaacgagguggccaagaaccugaacgagagccugaucgaccugcaggagcugggcaaguacgagcaguacaucaaguggcccugguacaucuggcugggcuucaucgccggccugaucgccaucgugauggugaccaucaugcugugcugcaugaccagcugcugcagcugccugaagggcuguugcagcugcggcagcugcugcaaguucgacgaggacgacagcgagcccgugcugaagggcgugaagcugcacuacaccugaggacuaguguccaccugucccuccugggcugcuggauugucucguuuuccugccaaauaaacaggaucagcgcuuuacagaucuaaaaaaaaaaaaaaaaaaaaaaaaaaaaaaaaaaaaaaaaaaaaaaaaaaaaaaaaaaaaaaaaaaaaaaaaaaaaaaaaaaaaaaaaaaaaaaaaaaaa

SEQ ID NO: 25208 - RNA, 4105 nt, Artificial Sequence
  SARS-CoV-2/Wuhan/WIV05/2019__EPI_ISL_402128 spike protein mRNA gc (1-1273)(N439K_D614G)
aggagacccgugacccggaaguuguacggcuacgcgacuuucccucccacaaacccucgcgcccuuccuuuccuacuugggcccggcagaaagcuuaccauguucguguuccuggugcugcugccccuggugagcagccagugcgugaaccugaccacccggacccagcugccaccagccuacaccaacagcuucacccggggcgucuacuaccccgacaagguguuccggagcagcguccugcacagcacccaggaccuguuccugcccuucuucagcaacgugaccugguuccacgccauccacgugagcggcaccaacggcaccaagcgguucgacaaccccgugcugcccuucaacgacggcguguacuucgccagcaccgagaagagcaacaucauccggggcuggaucuucggcaccacccuggacagcaagacccagagccugcugaucgugaauaacgccaccaacguggugaucaaggugugcgaguuccaguucugcaacgaccccuuccugggcguguacuaccacaagaacaacaagagcuggauggagagcgaguuccggguguacagcagcgccaacaacugcaccuucgaguacgugagccagcccuuccugauggaccuggagggcaagcagggcaacuucaagaaccugcgggaguucguguucaagaacaucgacggcuacuucaagaucuacagcaagcacaccccaaucaaccuggugcgggaucugccccagggcuucucagcccuggagccccugguggaccugcccaucggcaucaacaucacccgguuccagacccugcuggcccugcaccggagcuaccugaccccaggcgacagcagcagcggguggacagcaggcgcggcugcuuacuacgugggcuaccugcagccccggaccuuccugcugaaguacaacgagaacggcaccaucaccgacgccguggacugcgcccuggacccucugagcgagaccaagugcacccugaagagcuucaccguggagaagggcaucuaccagaccagcaacuuccgggugcagcccaccgagagcaucgugcgguuccccaacaucaccaaccugugccccuucggcgagguguucaacgccacccgguucgccagcguguacgccuggaaccggaagcggaucagcaacugcguggccgacuacagcgugcuguacaacagcgccagcuucagcaccuucaagugcuacggcgugagccccaccaagcugaacgaccugugcuucaccaacguguacgccgacagcuucgugauccguggcgacgaggugcggcagaucgcacccggccagacaggcaagaucgccgacuacaacuacaagcugcccgacgacuucaccggcugcgugaucgccuggaacagcaagaaccucgacagcaaggugggcggcaacuacaacuaccuguaccggcuguuccggaagagcaaccugaagcccuucgagcgggacaucagcaccgagaucuaccaagccggcuccaccccuugcaacggcguggagggcuucaacugcuacuucccucugcagagcuacggcuuccagcccaccaacggcgugggcuaccagcccuaccgggugguggugcugagcuucgagcugcugcacgccccagccaccguguguggccccaagaagagcaccaaccuggugaagaacaagugcgugaacuucaacuucaacggccuuaccggcaccggcgugcugaccgagagcaacaagaaauuccugcccuuucagcaguucggccgggacaucgccgacaccaccgacgcugugcgggauccccagacccuggagauccuggacaucaccccuugcagcuucggcggcgugagcgugaucaccccaggcaccaacaccagcaaccagguggccgugcuguaccagggcgugaacugcaccgaggugcccguggccauccacgccgaccagcugacacccaccuggcgggucuacagcaccggcagcaacguguuccagacccgggccgguugccugaucggcgccgagcacgugaacaacagcuacgagugcgacauccccaucggcgccggcaucugugccagcuaccagacccagaccaauucaccccggagggcaaggagcguggccagccagagcaucaucgccuacaccaugagccugggcgccgagaacagcguggccuacagcaacaacagcaucgccauccccaccaacuucaccaucagcgugaccaccgagauucugcccgugagcaugaccaagaccagcguggacugcaccauguacaucugcggcgacagcaccgagugcagcaaccugcugcugcaguacggcagcuucugcacccagcugaaccgggcccugaccggcaucgccguggagcaggacaagaacacccaggagguguucgcccaggugaagcagaucuacaagaccccucccaucaaggacuucggcggcuucaacuucagccagauccugcccgaccccagcaagcccagcaagcggagcuucaucgaggaccugcuguucaacaaggugacccuagccgacgccggcuucaucaagcaguacggcgacugccucggcgacauagccgcccgggaccugaucugcgcccagaaguucaacggccugaccgugcugccuccccugcugaccgacgagaugaucgcccaguacaccagcgcccuguuagccggaaccaucaccagcggcuggacuuucggcgcuggagccgcucugcagauccccuucgccaugcagauggccuaccgguucaacggcaucggcgugacccagaacgugcuguacgagaaccagaagcugaucgccaaccaguucaacagcgccaucggcaagauccaggacagccugagcagcaccgcuagcgcccugggcaagcugcaggacguggugaaccagaacgcccaggcccugaacacccuggugaagcagcugagcagcaacuucggcgccaucagcagcgugcugaacgacauccugagccggcuggacaaggucgaggccgaggugcagaucgaccggcugaucacuggccggcugcagagccugcagaccuacgugacccagcagcugauccgggccgccgagauucgggccagcgccaaccuggccgccaccaagaugagcgagugcgugcugggccagagcaagcggguggacuucugcggcaagggcuaccaccugaugagcuuuccccagagcgcaccccacggagugguguuccugcacgugaccuacgugcccgcccaggagaagaacuucaccaccgccccagccaucugccacgacggcaaggcccacuuuccccgggagggcguguucgugagcaacggcacccacugguucgugacccagcggaacuucuacgagccccagaucaucaccaccgacaacaccuucgugagcggcaacugcgacguggugaucggcaucgugaacaacaccguguacgauccccugcagcccgagcuggacagcuucaaggaggagcuggacaaguacuucaagaaucacaccagccccgacguggaccugggcgacaucagcggcaucaacgccagcguggugaacauccagaaggagaucgaucggcugaacgagguggccaagaaccugaacgagagccugaucgaccugcaggagcugggcaaguacgagcaguacaucaaguggcccugguacaucuggcugggcuucaucgccggccugaucgccaucgugauggugaccaucaugcugugcugcaugaccagcugcugcagcugccugaagggcuguugcagcugcggcagcugcugcaaguucgacgaggacgacagcgagcccgugcugaagggcgugaagcugcacuacaccugaggacuaguguccaccugucccuccugggcugcuggauugucucguuuuccugccaaauaaacaggaucagcgcuuuacagaucuaaaaaaaaaaaaaaaaaaaaaaaaaaaaaaaaaaaaaaaaaaaaaaaaaaaaaaaaaaaaaaaaaaaaaaaaaaaaaaaaaaaaaaaaaaaaaaaaaaaa

SEQ ID NO: 25209 - RNA, 4105 nt, Artificial Sequence
  SARS-CoV-2/Wuhan/WIV05/2019__EPI_ISL_402128 spike protein mRNA gc (1-1273)(S477N_D614G)
aggagacccgugacccggaaguuguacggcuacgcgacuuucccucccacaaacccucgcgcccuuccuuuccuacuugggcccggcagaaagcuuaccauguucguguuccuggugcugcugccccuggugagcagccagugcgugaaccugaccacccggacccagcugccaccagccuacaccaacagcuucacccggggcgucuacuaccccgacaagguguuccggagcagcguccugcacagcacccaggaccuguuccugcccuucuucagcaacgugaccugguuccacgccauccacgugagcggcaccaacggcaccaagcgguucgacaaccccgugcugcccuucaacgacggcguguacuucgccagcaccgagaagagcaacaucauccggggcuggaucuucggcaccacccuggacagcaagacccagagccugcugaucgugaauaacgccaccaacguggugaucaaggugugcgaguuccaguucugcaacgaccccuuccugggcguguacuaccacaagaacaacaagagcuggauggagagcgaguuccggguguacagcagcgccaacaacugcaccuucgaguacgugagccagcccuuccugauggaccuggagggcaagcagggcaacuucaagaaccugcgggaguucguguucaagaacaucgacggcuacuucaagaucuacagcaagcacaccccaaucaaccuggugcgggaucugccccagggcuucucagcccuggagccccugguggaccugcccaucggcaucaacaucacccgguuccagacccugcuggcccugcaccggagcuaccugaccccaggcgacagcagcagcggguggacagcaggcgcggcugcuuacuacgugggcuaccugcagccccggaccuuccugcugaaguacaacgagaacggcaccaucaccgacgccguggacugcgcccuggacccucugagcgagaccaagugcacccugaagagcuucaccguggagaagggcaucuaccagaccagcaacuuccgggugcagcccaccgagagcaucgugcgguuccccaacaucaccaaccugugccccuucggcgagguguucaacgccacccgguucgccagcguguacgccuggaaccggaagcggaucagcaacugcguggccgacuacagcgugcuguacaacagcgccagcuucagcaccuucaagugcuacggcgugagccccaccaagcugaacgaccugugcuucaccaacguguacgccgacagcuucgugauccguggcgacgaggugcggcagaucgcacccggccagacaggcaagaucgccgacuacaacuacaagcugcccgacgacuucaccggcugcgugaucgccuggaacagcaacaaccucgacagcaaggugggcggcaacuacaacuaccuguaccggcuguuccggaagagcaaccugaagcccuucgagcgggacaucagcaccgagaucuaccaagccggcaacaccccuugcaacggcguggagggcuucaacugcuacuucccucugcagagcuacggcuuccagcccaccaacggcgugggcuaccagcccuaccgggugguggugcugagcuucgagcugcugcacgccccagccaccguguguggccccaagaagagcaccaaccuggugaagaacaagugcgugaacuucaacuucaacggccuuaccggcaccggcgugcugaccgagagcaacaagaaauuccugcccuuucagcaguucggccgggacaucgccgacaccaccgacgcugugcgggauccccagacccuggagauccuggacaucaccccuugcagcuucggcggcgugagcgugaucaccccaggcaccaacaccagcaaccagguggccgugcuguaccagggcgugaacugcaccgaggugcccguggccauccacgccgaccagcugacacccaccuggcgggucuacagcaccggcagcaacguguuccagacccgggccgguugccugaucggcgccgagcacgugaacaacagcuacgagugcgacauccccaucggcgccggcaucugugccagcuaccagacccagaccaauucaccccggagggcaaggagcguggccagccagagcaucaucgccuacaccaugagccugggcgccgagaacagcguggccuacagcaacaacagcaucgccauccccaccaacuucaccaucagcgugaccaccgagauucugcccgugagcaugaccaagaccagcguggacugcaccauguacaucugcggcgacagcaccgagugcagcaaccugcugcugcaguacggcagcuucugcacccagcugaaccgggcccugaccggcaucgccguggagcaggacaagaacacccaggagguguucgcccaggugaagcagaucuacaagaccccucccaucaaggacuucggcggcuucaacuucagccagauccugcccgaccccagcaagcccagcaagcggagcuucaucgaggaccugcuguucaacaaggugacccuagccgacgccggcuucaucaagcaguacggcgacugccucggcgacauagccgcccgggaccugaucugcgcccagaaguucaacggccugaccgugcugccuccccugcugaccgacgagaugaucgcccaguacaccagcgcccuguuagccggaaccaucaccagcggcuggacuuucggcgcuggagccgcucugcagauccccuucgccaugcagauggccuaccgguucaacggcaucggcgugacccagaacgugcuguacgagaaccagaagcugaucgccaaccaguucaacagcgccaucggcaagauccaggacagccugagcagcaccgcuagcgcccugggcaagcugcaggacguggugaaccagaacgcccaggcccugaacacccuggugaagcagcugagcagcaacuucggcgccaucagcagcgugcugaacgacauccugagccggcuggacaaggucgaggccgaggugcagaucgaccggcugaucacuggccggcugcagagccugcagaccuacgugacccagcagcugauccgggccgccgagauucgggccagcgccaaccuggccgccaccaagaugagcgagugcgugcugggccagagcaagcggguggacuucugcggcaagggcuaccaccugaugagcuuuccccagagcgcaccccacggagugguguuccugcacgugaccuacgugcccgcccaggagaagaacuucaccaccgccccagccaucugccacgacggcaaggcccacuuuccccgggagggcguguucgugagcaacggcacccacugguucgugacccagcggaacuucuacgagccccagaucaucaccaccgacaacaccuucgugagcggcaacugcgacguggugaucggcaucgugaacaacaccguguacgauccccugcagcccgagcuggacagcuucaaggaggagcuggacaaguacuucaagaaucacaccagccccgacguggaccugggcgacaucagcggcaucaacgccagcguggugaacauccagaaggagaucgaucggcugaacgagguggccaagaaccugaacgagagccugaucgaccugcaggagcugggcaaguacgagcaguacaucaaguggcccugguacaucuggcugggcuucaucgccggccugaucgccaucgugauggugaccaucaugcugugcugcaugaccagcugcugcagcugccugaagggcuguugcagcugcggcagcugcugcaaguucgacgaggacgacagcgagcccgugcugaagggcgugaagcugcacuacaccugaggacuaguguccaccugucccuccugggcugcuggauugucucguuuuccugccaaauaaacaggaucagcgcuuuacagaucuaaaaaaaaaaaaaaaaaaaaaaaaaaaaaaaaaaaaaaaaaaaaaaaaaaaaaaaaaaaaaaaaaaaaaaaaaaaaaaaaaaaaaaaaaaaaaaaaaaaa

SEQ ID NO: 25210 - RNA, 4105 nt, Artificial Sequence
  SARS-CoV-2/Wuhan/WIV05/2019__EPI_ISL_402128 spike protein mRNA gc (1-1273)(N501Y_D614G)
aggagacccgugacccggaaguuguacggcuacgcgacuuucccucccacaaacccucgcgcccuuccuuuccuacuugggcccggcagaaagcuuaccauguucguguuccuggugcugcugccccuggugagcagccagugcgugaaccugaccacccggacccagcugccaccagccuacaccaacagcuucacccggggcgucuacuaccccgacaagguguuccggagcagcguccugcacagcacccaggaccuguuccugcccuucuucagcaacgugaccugguuccacgccauccacgugagcggcaccaacggcaccaagcgguucgacaaccccgugcugcccuucaacgacggcguguacuucgccagcaccgagaagagcaacaucauccggggcuggaucuucggcaccacccuggacagcaagacccagagccugcugaucgugaauaacgccaccaacguggugaucaaggugugcgaguuccaguucugcaacgaccccuuccugggcguguacuaccacaagaacaacaagagcuggauggagagcgaguuccggguguacagcagcgccaacaacugcaccuucgaguacgugagccagcccuuccugauggaccuggagggcaagcagggcaacuucaagaaccugcgggaguucguguucaagaacaucgacggcuacuucaagaucuacagcaagcacaccccaaucaaccuggugcgggaucugccccagggcuucucagcccuggagccccugguggaccugcccaucggcaucaacaucacccgguuccagacccugcuggcccugcaccggagcuaccugaccccaggcgacagcagcagcggguggacagcaggcgcggcugcuuacuacgugggcuaccugcagccccggaccuuccugcugaaguacaacgagaacggcaccaucaccgacgccguggacugcgcccuggacccucugagcgagaccaagugcacccugaagagcuucaccguggagaagggcaucuaccagaccagcaacuuccgggugcagcccaccgagagcaucgugcgguuccccaacaucaccaaccugugccccuucggcgagguguucaacgccacccgguucgccagcguguacgccuggaaccggaagcggaucagcaacugcguggccgacuacagcgugcuguacaacagcgccagcuucagcaccuucaagugcuacggcgugagccccaccaagcugaacgaccugugcuucaccaacguguacgccgacagcuucgugauccguggcgacgaggugcggcagaucgcacccggccagacaggcaagaucgccgacuacaacuacaagcugcccgacgacuucaccggcugcgugaucgccuggaacagcaacaaccucgacagcaaggugggcggcaacuacaacuaccuguaccggcuguuccggaagagcaaccugaagcccuucgagcgggacaucagcaccgagaucuaccaagccggcuccaccccuugcaacggcguggagggcuucaacugcuacuucccucugcagagcuacggcuuccagcccaccuacggcgugggcuaccagcccuaccgggugguggugcugagcuucgagcugcugcacgccccagccaccguguguggccccaagaagagcaccaaccuggugaagaacaagugcgugaacuucaacuucaacggccuuaccggcaccggcgugcugaccgagagcaacaagaaauuccugcccuuucagcaguucggccgggacaucgccgacaccaccgacgcugugcgggauccccagacccuggagauccuggacaucaccccuugcagcuucggcggcgugagcgugaucaccccaggcaccaacaccagcaaccagguggccgugcuguaccagggcgugaacugcaccgaggugcccguggccauccacgccgaccagcugacacccaccuggcgggucuacagcaccggcagcaacguguuccagacccgggccgguugccugaucggcgccgagcacgugaacaacagcuacgagugcgacauccccaucggcgccggcaucugugccagcuaccagacccagaccaauucaccccggagggcaaggagcguggccagccagagcaucaucgccuacaccaugagccugggcgccgagaacagcguggccuacagcaacaacagcaucgccauccccaccaacuucaccaucagcgugaccaccgagauucugcccgugagcaugaccaagaccagcguggacugcaccauguacaucugcggcgacagcaccgagugcagcaaccugcugcugcaguacggcagcuucugcacccagcugaaccgggcccugaccggcaucgccguggagcaggacaagaacacccaggagguguucgcccaggugaagcagaucuacaagaccccucccaucaaggacuucggcggcuucaacuucagccagauccugcccgaccccagcaagcccagcaagcggagcuucaucgaggaccugcuguucaacaaggugacccuagccgacgccggcuucaucaagcaguacggcgacugccucggcgacauagccgcccgggaccugaucugcgcccagaaguucaacggccugaccgugcugccuccccugcugaccgacgagaugaucgcccaguacaccagcgcccuguuagccggaaccaucaccagcggcuggacuuucggcgcuggagccgcucugcagauccccuucgccaugcagauggccuaccgguucaacggcaucggcgugacccagaacgugcuguacgagaaccagaagcugaucgccaaccaguucaacagcgccaucggcaagauccaggacagccugagcagcaccgcuagcgcccugggcaagcugcaggacguggugaaccagaacgcccaggcccugaacacccuggugaagcagcugagcagcaacuucggcgccaucagcagcgugcugaacgacauccugagccggcuggacaaggucgaggccgaggugcagaucgaccggcugaucacuggccggcugcagagccugcagaccuacgugacccagcagcugauccgggccgccgagauucgggccagcgccaaccuggccgccaccaagaugagcgagugcgugcugggccagagcaagcggguggacuucugcggcaagggcuaccaccugaugagcuuuccccagagcgcaccccacggagugguguuccugcacgugaccuacgugcccgcccaggagaagaacuucaccaccgccccagccaucugccacgacggcaaggcccacuuuccccgggagggcguguucgugagcaacggcacccacugguucgugacccagcggaacuucuacgagccccagaucaucaccaccgacaacaccuucgugagcggcaacugcgacguggugaucggcaucgugaacaacaccguguacgauccccugcagcccgagcuggacagcuucaaggaggagcuggacaaguacuucaagaaucacaccagccccgacguggaccugggcgacaucagcggcaucaacgccagcguggugaacauccagaaggagaucgaucggcugaacgagguggccaagaaccugaacgagagccugaucgaccugcaggagcugggcaaguacgagcaguacaucaaguggcccugguacaucuggcugggcuucaucgccggccugaucgccaucgugauggugaccaucaugcugugcugcaugaccagcugcugcagcugccugaagggcuguugcagcugcggcagcugcugcaaguucgacgaggacgacagcgagcccgugcugaagggcgugaagcugcacuacaccugaggacuaguguccaccugucccuccugggcugcuggauugucucguuuuccugccaaauaaacaggaucagcgcuuuacagaucuaaaaaaaaaaaaaaaaaaaaaaaaaaaaaaaaaaaaaaaaaaaaaaaaaaaaaaaaaaaaaaaaaaaaaaaaaaaaaaaaaaaaaaaaaaaaaaaaaaaa

SEQ ID NO: 25211 - RNA, 4099 nt, Artificial Sequence
  SARS-CoV-2/Wuhan/WIV05/2019__EPI_ISL_402128 spike protein mRNA gc (1-1273)(H69del_V70del_D614G)
aggagacccgugacccggaaguuguacggcuacgcgacuuucccucccacaaacccucgcgcccuuccuuuccuacuugggcccggcagaaagcuuaccauguucguguuccuggugcugcugccccuggugagcagccagugcgugaaccugaccacccggacccagcugccaccagccuacaccaacagcuucacccggggcgucuacuaccccgacaagguguuccggagcagcguccugcacagcacccaggaccuguuccugcccuucuucagcaacgugaccugguuccacgccaucagcggcaccaacggcaccaagcgguucgacaaccccgugcugcccuucaacgacggcguguacuucgccagcaccgagaagagcaacaucauccggggcuggaucuucggcaccacccuggacagcaagacccagagccugcugaucgugaauaacgccaccaacguggugaucaaggugugcgaguuccaguucugcaacgaccccuuccugggcguguacuaccacaagaacaacaagagcuggauggagagcgaguuccggguguacagcagcgccaacaacugcaccuucgaguacgugagccagcccuuccugauggaccuggagggcaagcagggcaacuucaagaaccugcgggaguucguguucaagaacaucgacggcuacuucaagaucuacagcaagcacaccccaaucaaccuggugcgggaucugccccagggcuucucagcccuggagccccugguggaccugcccaucggcaucaacaucacccgguuccagacccugcuggcccugcaccggagcuaccugaccccaggcgacagcagcagcggguggacagcaggcgcggcugcuuacuacgugggcuaccugcagccccggaccuuccugcugaaguacaacgagaacggcaccaucaccgacgccguggacugcgcccuggacccucugagcgagaccaagugcacccugaagagcuucaccguggagaagggcaucuaccagaccagcaacuuccgggugcagcccaccgagagcaucgugcgguuccccaacaucaccaaccugugccccuucggcgagguguucaacgccacccgguucgccagcguguacgccuggaaccggaagcggaucagcaacugcguggccgacuacagcgugcuguacaacagcgccagcuucagcaccuucaagugcuacggcgugagccccaccaagcugaacgaccugugcuucaccaacguguacgccgacagcuucgugauccguggcgacgaggugcggcagaucgcacccggccagacaggcaagaucgccgacuacaacuacaagcugcccgacgacuucaccggcugcgugaucgccuggaacagcaacaaccucgacagcaaggugggcggcaacuacaacuaccuguaccggcuguuccggaagagcaaccugaagcccuucgagcgggacaucagcaccgagaucuaccaagccggcuccaccccuugcaacggcguggagggcuucaacugcuacuucccucugcagagcuacggcuuccagcccaccaacggcgugggcuaccagcccuaccgggugguggugcugagcuucgagcugcugcacgccccagccaccguguguggccccaagaagagcaccaaccuggugaagaacaagugcgugaacuucaacuucaacggccuuaccggcaccggcgugcugaccgagagcaacaagaaauuccugcccuuucagcaguucggccgggacaucgccgacaccaccgacgcugugcgggauccccagacccuggagauccuggacaucaccccuugcagcuucggcggcgugagcgugaucaccccaggcaccaacaccagcaaccagguggccgugcuguaccagggcgugaacugcaccgaggugcccguggccauccacgccgaccagcugacacccaccuggcgggucuacagcaccggcagcaacguguuccagacccgggccgguugccugaucggcgccgagcacgugaacaacagcuacgagugcgacauccccaucggcgccggcaucugugccagcuaccagacccagaccaauucaccccggagggcaaggagcguggccagccagagcaucaucgccuacaccaugagccugggcgccgagaacagcguggccuacagcaacaacagcaucgccauccccaccaacuucaccaucagcgugaccaccgagauucugcccgugagcaugaccaagaccagcguggacugcaccauguacaucugcggcgacagcaccgagugcagcaaccugcugcugcaguacggcagcuucugcacccagcugaaccgggcccugaccggcaucgccguggagcaggacaagaacacccaggagguguucgcccaggugaagcagaucuacaagaccccucccaucaaggacuucggcggcuucaacuucagccagauccugcccgaccccagcaagcccagcaagcggagcuucaucgaggaccugcuguucaacaaggugacccuagccgacgccggcuucaucaagcaguacggcgacugccucggcgacauagccgcccgggaccugaucugcgcccagaaguucaacggccugaccgugcugccuccccugcugaccgacgagaugaucgcccaguacaccagcgcccuguuagccggaaccaucaccagcggcuggacuuucggcgcuggagccgcucugcagauccccuucgccaugcagauggccuaccgguucaacggcaucggcgugacccagaacgugcuguacgagaaccagaagcugaucgccaaccaguucaacagcgccaucggcaagauccaggacagccugagcagcaccgcuagcgcccugggcaagcugcaggacguggugaaccagaacgcccaggcccugaacacccuggugaagcagcugagcagcaacuucggcgccaucagcagcgugcugaacgacauccugagccggcuggacaaggucgaggccgaggugcagaucgaccggcugaucacuggccggcugcagagccugcagaccuacgugacccagcagcugauccgggccgccgagauucgggccagcgccaaccuggccgccaccaagaugagcgagugcgugcugggccagagcaagcggguggacuucugcggcaagggcuaccaccugaugagcuuuccccagagcgcaccccacggagugguguuccugcacgugaccuacgugcccgcccaggagaagaacuucaccaccgccccagccaucugccacgacggcaaggcccacuuuccccgggagggcguguucgugagcaacggcacccacugguucgugacccagcggaacuucuacgagccccagaucaucaccaccgacaacaccuucgugagcggcaacugcgacguggugaucggcaucgugaacaacaccguguacgauccccugcagcccgagcuggacagcuucaaggaggagcuggacaaguacuucaagaaucacaccagccccgacguggaccugggcgacaucagcggcaucaacgccagcguggugaacauccagaaggagaucgaucggcugaacgagguggccaagaaccugaacgagagccugaucgaccugcaggagcugggcaaguacgagcaguacaucaaguggcccugguacaucuggcugggcuucaucgccggccugaucgccaucgugauggugaccaucaugcugugcugcaugaccagcugcugcagcugccugaagggcuguugcagcugcggcagcugcugcaaguucgacgaggacgacagcgagcccgugcugaagggcgugaagcugcacuacaccugaggacuaguguccaccugucccuccugggcugcuggauugucucguuuuccugccaaauaaacaggaucagcgcuuuacagaucuaaaaaaaaaaaaaaaaaaaaaaaaaaaaaaaaaaaaaaaaaaaaaaaaaaaaaaaaaaaaaaaaaaaaaaaaaaaaaaaaaaaaaaaaaaaaaaaaaaaa

SEQ ID NO: 25212 - RNA, 4105 nt, Artificial Sequence
  SARS-CoV-2/Wuhan/WIV05/2019__EPI_ISL_402128 spike protein mRNA gc (1-1273)(Y453F_D614G)
aggagacccgugacccggaaguuguacggcuacgcgacuuucccucccacaaacccucgcgcccuuccuuuccuacuugggcccggcagaaagcuuaccauguucguguuccuggugcugcugccccuggugagcagccagugcgugaaccugaccacccggacccagcugccaccagccuacaccaacagcuucacccggggcgucuacuaccccgacaagguguuccggagcagcguccugcacagcacccaggaccuguuccugcccuucuucagcaacgugaccugguuccacgccauccacgugagcggcaccaacggcaccaagcgguucgacaaccccgugcugcccuucaacgacggcguguacuucgccagcaccgagaagagcaacaucauccggggcuggaucuucggcaccacccuggacagcaagacccagagccugcugaucgugaauaacgccaccaacguggugaucaaggugugcgaguuccaguucugcaacgaccccuuccugggcguguacuaccacaagaacaacaagagcuggauggagagcgaguuccggguguacagcagcgccaacaacugcaccuucgaguacgugagccagcccuuccugauggaccuggagggcaagcagggcaacuucaagaaccugcgggaguucguguucaagaacaucgacggcuacuucaagaucuacagcaagcacaccccaaucaaccuggugcgggaucugccccagggcuucucagcccuggagccccugguggaccugcccaucggcaucaacaucacccgguuccagacccugcuggcccugcaccggagcuaccugaccccaggcgacagcagcagcggguggacagcaggcgcggcugcuuacuacgugggcuaccugcagccccggaccuuccugcugaaguacaacgagaacggcaccaucaccgacgccguggacugcgcccuggacccucugagcgagaccaagugcacccugaagagcuucaccguggagaagggcaucuaccagaccagcaacuuccgggugcagcccaccgagagcaucgugcgguuccccaacaucaccaaccugugccccuucggcgagguguucaacgccacccgguucgccagcguguacgccuggaaccggaagcggaucagcaacugcguggccgacuacagcgugcuguacaacagcgccagcuucagcaccuucaagugcuacggcgugagccccaccaagcugaacgaccugugcuucaccaacguguacgccgacagcuucgugauccguggcgacgaggugcggcagaucgcacccggccagacaggcaagaucgccgacuacaacuacaagcugcccgacgacuucaccggcugcgugaucgccuggaacagcaacaaccucgacagcaaggugggcggcaacuacaacuaccuguuccggcuguuccggaagagcaaccugaagcccuucgagcgggacaucagcaccgagaucuaccaagccggcuccaccccuugcaacggcguggagggcuucaacugcuacuucccucugcagagcuacggcuuccagcccaccaacggcgugggcuaccagcccuaccgggugguggugcugagcuucgagcugcugcacgccccagccaccguguguggccccaagaagagcaccaaccuggugaagaacaagugcgugaacuucaacuucaacggccuuaccggcaccggcgugcugaccgagagcaacaagaaauuccugcccuuucagcaguucggccgggacaucgccgacaccaccgacgcugugcgggauccccagacccuggagauccuggacaucaccccuugcagcuucggcggcgugagcgugaucaccccaggcaccaacaccagcaaccagguggccgugcuguaccagggcgugaacugcaccgaggugcccguggccauccacgccgaccagcugacacccaccuggcgggucuacagcaccggcagcaacguguuccagacccgggccgguugccugaucggcgccgagcacgugaacaacagcuacgagugcgacauccccaucggcgccggcaucugugccagcuaccagacccagaccaauucaccccggagggcaaggagcguggccagccagagcaucaucgccuacaccaugagccugggcgccgagaacagcguggccuacagcaacaacagcaucgccauccccaccaacuucaccaucagcgugaccaccgagauucugcccgugagcaugaccaagaccagcguggacugcaccauguacaucugcggcgacagcaccgagugcagcaaccugcugcugcaguacggcagcuucugcacccagcugaaccgggcccugaccggcaucgccguggagcaggacaagaacacccaggagguguucgcccaggugaagcagaucuacaagaccccucccaucaaggacuucggcggcuucaacuucagccagauccugcccgaccccagcaagcccagcaagcggagcuucaucgaggaccugcuguucaacaaggugacccuagccgacgccggcuucaucaagcaguacggcgacugccucggcgacauagccgcccgggaccugaucugcgcccagaaguucaacggccugaccgugcugccuccccugcugaccgacgagaugaucgcccaguacaccagcgcccuguuagccggaaccaucaccagcggcuggacuuucggcgcuggagccgcucugcagauccccuucgccaugcagauggccuaccgguucaacggcaucggcgugacccagaacgugcuguacgagaaccagaagcugaucgccaaccaguucaacagcgccaucggcaagauccaggacagccugagcagcaccgcuagcgcccugggcaagcugcaggacguggugaaccagaacgcccaggcccugaacacccuggugaagcagcugagcagcaacuucggcgccaucagcagcgugcugaacgacauccugagccggcuggacaaggucgaggccgaggugcagaucgaccggcugaucacuggccggcugcagagccugcagaccuacgugacccagcagcugauccgggccgccgagauucgggccagcgccaaccuggccgccaccaagaugagcgagugcgugcugggccagagcaagcggguggacuucugcggcaagggcuaccaccugaugagcuuuccccagagcgcaccccacggagugguguuccugcacgugaccuacgugcccgcccaggagaagaacuucaccaccgccccagccaucugccacgacggcaaggcccacuuuccccgggagggcguguucgugagcaacggcacccacugguucgugacccagcggaacuucuacgagccccagaucaucaccaccgacaacaccuucgugagcggcaacugcgacguggugaucggcaucgugaacaacaccguguacgauccccugcagcccgagcuggacagcuucaaggaggagcuggacaaguacuucaagaaucacaccagccccgacguggaccugggcgacaucagcggcaucaacgccagcguggugaacauccagaaggagaucgaucggcugaacgagguggccaagaaccugaacgagagccugaucgaccugcaggagcugggcaaguacgagcaguacaucaaguggcccugguacaucuggcugggcuucaucgccggccugaucgccaucgugauggugaccaucaugcugugcugcaugaccagcugcugcagcugccugaagggcuguugcagcugcggcagcugcugcaaguucgacgaggacgacagcgagcccgugcugaagggcgugaagcugcacuacaccugaggacuaguguccaccugucccuccugggcugcuggauugucucguuuuccugccaaauaaacaggaucagcgcuuuacagaucuaaaaaaaaaaaaaaaaaaaaaaaaaaaaaaaaaaaaaaaaaaaaaaaaaaaaaaaaaaaaaaaaaaaaaaaaaaaaaaaaaaaaaaaaaaaaaaaaaaaa

SEQ ID NO: 25213 - RNA, 4105 nt, Artificial Sequence
  SARS-CoV-2/Wuhan/WIV05/2019__EPI_ISL_402128 spike protein mRNA gc (1-1273)(D614G_I692V)
aggagacccgugacccggaaguuguacggcuacgcgacuuucccucccacaaacccucgcgcccuuccuuuccuacuugggcccggcagaaagcuuaccauguucguguuccuggugcugcugccccuggugagcagccagugcgugaaccugaccacccggacccagcugccaccagccuacaccaacagcuucacccggggcgucuacuaccccgacaagguguuccggagcagcguccugcacagcacccaggaccuguuccugcccuucuucagcaacgugaccugguuccacgccauccacgugagcggcaccaacggcaccaagcgguucgacaaccccgugcugcccuucaacgacggcguguacuucgccagcaccgagaagagcaacaucauccggggcuggaucuucggcaccacccuggacagcaagacccagagccugcugaucgugaauaacgccaccaacguggugaucaaggugugcgaguuccaguucugcaacgaccccuuccugggcguguacuaccacaagaacaacaagagcuggauggagagcgaguuccggguguacagcagcgccaacaacugcaccuucgaguacgugagccagcccuuccugauggaccuggagggcaagcagggcaacuucaagaaccugcgggaguucguguucaagaacaucgacggcuacuucaagaucuacagcaagcacaccccaaucaaccuggugcgggaucugccccagggcuucucagcccuggagccccugguggaccugcccaucggcaucaacaucacccgguuccagacccugcuggcccugcaccggagcuaccugaccccaggcgacagcagcagcggguggacagcaggcgcggcugcuuacuacgugggcuaccugcagccccggaccuuccugcugaaguacaacgagaacggcaccaucaccgacgccguggacugcgcccuggacccucugagcgagaccaagugcacccugaagagcuucaccguggagaagggcaucuaccagaccagcaacuuccgggugcagcccaccgagagcaucgugcgguuccccaacaucaccaaccugugccccuucggcgagguguucaacgccacccgguucgccagcguguacgccuggaaccggaagcggaucagcaacugcguggccgacuacagcgugcuguacaacagcgccagcuucagcaccuucaagugcuacggcgugagccccaccaagcugaacgaccugugcuucaccaacguguacgccgacagcuucgugauccguggcgacgaggugcggcagaucgcacccggccagacaggcaagaucgccgacuacaacuacaagcugcccgacgacuucaccggcugcgugaucgccuggaacagcaacaaccucgacagcaaggugggcggcaacuacaacuaccuguaccggcuguuccggaagagcaaccugaagcccuucgagcgggacaucagcaccgagaucuaccaagccggcuccaccccuugcaacggcguggagggcuucaacugcuacuucccucugcagagcuacggcuuccagcccaccaacggcgugggcuaccagcccuaccgggugguggugcugagcuucgagcugcugcacgccccagccaccguguguggccccaagaagagcaccaaccuggugaagaacaagugcgugaacuucaacuucaacggccuuaccggcaccggcgugcugaccgagagcaacaagaaauuccugcccuuucagcaguucggccgggacaucgccgacaccaccgacgcugugcgggauccccagacccuggagauccuggacaucaccccuugcagcuucggcggcgugagcgugaucaccccaggcaccaacaccagcaaccagguggccgugcuguaccagggcgugaacugcaccgaggugcccguggccauccacgccgaccagcugacacccaccuggcgggucuacagcaccggcagcaacguguuccagacccgggccgguugccugaucggcgccgagcacgugaacaacagcuacgagugcgacauccccaucggcgccggcaucugugccagcuaccagacccagaccaauucaccccggagggcaaggagcguggccagccagagcgugaucgccuacaccaugagccugggcgccgagaacagcguggccuacagcaacaacagcaucgccauccccaccaacuucaccaucagcgugaccaccgagauucugcccgugagcaugaccaagaccagcguggacugcaccauguacaucugcggcgacagcaccgagugcagcaaccugcugcugcaguacggcagcuucugcacccagcugaaccgggcccugaccggcaucgccguggagcaggacaagaacacccaggagguguucgcccaggugaagcagaucuacaagaccccucccaucaaggacuucggcggcuucaacuucagccagauccugcccgaccccagcaagcccagcaagcggagcuucaucgaggaccugcuguucaacaaggugacccuagccgacgccggcuucaucaagcaguacggcgacugccucggcgacauagccgcccgggaccugaucugcgcccagaaguucaacggccugaccgugcugccuccccugcugaccgacgagaugaucgcccaguacaccagcgcccuguuagccggaaccaucaccagcggcuggacuuucggcgcuggagccgcucugcagauccccuucgccaugcagauggccuaccgguucaacggcaucggcgugacccagaacgugcuguacgagaaccagaagcugaucgccaaccaguucaacagcgccaucggcaagauccaggacagccugagcagcaccgcuagcgcccugggcaagcugcaggacguggugaaccagaacgcccaggcccugaacacccuggugaagcagcugagcagcaacuucggcgccaucagcagcgugcugaacgacauccugagccggcuggacaaggucgaggccgaggugcagaucgaccggcugaucacuggccggcugcagagccugcagaccuacgugacccagcagcugauccgggccgccgagauucgggccagcgccaaccuggccgccaccaagaugagcgagugcgugcugggccagagcaagcggguggacuucugcggcaagggcuaccaccugaugagcuuuccccagagcgcaccccacggagugguguuccugcacgugaccuacgugcccgcccaggagaagaacuucaccaccgccccagccaucugccacgacggcaaggcccacuuuccccgggagggcguguucgugagcaacggcacccacugguucgugacccagcggaacuucuacgagccccagaucaucaccaccgacaacaccuucgugagcggcaacugcgacguggugaucggcaucgugaacaacaccguguacgauccccugcagcccgagcuggacagcuucaaggaggagcuggacaaguacuucaagaaucacaccagccccgacguggaccugggcgacaucagcggcaucaacgccagcguggugaacauccagaaggagaucgaucggcugaacgagguggccaagaaccugaacgagagccugaucgaccugcaggagcugggcaaguacgagcaguacaucaaguggcccugguacaucuggcugggcuucaucgccggccugaucgccaucgugauggugaccaucaugcugugcugcaugaccagcugcugcagcugccugaagggcuguugcagcugcggcagcugcugcaaguucgacgaggacgacagcgagcccgugcugaagggcgugaagcugcacuacaccugaggacuaguguccaccugucccuccugggcugcuggauugucucguuuuccugccaaauaaacaggaucagcgcuuuacagaucuaaaaaaaaaaaaaaaaaaaaaaaaaaaaaaaaaaaaaaaaaaaaaaaaaaaaaaaaaaaaaaaaaaaaaaaaaaaaaaaaaaaaaaaaaaaaaaaaaaaa

SEQ ID NO: 25214 - RNA, 4105 nt, Artificial Sequence
  SARS-CoV-2/Wuhan/WIV05/2019__EPI_ISL_402128 spike protein mRNA gc (1-1273)(D614G_M1229I)
aggagacccgugacccggaaguuguacggcuacgcgacuuucccucccacaaacccucgcgcccuuccuuuccuacuugggcccggcagaaagcuuaccauguucguguuccuggugcugcugccccuggugagcagccagugcgugaaccugaccacccggacccagcugccaccagccuacaccaacagcuucacccggggcgucuacuaccccgacaagguguuccggagcagcguccugcacagcacccaggaccuguuccugcccuucuucagcaacgugaccugguuccacgccauccacgugagcggcaccaacggcaccaagcgguucgacaaccccgugcugcccuucaacgacggcguguacuucgccagcaccgagaagagcaacaucauccggggcuggaucuucggcaccacccuggacagcaagacccagagccugcugaucgugaauaacgccaccaacguggugaucaaggugugcgaguuccaguucugcaacgaccccuuccugggcguguacuaccacaagaacaacaagagcuggauggagagcgaguuccggguguacagcagcgccaacaacugcaccuucgaguacgugagccagcccuuccugauggaccuggagggcaagcagggcaacuucaagaaccugcgggaguucguguucaagaacaucgacggcuacuucaagaucuacagcaagcacaccccaaucaaccuggugcgggaucugccccagggcuucucagcccuggagccccugguggaccugcccaucggcaucaacaucacccgguuccagacccugcuggcccugcaccggagcuaccugaccccaggcgacagcagcagcggguggacagcaggcgcggcugcuuacuacgugggcuaccugcagccccggaccuuccugcugaaguacaacgagaacggcaccaucaccgacgccguggacugcgcccuggacccucugagcgagaccaagugcacccugaagagcuucaccguggagaagggcaucuaccagaccagcaacuuccgggugcagcccaccgagagcaucgugcgguuccccaacaucaccaaccugugccccuucggcgagguguucaacgccacccgguucgccagcguguacgccuggaaccggaagcggaucagcaacugcguggccgacuacagcgugcuguacaacagcgccagcuucagcaccuucaagugcuacggcgugagccccaccaagcugaacgaccugugcuucaccaacguguacgccgacagcuucgugauccguggcgacgaggugcggcagaucgcacccggccagacaggcaagaucgccgacuacaacuacaagcugcccgacgacuucaccggcugcgugaucgccuggaacagcaacaaccucgacagcaaggugggcggcaacuacaacuaccuguaccggcuguuccggaagagcaaccugaagcccuucgagcgggacaucagcaccgagaucuaccaagccggcuccaccccuugcaacggcguggagggcuucaacugcuacuucccucugcagagcuacggcuuccagcccaccaacggcgugggcuaccagcccuaccgggugguggugcugagcuucgagcugcugcacgccccagccaccguguguggccccaagaagagcaccaaccuggugaagaacaagugcgugaacuucaacuucaacggccuuaccggcaccggcgugcugaccgagagcaacaagaaauuccugcccuuucagcaguucggccgggacaucgccgacaccaccgacgcugugcgggauccccagacccuggagauccuggacaucaccccuugcagcuucggcggcgugagcgugaucaccccaggcaccaacaccagcaaccagguggccgugcuguaccagggcgugaacugcaccgaggugcccguggccauccacgccgaccagcugacacccaccuggcgggucuacagcaccggcagcaacguguuccagacccgggccgguugccugaucggcgccgagcacgugaacaacagcuacgagugcgacauccccaucggcgccggcaucugugccagcuaccagacccagaccaauucaccccggagggcaaggagcguggccagccagagcaucaucgccuacaccaugagccugggcgccgagaacagcguggccuacagcaacaacagcaucgccauccccaccaacuucaccaucagcgugaccaccgagauucugcccgugagcaugaccaagaccagcguggacugcaccauguacaucugcggcgacagcaccgagugcagcaaccugcugcugcaguacggcagcuucugcacccagcugaaccgggcccugaccggcaucgccguggagcaggacaagaacacccaggagguguucgcccaggugaagcagaucuacaagaccccucccaucaaggacuucggcggcuucaacuucagccagauccugcccgaccccagcaagcccagcaagcggagcuucaucgaggaccugcuguucaacaaggugacccuagccgacgccggcuucaucaagcaguacggcgacugccucggcgacauagccgcccgggaccugaucugcgcccagaaguucaacggccugaccgugcugccuccccugcugaccgacgagaugaucgcccaguacaccagcgcccuguuagccggaaccaucaccagcggcuggacuuucggcgcuggagccgcucugcagauccccuucgccaugcagauggccuaccgguucaacggcaucggcgugacccagaacgugcuguacgagaaccagaagcugaucgccaaccaguucaacagcgccaucggcaagauccaggacagccugagcagcaccgcuagcgcccugggcaagcugcaggacguggugaaccagaacgcccaggcccugaacacccuggugaagcagcugagcagcaacuucggcgccaucagcagcgugcugaacgacauccugagccggcuggacaaggucgaggccgaggugcagaucgaccggcugaucacuggccggcugcagagccugcagaccuacgugacccagcagcugauccgggccgccgagauucgggccagcgccaaccuggccgccaccaagaugagcgagugcgugcugggccagagcaagcggguggacuucugcggcaagggcuaccaccugaugagcuuuccccagagcgcaccccacggagugguguuccugcacgugaccuacgugcccgcccaggagaagaacuucaccaccgccccagccaucugccacgacggcaaggcccacuuuccccgggagggcguguucgugagcaacggcacccacugguucgugacccagcggaacuucuacgagccccagaucaucaccaccgacaacaccuucgugagcggcaacugcgacguggugaucggcaucgugaacaacaccguguacgauccccugcagcccgagcuggacagcuucaaggaggagcuggacaaguacuucaagaaucacaccagccccgacguggaccugggcgacaucagcggcaucaacgccagcguggugaacauccagaaggagaucgaucggcugaacgagguggccaagaaccugaacgagagccugaucgaccugcaggagcugggcaaguacgagcaguacaucaaguggcccugguacaucuggcugggcuucaucgccggccugaucgccaucgugaucgugaccaucaugcugugcugcaugaccagcugcugcagcugccugaagggcuguugcagcugcggcagcugcugcaaguucgacgaggacgacagcgagcccgugcugaagggcgugaagcugcacuacaccugaggacuaguguccaccugucccuccugggcugcuggauugucucguuuuccugccaaauaaacaggaucagcgcuuuacagaucuaaaaaaaaaaaaaaaaaaaaaaaaaaaaaaaaaaaaaaaaaaaaaaaaaaaaaaaaaaaaaaaaaaaaaaaaaaaaaaaaaaaaaaaaaaaaaaaaaaaa

SEQ ID NO: 25215 - RNA, 4099 nt, Artificial Sequence
  SARS-CoV-2/Wuhan/WIV05/2019__EPI_ISL_402128 spike protein mRNA gc (1-1273)(H69del_V70del_A222V_Y453F_S477N_D614G_I692V)
aggagacccgugacccggaaguuguacggcuacgcgacuuucccucccacaaacccucgcgcccuuccuuuccuacuugggcccggcagaaagcuuaccauguucguguuccuggugcugcugccccuggugagcagccagugcgugaaccugaccacccggacccagcugccaccagccuacaccaacagcuucacccggggcgucuacuaccccgacaagguguuccggagcagcguccugcacagcacccaggaccuguuccugcccuucuucagcaacgugaccugguuccacgccaucagcggcaccaacggcaccaagcgguucgacaaccccgugcugcccuucaacgacggcguguacuucgccagcaccgagaagagcaacaucauccggggcuggaucuucggcaccacccuggacagcaagacccagagccugcugaucgugaauaacgccaccaacguggugaucaaggugugcgaguuccaguucugcaacgaccccuuccugggcguguacuaccacaagaacaacaagagcuggauggagagcgaguuccggguguacagcagcgccaacaacugcaccuucgaguacgugagccagcccuuccugauggaccuggagggcaagcagggcaacuucaagaaccugcgggaguucguguucaagaacaucgacggcuacuucaagaucuacagcaagcacaccccaaucaaccuggugcgggaucugccccagggcuucucagugcuggagccccugguggaccugcccaucggcaucaacaucacccgguuccagacccugcuggcccugcaccggagcuaccugaccccaggcgacagcagcagcggguggacagcaggcgcggcugcuuacuacgugggcuaccugcagccccggaccuuccugcugaaguacaacgagaacggcaccaucaccgacgccguggacugcgcccuggacccucugagcgagaccaagugcacccugaagagcuucaccguggagaagggcaucuaccagaccagcaacuuccgggugcagcccaccgagagcaucgugcgguuccccaacaucaccaaccugugccccuucggcgagguguucaacgccacccgguucgccagcguguacgccuggaaccggaagcggaucagcaacugcguggccgacuacagcgugcuguacaacagcgccagcuucagcaccuucaagugcuacggcgugagccccaccaagcugaacgaccugugcuucaccaacguguacgccgacagcuucgugauccguggcgacgaggugcggcagaucgcacccggccagacaggcaagaucgccgacuacaacuacaagcugcccgacgacuucaccggcugcgugaucgccuggaacagcaacaaccucgacagcaaggugggcggcaacuacaacuaccuguuccggcuguuccggaagagcaaccugaagcccuucgagcgggacaucagcaccgagaucuaccaagccggcaacaccccuugcaacggcguggagggcuucaacugcuacuucccucugcagagcuacggcuuccagcccaccaacggcgugggcuaccagcccuaccgggugguggugcugagcuucgagcugcugcacgccccagccaccguguguggccccaagaagagcaccaaccuggugaagaacaagugcgugaacuucaacuucaacggccuuaccggcaccggcgugcugaccgagagcaacaagaaauuccugcccuuucagcaguucggccgggacaucgccgacaccaccgacgcugugcgggauccccagacccuggagauccuggacaucaccccuugcagcuucggcggcgugagcgugaucaccccaggcaccaacaccagcaaccagguggccgugcuguaccagggcgugaacugcaccgaggugcccguggccauccacgccgaccagcugacacccaccuggcgggucuacagcaccggcagcaacguguuccagacccgggccgguugccugaucggcgccgagcacgugaacaacagcuacgagugcgacauccccaucggcgccggcaucugugccagcuaccagacccagaccaauucaccccggagggcaaggagcguggccagccagagcgugaucgccuacaccaugagccugggcgccgagaacagcguggccuacagcaacaacagcaucgccauccccaccaacuucaccaucagcgugaccaccgagauucugcccgugagcaugaccaagaccagcguggacugcaccauguacaucugcggcgacagcaccgagugcagcaaccugcugcugcaguacggcagcuucugcacccagcugaaccgggcccugaccggcaucgccguggagcaggacaagaacacccaggagguguucgcccaggugaagcagaucuacaagaccccucccaucaaggacuucggcggcuucaacuucagccagauccugcccgaccccagcaagcccagcaagcggagcuucaucgaggaccugcuguucaacaaggugacccuagccgacgccggcuucaucaagcaguacggcgacugccucggcgacauagccgcccgggaccugaucugcgcccagaaguucaacggccugaccgugcugccuccccugcugaccgacgagaugaucgcccaguacaccagcgcccuguuagccggaaccaucaccagcggcuggacuuucggcgcuggagccgcucugcagauccccuucgccaugcagauggccuaccgguucaacggcaucggcgugacccagaacgugcuguacgagaaccagaagcugaucgccaaccaguucaacagcgccaucggcaagauccaggacagccugagcagcaccgcuagcgcccugggcaagcugcaggacguggugaaccagaacgcccaggcccugaacacccuggugaagcagcugagcagcaacuucggcgccaucagcagcgugcugaacgacauccugagccggcuggacaaggucgaggccgaggugcagaucgaccggcugaucacuggccggcugcagagccugcagaccuacgugacccagcagcugauccgggccgccgagauucgggccagcgccaaccuggccgccaccaagaugagcgagugcgugcugggccagagcaagcggguggacuucugcggcaagggcuaccaccugaugagcuuuccccagagcgcaccccacggagugguguuccugcacgugaccuacgugcccgcccaggagaagaacuucaccaccgccccagccaucugccacgacggcaaggcccacuuuccccgggagggcguguucgugagcaacggcacccacugguucgugacccagcggaacuucuacgagccccagaucaucaccaccgacaacaccuucgugagcggcaacugcgacguggugaucggcaucgugaacaacaccguguacgauccccugcagcccgagcuggacagcuucaaggaggagcuggacaaguacuucaagaaucacaccagccccgacguggaccugggcgacaucagcggcaucaacgccagcguggugaacauccagaaggagaucgaucggcugaacgagguggccaagaaccugaacgagagccugaucgaccugcaggagcugggcaaguacgagcaguacaucaaguggcccugguacaucuggcugggcuucaucgccggccugaucgccaucgugauggugaccaucaugcugugcugcaugaccagcugcugcagcugccugaagggcuguugcagcugcggcagcugcugcaaguucgacgaggacgacagcgagcccgugcugaagggcgugaagcugcacuacaccugaggacuaguguccaccugucccuccugggcugcuggauugucucguuuuccugccaaauaaacaggaucagcgcuuuacagaucuaaaaaaaaaaaaaaaaaaaaaaaaaaaaaaaaaaaaaaaaaaaaaaaaaaaaaaaaaaaaaaaaaaaaaaaaaaaaaaaaaaaaaaaaaaaaaaaaaaaa

SEQ ID NO: 25216 - RNA, 4099 nt, Artificial Sequence
  SARS-CoV-2/Wuhan/WIV05/2019__EPI_ISL_402128 spike protein mRNA gc (1-1273)(H69del_V70del_Y453F_D614G_I692V_M1229I)
aggagacccgugacccggaaguuguacggcuacgcgacuuucccucccacaaacccucgcgcccuuccuuuccuacuugggcccggcagaaagcuuaccauguucguguuccuggugcugcugccccuggugagcagccagugcgugaaccugaccacccggacccagcugccaccagccuacaccaacagcuucacccggggcgucuacuaccccgacaagguguuccggagcagcguccugcacagcacccaggaccuguuccugcccuucuucagcaacgugaccugguuccacgccaucagcggcaccaacggcaccaagcgguucgacaaccccgugcugcccuucaacgacggcguguacuucgccagcaccgagaagagcaacaucauccggggcuggaucuucggcaccacccuggacagcaagacccagagccugcugaucgugaauaacgccaccaacguggugaucaaggugugcgaguuccaguucugcaacgaccccuuccugggcguguacuaccacaagaacaacaagagcuggauggagagcgaguuccggguguacagcagcgccaacaacugcaccuucgaguacgugagccagcccuuccugauggaccuggagggcaagcagggcaacuucaagaaccugcgggaguucguguucaagaacaucgacggcuacuucaagaucuacagcaagcacaccccaaucaaccuggugcgggaucugccccagggcuucucagcccuggagccccugguggaccugcccaucggcaucaacaucacccgguuccagacccugcuggcccugcaccggagcuaccugaccccaggcgacagcagcagcggguggacagcaggcgcggcugcuuacuacgugggcuaccugcagccccggaccuuccugcugaaguacaacgagaacggcaccaucaccgacgccguggacugcgcccuggacccucugagcgagaccaagugcacccugaagagcuucaccguggagaagggcaucuaccagaccagcaacuuccgggugcagcccaccgagagcaucgugcgguuccccaacaucaccaaccugugccccuucggcgagguguucaacgccacccgguucgccagcguguacgccuggaaccggaagcggaucagcaacugcguggccgacuacagcgugcuguacaacagcgccagcuucagcaccuucaagugcuacggcgugagccccaccaagcugaacgaccugugcuucaccaacguguacgccgacagcuucgugauccguggcgacgaggugcggcagaucgcacccggccagacaggcaagaucgccgacuacaacuacaagcugcccgacgacuucaccggcugcgugaucgccuggaacagcaacaaccucgacagcaaggugggcggcaacuacaacuaccuguuccggcuguuccggaagagcaaccugaagcccuucgagcgggacaucagcaccgagaucuaccaagccggcuccaccccuugcaacggcguggagggcuucaacugcuacuucccucugcagagcuacggcuuccagcccaccaacggcgugggcuaccagcccuaccgggugguggugcugagcuucgagcugcugcacgccccagccaccguguguggccccaagaagagcaccaaccuggugaagaacaagugcgugaacuucaacuucaacggccuuaccggcaccggcgugcugaccgagagcaacaagaaauuccugcccuuucagcaguucggccgggacaucgccgacaccaccgacgcugugcgggauccccagacccuggagauccuggacaucaccccuugcagcuucggcggcgugagcgugaucaccccaggcaccaacaccagcaaccagguggccgugcuguaccagggcgugaacugcaccgaggugcccguggccauccacgccgaccagcugacacccaccuggcgggucuacagcaccggcagcaacguguuccagacccgggccgguugccugaucggcgccgagcacgugaacaacagcuacgagugcgacauccccaucggcgccggcaucugugccagcuaccagacccagaccaauucaccccggagggcaaggagcguggccagccagagcgugaucgccuacaccaugagccugggcgccgagaacagcguggccuacagcaacaacagcaucgccauccccaccaacuucaccaucagcgugaccaccgagauucugcccgugagcaugaccaagaccagcguggacugcaccauguacaucugcggcgacagcaccgagugcagcaaccugcugcugcaguacggcagcuucugcacccagcugaaccgggcccugaccggcaucgccguggagcaggacaagaacacccaggagguguucgcccaggugaagcagaucuacaagaccccucccaucaaggacuucggcggcuucaacuucagccagauccugcccgaccccagcaagcccagcaagcggagcuucaucgaggaccugcuguucaacaaggugacccuagccgacgccggcuucaucaagcaguacggcgacugccucggcgacauagccgcccgggaccugaucugcgcccagaaguucaacggccugaccgugcugccuccccugcugaccgacgagaugaucgcccaguacaccagcgcccuguuagccggaaccaucaccagcggcuggacuuucggcgcuggagccgcucugcagauccccuucgccaugcagauggccuaccgguucaacggcaucggcgugacccagaacgugcuguacgagaaccagaagcugaucgccaaccaguucaacagcgccaucggcaagauccaggacagccugagcagcaccgcuagcgcccugggcaagcugcaggacguggugaaccagaacgcccaggcccugaacacccuggugaagcagcugagcagcaacuucggcgccaucagcagcgugcugaacgacauccugagccggcuggacaaggucgaggccgaggugcagaucgaccggcugaucacuggccggcugcagagccugcagaccuacgugacccagcagcugauccgggccgccgagauucgggccagcgccaaccuggccgccaccaagaugagcgagugcgugcugggccagagcaagcggguggacuucugcggcaagggcuaccaccugaugagcuuuccccagagcgcaccccacggagugguguuccugcacgugaccuacgugcccgcccaggagaagaacuucaccaccgccccagccaucugccacgacggcaaggcccacuuuccccgggagggcguguucgugagcaacggcacccacugguucgugacccagcggaacuucuacgagccccagaucaucaccaccgacaacaccuucgugagcggcaacugcgacguggugaucggcaucgugaacaacaccguguacgauccccugcagcccgagcuggacagcuucaaggaggagcuggacaaguacuucaagaaucacaccagccccgacguggaccugggcgacaucagcggcaucaacgccagcguggugaacauccagaaggagaucgaucggcugaacgagguggccaagaaccugaacgagagccugaucgaccugcaggagcugggcaaguacgagcaguacaucaaguggcccugguacaucuggcugggcuucaucgccggccugaucgccaucgugaucgugaccaucaugcugugcugcaugaccagcugcugcagcugccugaagggcuguugcagcugcggcagcugcugcaaguucgacgaggacgacagcgagcccgugcugaagggcgugaagcugcacuacaccugaggacuaguguccaccugucccuccugggcugcuggauugucucguuuuccugccaaauaaacaggaucagcgcuuuacagaucuaaaaaaaaaaaaaaaaaaaaaaaaaaaaaaaaaaaaaaaaaaaaaaaaaaaaaaaaaaaaaaaaaaaaaaaaaaaaaaaaaaaaaaaaaaaaaaaaaaaa

SEQ ID NO: 25217 - RNA, 4096 nt, Artificial Sequence
  SARS-CoV-2/Wuhan/WIV05/2019__EPI_ISL_402128 spike protein mRNA gc (1-1273)(H69del_V70del_Y144del_N501Y_A570D_D614G_P681H_T716I_S982 A_D1118H)
aggagacccgugacccggaaguuguacggcuacgcgacuuucccucccacaaacccucgcgcccuuccuuuccuacuugggcccggcagaaagcuuaccauguucguguuccuggugcugcugccccuggugagcagccagugcgugaaccugaccacccggacccagcugccaccagccuacaccaacagcuucacccggggcgucuacuaccccgacaagguguuccggagcagcguccugcacagcacccaggaccuguuccugcccuucuucagcaacgugaccugguuccacgccaucagcggcaccaacggcaccaagcgguucgacaaccccgugcugcccuucaacgacggcguguacuucgccagcaccgagaagagcaacaucauccggggcuggaucuucggcaccacccuggacagcaagacccagagccugcugaucgugaauaacgccaccaacguggugaucaaggugugcgaguuccaguucugcaacgaccccuuccugggcguguaccacaagaacaacaagagcuggauggagagcgaguuccggguguacagcagcgccaacaacugcaccuucgaguacgugagccagcccuuccugauggaccuggagggcaagcagggcaacuucaagaaccugcgggaguucguguucaagaacaucgacggcuacuucaagaucuacagcaagcacaccccaaucaaccuggugcgggaucugccccagggcuucucagcccuggagccccugguggaccugcccaucggcaucaacaucacccgguuccagacccugcuggcccugcaccggagcuaccugaccccaggcgacagcagcagcggguggacagcaggcgcggcugcuuacuacgugggcuaccugcagccccggaccuuccugcugaaguacaacgagaacggcaccaucaccgacgccguggacugcgcccuggacccucugagcgagaccaagugcacccugaagagcuucaccguggagaagggcaucuaccagaccagcaacuuccgggugcagcccaccgagagcaucgugcgguuccccaacaucaccaaccugugccccuucggcgagguguucaacgccacccgguucgccagcguguacgccuggaaccggaagcggaucagcaacugcguggccgacuacagcgugcuguacaacagcgccagcuucagcaccuucaagugcuacggcgugagccccaccaagcugaacgaccugugcuucaccaacguguacgccgacagcuucgugauccguggcgacgaggugcggcagaucgcacccggccagacaggcaagaucgccgacuacaacuacaagcugcccgacgacuucaccggcugcgugaucgccuggaacagcaacaaccucgacagcaaggugggcggcaacuacaacuaccuguaccggcuguuccggaagagcaaccugaagcccuucgagcgggacaucagcaccgagaucuaccaagccggcuccaccccuugcaacggcguggagggcuucaacugcuacuucccucugcagagcuacggcuuccagcccaccuacggcgugggcuaccagcccuaccgggugguggugcugagcuucgagcugcugcacgccccagccaccguguguggccccaagaagagcaccaaccuggugaagaacaagugcgugaacuucaacuucaacggccuuaccggcaccggcgugcugaccgagagcaacaagaaauuccugcccuuucagcaguucggccgggacaucgacgacaccaccgacgcugugcgggauccccagacccuggagauccuggacaucaccccuugcagcuucggcggcgugagcgugaucaccccaggcaccaacaccagcaaccagguggccgugcuguaccagggcgugaacugcaccgaggugcccguggccauccacgccgaccagcugacacccaccuggcgggucuacagcaccggcagcaacguguuccagacccgggccgguugccugaucggcgccgagcacgugaacaacagcuacgagugcgacauccccaucggcgccggcaucugugccagcuaccagacccagaccaauucacaccggagggcaaggagcguggccagccagagcaucaucgccuacaccaugagccugggcgccgagaacagcguggccuacagcaacaacagcaucgccauccccaucaacuucaccaucagcgugaccaccgagauucugcccgugagcaugaccaagaccagcguggacugcaccauguacaucugcggcgacagcaccgagugcagcaaccugcugcugcaguacggcagcuucugcacccagcugaaccgggcccugaccggcaucgccguggagcaggacaagaacacccaggagguguucgcccaggugaagcagaucuacaagaccccucccaucaaggacuucggcggcuucaacuucagccagauccugcccgaccccagcaagcccagcaagcggagcuucaucgaggaccugcuguucaacaaggugacccuagccgacgccggcuucaucaagcaguacggcgacugccucggcgacauagccgcccgggaccugaucugcgcccagaaguucaacggccugaccgugcugccuccccugcugaccgacgagaugaucgcccaguacaccagcgcccuguuagccggaaccaucaccagcggcuggacuuucggcgcuggagccgcucugcagauccccuucgccaugcagauggccuaccgguucaacggcaucggcgugacccagaacgugcuguacgagaaccagaagcugaucgccaaccaguucaacagcgccaucggcaagauccaggacagccugagcagcaccgcuagcgcccugggcaagcugcaggacguggugaaccagaacgcccaggcccugaacacccuggugaagcagcugagcagcaacuucggcgccaucagcagcgugcugaacgacauccuggcccggcuggacaaggucgaggccgaggugcagaucgaccggcugaucacuggccggcugcagagccugcagaccuacgugacccagcagcugauccgggccgccgagauucgggccagcgccaaccuggccgccaccaagaugagcgagugcgugcugggccagagcaagcggguggacuucugcggcaagggcuaccaccugaugagcuuuccccagagcgcaccccacggagugguguuccugcacgugaccuacgugcccgcccaggagaagaacuucaccaccgccccagccaucugccacgacggcaaggcccacuuuccccgggagggcguguucgugagcaacggcacccacugguucgugacccagcggaacuucuacgagccccagaucaucaccacccacaacaccuucgugagcggcaacugcgacguggugaucggcaucgugaacaacaccguguacgauccccugcagcccgagcuggacagcuucaaggaggagcuggacaaguacuucaagaaucacaccagccccgacguggaccugggcgacaucagcggcaucaacgccagcguggugaacauccagaaggagaucgaucggcugaacgagguggccaagaaccugaacgagagccugaucgaccugcaggagcugggcaaguacgagcaguacaucaaguggcccugguacaucuggcugggcuucaucgccggccugaucgccaucgugauggugaccaucaugcugugcugcaugaccagcugcugcagcugccugaagggcuguugcagcugcggcagcugcugcaaguucgacgaggacgacagcgagcccgugcugaagggcgugaagcugcacuacaccugaggacuaguguccaccugucccuccugggcugcuggauugucucguuuuccugccaaauaaacaggaucagcgcuuuacagaucuaaaaaaaaaaaaaaaaaaaaaaaaaaaaaaaaaaaaaaaaaaaaaaaaaaaaaaaaaaaaaaaaaaaaaaaaaaaaaaaaaaaaaaaaaaaaaaaaaaaa

SEQ ID NO: 25218 - RNA, 4105 nt, Artificial Sequence
  SARS-CoV-2/Wuhan/WIV05/2019__EPI_ISL_402128 spike protein mRNA gc (1-1273)(K417N_E484K_N501Y_D614G)
aggagacccgugacccggaaguuguacggcuacgcgacuuucccucccacaaacccucgcgcccuuccuuuccuacuugggcccggcagaaagcuuaccauguucguguuccuggugcugcugccccuggugagcagccagugcgugaaccugaccacccggacccagcugccaccagccuacaccaacagcuucacccggggcgucuacuaccccgacaagguguuccggagcagcguccugcacagcacccaggaccuguuccugcccuucuucagcaacgugaccugguuccacgccauccacgugagcggcaccaacggcaccaagcgguucgacaaccccgugcugcccuucaacgacggcguguacuucgccagcaccgagaagagcaacaucauccggggcuggaucuucggcaccacccuggacagcaagacccagagccugcugaucgugaauaacgccaccaacguggugaucaaggugugcgaguuccaguucugcaacgaccccuuccugggcguguacuaccacaagaacaacaagagcuggauggagagcgaguuccggguguacagcagcgccaacaacugcaccuucgaguacgugagccagcccuuccugauggaccuggagggcaagcagggcaacuucaagaaccugcgggaguucguguucaagaacaucgacggcuacuucaagaucuacagcaagcacaccccaaucaaccuggugcgggaucugccccagggcuucucagcccuggagccccugguggaccugcccaucggcaucaacaucacccgguuccagacccugcuggcccugcaccggagcuaccugaccccaggcgacagcagcagcggguggacagcaggcgcggcugcuuacuacgugggcuaccugcagccccggaccuuccugcugaaguacaacgagaacggcaccaucaccgacgccguggacugcgcccuggacccucugagcgagaccaagugcacccugaagagcuucaccguggagaagggcaucuaccagaccagcaacuuccgggugcagcccaccgagagcaucgugcgguuccccaacaucaccaaccugugccccuucggcgagguguucaacgccacccgguucgccagcguguacgccuggaaccggaagcggaucagcaacugcguggccgacuacagcgugcuguacaacagcgccagcuucagcaccuucaagugcuacggcgugagccccaccaagcugaacgaccugugcuucaccaacguguacgccgacagcuucgugauccguggcgacgaggugcggcagaucgcacccggccagacaggcaacaucgccgacuacaacuacaagcugcccgacgacuucaccggcugcgugaucgccuggaacagcaacaaccucgacagcaaggugggcggcaacuacaacuaccuguaccggcuguuccggaagagcaaccugaagcccuucgagcgggacaucagcaccgagaucuaccaagccggcuccaccccuugcaacggcgugaagggcuucaacugcuacuucccucugcagagcuacggcuuccagcccaccuacggcgugggcuaccagcccuaccgggugguggugcugagcuucgagcugcugcacgccccagccaccguguguggccccaagaagagcaccaaccuggugaagaacaagugcgugaacuucaacuucaacggccuuaccggcaccggcgugcugaccgagagcaacaagaaauuccugcccuuucagcaguucggccgggacaucgccgacaccaccgacgcugugcgggauccccagacccuggagauccuggacaucaccccuugcagcuucggcggcgugagcgugaucaccccaggcaccaacaccagcaaccagguggccgugcuguaccagggcgugaacugcaccgaggugcccguggccauccacgccgaccagcugacacccaccuggcgggucuacagcaccggcagcaacguguuccagacccgggccgguugccugaucggcgccgagcacgugaacaacagcuacgagugcgacauccccaucggcgccggcaucugugccagcuaccagacccagaccaauucaccccggagggcaaggagcguggccagccagagcaucaucgccuacaccaugagccugggcgccgagaacagcguggccuacagcaacaacagcaucgccauccccaccaacuucaccaucagcgugaccaccgagauucugcccgugagcaugaccaagaccagcguggacugcaccauguacaucugcggcgacagcaccgagugcagcaaccugcugcugcaguacggcagcuucugcacccagcugaaccgggcccugaccggcaucgccguggagcaggacaagaacacccaggagguguucgcccaggugaagcagaucuacaagaccccucccaucaaggacuucggcggcuucaacuucagccagauccugcccgaccccagcaagcccagcaagcggagcuucaucgaggaccugcuguucaacaaggugacccuagccgacgccggcuucaucaagcaguacggcgacugccucggcgacauagccgcccgggaccugaucugcgcccagaaguucaacggccugaccgugcugccuccccugcugaccgacgagaugaucgcccaguacaccagcgcccuguuagccggaaccaucaccagcggcuggacuuucggcgcuggagccgcucugcagauccccuucgccaugcagauggccuaccgguucaacggcaucggcgugacccagaacgugcuguacgagaaccagaagcugaucgccaaccaguucaacagcgccaucggcaagauccaggacagccugagcagcaccgcuagcgcccugggcaagcugcaggacguggugaaccagaacgcccaggcccugaacacccuggugaagcagcugagcagcaacuucggcgccaucagcagcgugcugaacgacauccugagccggcuggacaaggucgaggccgaggugcagaucgaccggcugaucacuggccggcugcagagccugcagaccuacgugacccagcagcugauccgggccgccgagauucgggccagcgccaaccuggccgccaccaagaugagcgagugcgugcugggccagagcaagcggguggacuucugcggcaagggcuaccaccugaugagcuuuccccagagcgcaccccacggagugguguuccugcacgugaccuacgugcccgcccaggagaagaacuucaccaccgccccagccaucugccacgacggcaaggcccacuuuccccgggagggcguguucgugagcaacggcacccacugguucgugacccagcggaacuucuacgagccccagaucaucaccaccgacaacaccuucgugagcggcaacugcgacguggugaucggcaucgugaacaacaccguguacgauccccugcagcccgagcuggacagcuucaaggaggagcuggacaaguacuucaagaaucacaccagccccgacguggaccugggcgacaucagcggcaucaacgccagcguggugaacauccagaaggagaucgaucggcugaacgagguggccaagaaccugaacgagagccugaucgaccugcaggagcugggcaaguacgagcaguacaucaaguggcccugguacaucuggcugggcuucaucgccggccugaucgccaucgugauggugaccaucaugcugugcugcaugaccagcugcugcagcugccugaagggcuguugcagcugcggcagcugcugcaaguucgacgaggacgacagcgagcccgugcugaagggcgugaagcugcacuacaccugaggacuaguguccaccugucccuccugggcugcuggauugucucguuuuccugccaaauaaacaggaucagcgcuuuacagaucuaaaaaaaaaaaaaaaaaaaaaaaaaaaaaaaaaaaaaaaaaaaaaaaaaaaaaaaaaaaaaaaaaaaaaaaaaaaaaaaaaaaaaaaaaaaaaaaaaaaa

SEQ ID NO: 25219 - RNA, 4096 nt, Artificial Sequence
  SARS-CoV-2/Wuhan/WIV05/2019__EPI_ISL_402128 spike protein mRNA gc (1-1273)(L18F_D80A_D215G_L242del_A243del_L244del_R246I_K417N_E484 K_N501Y_D614G_A701V)
aggagacccgugacccggaaguuguacggcuacgcgacuuucccucccacaaacccucgcgcccuuccuuuccuacuugggcccggcagaaagcuuaccauguucguguuccuggugcugcugccccuggugagcagccagugcgugaacuucaccacccggacccagcugccaccagccuacaccaacagcuucacccggggcgucuacuaccccgacaagguguuccggagcagcguccugcacagcacccaggaccuguuccugcccuucuucagcaacgugaccugguuccacgccauccacgugagcggcaccaacggcaccaagcgguucgccaaccccgugcugcccuucaacgacggcguguacuucgccagcaccgagaagagcaacaucauccggggcuggaucuucggcaccacccuggacagcaagacccagagccugcugaucgugaauaacgccaccaacguggugaucaaggugugcgaguuccaguucugcaacgaccccuuccugggcguguacuaccacaagaacaacaagagcuggauggagagcgaguuccggguguacagcagcgccaacaacugcaccuucgaguacgugagccagcccuuccugauggaccuggagggcaagcagggcaacuucaagaaccugcgggaguucguguucaagaacaucgacggcuacuucaagaucuacagcaagcacaccccaaucaaccuggugcggggccugccccagggcuucucagcccuggagccccugguggaccugcccaucggcaucaacaucacccgguuccagacccugcacaucagcuaccugaccccaggcgacagcagcagcggguggacagcaggcgcggcugcuuacuacgugggcuaccugcagccccggaccuuccugcugaaguacaacgagaacggcaccaucaccgacgccguggacugcgcccuggacccucugagcgagaccaagugcacccugaagagcuucaccguggagaagggcaucuaccagaccagcaacuuccgggugcagcccaccgagagcaucgugcgguuccccaacaucaccaaccugugccccuucggcgagguguucaacgccacccgguucgccagcguguacgccuggaaccggaagcggaucagcaacugcguggccgacuacagcgugcuguacaacagcgccagcuucagcaccuucaagugcuacggcgugagccccaccaagcugaacgaccugugcuucaccaacguguacgccgacagcuucgugauccguggcgacgaggugcggcagaucgcacccggccagacaggcaacaucgccgacuacaacuacaagcugcccgacgacuucaccggcugcgugaucgccuggaacagcaacaaccucgacagcaaggugggcggcaacuacaacuaccuguaccggcuguuccggaagagcaaccugaagcccuucgagcgggacaucagcaccgagaucuaccaagccggcuccaccccuugcaacggcgugaagggcuucaacugcuacuucccucugcagagcuacggcuuccagcccaccuacggcgugggcuaccagcccuaccgggugguggugcugagcuucgagcugcugcacgccccagccaccguguguggccccaagaagagcaccaaccuggugaagaacaagugcgugaacuucaacuucaacggccuuaccggcaccggcgugcugaccgagagcaacaagaaauuccugcccuuucagcaguucggccgggacaucgccgacaccaccgacgcugugcgggauccccagacccuggagauccuggacaucaccccuugcagcuucggcggcgugagcgugaucaccccaggcaccaacaccagcaaccagguggccgugcuguaccagggcgugaacugcaccgaggugcccguggccauccacgccgaccagcugacacccaccuggcgggucuacagcaccggcagcaacguguuccagacccgggccgguugccugaucggcgccgagcacgugaacaacagcuacgagugcgacauccccaucggcgccggcaucugugccagcuaccagacccagaccaauucaccccggagggcaaggagcguggccagccagagcaucaucgccuacaccaugagccugggcguggagaacagcguggccuacagcaacaacagcaucgccauccccaccaacuucaccaucagcgugaccaccgagauucugcccgugagcaugaccaagaccagcguggacugcaccauguacaucugcggcgacagcaccgagugcagcaaccugcugcugcaguacggcagcuucugcacccagcugaaccgggcccugaccggcaucgccguggagcaggacaagaacacccaggagguguucgcccaggugaagcagaucuacaagaccccucccaucaaggacuucggcggcuucaacuucagccagauccugcccgaccccagcaagcccagcaagcggagcuucaucgaggaccugcuguucaacaaggugacccuagccgacgccggcuucaucaagcaguacggcgacugccucggcgacauagccgcccgggaccugaucugcgcccagaaguucaacggccugaccgugcugccuccccugcugaccgacgagaugaucgcccaguacaccagcgcccuguuagccggaaccaucaccagcggcuggacuuucggcgcuggagccgcucugcagauccccuucgccaugcagauggccuaccgguucaacggcaucggcgugacccagaacgugcuguacgagaaccagaagcugaucgccaaccaguucaacagcgccaucggcaagauccaggacagccugagcagcaccgcuagcgcccugggcaagcugcaggacguggugaaccagaacgcccaggcccugaacacccuggugaagcagcugagcagcaacuucggcgccaucagcagcgugcugaacgacauccugagccggcuggacaaggucgaggccgaggugcagaucgaccggcugaucacuggccggcugcagagccugcagaccuacgugacccagcagcugauccgggccgccgagauucgggccagcgccaaccuggccgccaccaagaugagcgagugcgugcugggccagagcaagcggguggacuucugcggcaagggcuaccaccugaugagcuuuccccagagcgcaccccacggagugguguuccugcacgugaccuacgugcccgcccaggagaagaacuucaccaccgccccagccaucugccacgacggcaaggcccacuuuccccgggagggcguguucgugagcaacggcacccacugguucgugacccagcggaacuucuacgagccccagaucaucaccaccgacaacaccuucgugagcggcaacugcgacguggugaucggcaucgugaacaacaccguguacgauccccugcagcccgagcuggacagcuucaaggaggagcuggacaaguacuucaagaaucacaccagccccgacguggaccugggcgacaucagcggcaucaacgccagcguggugaacauccagaaggagaucgaucggcugaacgagguggccaagaaccugaacgagagccugaucgaccugcaggagcugggcaaguacgagcaguacaucaaguggcccugguacaucuggcugggcuucaucgccggccugaucgccaucgugauggugaccaucaugcugugcugcaugaccagcugcugcagcugccugaagggcuguugcagcugcggcagcugcugcaaguucgacgaggacgacagcgagcccgugcugaagggcgugaagcugcacuacaccugaggacuaguguccaccugucccuccugggcugcuggauugucucguuuuccugccaaauaaacaggaucagcgcuuuacagaucuaaaaaaaaaaaaaaaaaaaaaaaaaaaaaaaaaaaaaaaaaaaaaaaaaaaaaaaaaaaaaaaaaaaaaaaaaaaaaaaaaaaaaaaaaaaaaaaaaaaa

SEQ ID NO: 25220 - RNA, 4105 nt, Artificial Sequence
  SARS-CoV-2/Wuhan/WIV05/2019__EPI_ISL_402128 spike protein mRNA gc (1-1273)(E484K_D614G)
aggagacccgugacccggaaguuguacggcuacgcgacuuucccucccacaaacccucgcgcccuuccuuuccuacuugggcccggcagaaagcuuaccauguucguguuccuggugcugcugccccuggugagcagccagugcgugaaccugaccacccggacccagcugccaccagccuacaccaacagcuucacccggggcgucuacuaccccgacaagguguuccggagcagcguccugcacagcacccaggaccuguuccugcccuucuucagcaacgugaccugguuccacgccauccacgugagcggcaccaacggcaccaagcgguucgacaaccccgugcugcccuucaacgacggcguguacuucgccagcaccgagaagagcaacaucauccggggcuggaucuucggcaccacccuggacagcaagacccagagccugcugaucgugaauaacgccaccaacguggugaucaaggugugcgaguuccaguucugcaacgaccccuuccugggcguguacuaccacaagaacaacaagagcuggauggagagcgaguuccggguguacagcagcgccaacaacugcaccuucgaguacgugagccagcccuuccugauggaccuggagggcaagcagggcaacuucaagaaccugcgggaguucguguucaagaacaucgacggcuacuucaagaucuacagcaagcacaccccaaucaaccuggugcgggaucugccccagggcuucucagcccuggagccccugguggaccugcccaucggcaucaacaucacccgguuccagacccugcuggcccugcaccggagcuaccugaccccaggcgacagcagcagcggguggacagcaggcgcggcugcuuacuacgugggcuaccugcagccccggaccuuccugcugaaguacaacgagaacggcaccaucaccgacgccguggacugcgcccuggacccucugagcgagaccaagugcacccugaagagcuucaccguggagaagggcaucuaccagaccagcaacuuccgggugcagcccaccgagagcaucgugcgguuccccaacaucaccaaccugugccccuucggcgagguguucaacgccacccgguucgccagcguguacgccuggaaccggaagcggaucagcaacugcguggccgacuacagcgugcuguacaacagcgccagcuucagcaccuucaagugcuacggcgugagccccaccaagcugaacgaccugugcuucaccaacguguacgccgacagcuucgugauccguggcgacgaggugcggcagaucgcacccggccagacaggcaagaucgccgacuacaacuacaagcugcccgacgacuucaccggcugcgugaucgccuggaacagcaacaaccucgacagcaaggugggcggcaacuacaacuaccuguaccggcuguuccggaagagcaaccugaagcccuucgagcgggacaucagcaccgagaucuaccaagccggcuccaccccuugcaacggcgugaagggcuucaacugcuacuucccucugcagagcuacggcuuccagcccaccaacggcgugggcuaccagcccuaccgggugguggugcugagcuucgagcugcugcacgccccagccaccguguguggccccaagaagagcaccaaccuggugaagaacaagugcgugaacuucaacuucaacggccuuaccggcaccggcgugcugaccgagagcaacaagaaauuccugcccuuucagcaguucggccgggacaucgccgacaccaccgacgcugugcgggauccccagacccuggagauccuggacaucaccccuugcagcuucggcggcgugagcgugaucaccccaggcaccaacaccagcaaccagguggccgugcuguaccagggcgugaacugcaccgaggugcccguggccauccacgccgaccagcugacacccaccuggcgggucuacagcaccggcagcaacguguuccagacccgggccgguugccugaucggcgccgagcacgugaacaacagcuacgagugcgacauccccaucggcgccggcaucugugccagcuaccagacccagaccaauucaccccggagggcaaggagcguggccagccagagcaucaucgccuacaccaugagccugggcgccgagaacagcguggccuacagcaacaacagcaucgccauccccaccaacuucaccaucagcgugaccaccgagauucugcccgugagcaugaccaagaccagcguggacugcaccauguacaucugcggcgacagcaccgagugcagcaaccugcugcugcaguacggcagcuucugcacccagcugaaccgggcccugaccggcaucgccguggagcaggacaagaacacccaggagguguucgcccaggugaagcagaucuacaagaccccucccaucaaggacuucggcggcuucaacuucagccagauccugcccgaccccagcaagcccagcaagcggagcuucaucgaggaccugcuguucaacaaggugacccuagccgacgccggcuucaucaagcaguacggcgacugccucggcgacauagccgcccgggaccugaucugcgcccagaaguucaacggccugaccgugcugccuccccugcugaccgacgagaugaucgcccaguacaccagcgcccuguuagccggaaccaucaccagcggcuggacuuucggcgcuggagccgcucugcagauccccuucgccaugcagauggccuaccgguucaacggcaucggcgugacccagaacgugcuguacgagaaccagaagcugaucgccaaccaguucaacagcgccaucggcaagauccaggacagccugagcagcaccgcuagcgcccugggcaagcugcaggacguggugaaccagaacgcccaggcccugaacacccuggugaagcagcugagcagcaacuucggcgccaucagcagcgugcugaacgacauccugagccggcuggacaaggucgaggccgaggugcagaucgaccggcugaucacuggccggcugcagagccugcagaccuacgugacccagcagcugauccgggccgccgagauucgggccagcgccaaccuggccgccaccaagaugagcgagugcgugcugggccagagcaagcggguggacuucugcggcaagggcuaccaccugaugagcuuuccccagagcgcaccccacggagugguguuccugcacgugaccuacgugcccgcccaggagaagaacuucaccaccgccccagccaucugccacgacggcaaggcccacuuuccccgggagggcguguucgugagcaacggcacccacugguucgugacccagcggaacuucuacgagccccagaucaucaccaccgacaacaccuucgugagcggcaacugcgacguggugaucggcaucgugaacaacaccguguacgauccccugcagcccgagcuggacagcuucaaggaggagcuggacaaguacuucaagaaucacaccagccccgacguggaccugggcgacaucagcggcaucaacgccagcguggugaacauccagaaggagaucgaucggcugaacgagguggccaagaaccugaacgagagccugaucgaccugcaggagcugggcaaguacgagcaguacaucaaguggcccugguacaucuggcugggcuucaucgccggccugaucgccaucgugauggugaccaucaugcugugcugcaugaccagcugcugcagcugccugaagggcuguugcagcugcggcagcugcugcaaguucgacgaggacgacagcgagcccgugcugaagggcgugaagcugcacuacaccugaggacuaguguccaccugucccuccugggcugcuggauugucucguuuuccugccaaauaaacaggaucagcgcuuuacagaucuaaaaaaaaaaaaaaaaaaaaaaaaaaaaaaaaaaaaaaaaaaaaaaaaaaaaaaaaaaaaaaaaaaaaaaaaaaaaaaaaaaaaaaaaaaaaaaaaaaaa

SEQ ID NO: 25221 - RNA, 4105 nt, Artificial Sequence
  SARS-CoV-2/Wuhan/WIV05/2019__EPI_ISL_402128 spike protein mRNA gc (1-1273)(L18F_T20N_P26S_D138Y_R190S_K417T_E484K_N501Y_D614G_H655Y _T1027I)
aggagacccgugacccggaaguuguacggcuacgcgacuuucccucccacaaacccucgcgcccuuccuuuccuacuugggcccggcagaaagcuuaccauguucguguuccuggugcugcugccccuggugagcagccagugcgugaacuucaccaaccggacccagcugccaagcgccuacaccaacagcuucacccggggcgucuacuaccccgacaagguguuccggagcagcguccugcacagcacccaggaccuguuccugcccuucuucagcaacgugaccugguuccacgccauccacgugagcggcaccaacggcaccaagcgguucgacaaccccgugcugcccuucaacgacggcguguacuucgccagcaccgagaagagcaacaucauccggggcuggaucuucggcaccacccuggacagcaagacccagagccugcugaucgugaauaacgccaccaacguggugaucaaggugugcgaguuccaguucugcaacuaccccuuccugggcguguacuaccacaagaacaacaagagcuggauggagagcgaguuccggguguacagcagcgccaacaacugcaccuucgaguacgugagccagcccuuccugauggaccuggagggcaagcagggcaacuucaagaaccugagcgaguucguguucaagaacaucgacggcuacuucaagaucuacagcaagcacaccccaaucaaccuggugcgggaucugccccagggcuucucagcccuggagccccugguggaccugcccaucggcaucaacaucacccgguuccagacccugcuggcccugcaccggagcuaccugaccccaggcgacagcagcagcggguggacagcaggcgcggcugcuuacuacgugggcuaccugcagccccggaccuuccugcugaaguacaacgagaacggcaccaucaccgacgccguggacugcgcccuggacccucugagcgagaccaagugcacccugaagagcuucaccguggagaagggcaucuaccagaccagcaacuuccgggugcagcccaccgagagcaucgugcgguuccccaacaucaccaaccugugccccuucggcgagguguucaacgccacccgguucgccagcguguacgccuggaaccggaagcggaucagcaacugcguggccgacuacagcgugcuguacaacagcgccagcuucagcaccuucaagugcuacggcgugagccccaccaagcugaacgaccugugcuucaccaacguguacgccgacagcuucgugauccguggcgacgaggugcggcagaucgcacccggccagacaggcaccaucgccgacuacaacuacaagcugcccgacgacuucaccggcugcgugaucgccuggaacagcaacaaccucgacagcaaggugggcggcaacuacaacuaccuguaccggcuguuccggaagagcaaccugaagcccuucgagcgggacaucagcaccgagaucuaccaagccggcuccaccccuugcaacggcgugaagggcuucaacugcuacuucccucugcagagcuacggcuuccagcccaccuacggcgugggcuaccagcccuaccgggugguggugcugagcuucgagcugcugcacgccccagccaccguguguggccccaagaagagcaccaaccuggugaagaacaagugcgugaacuucaacuucaacggccuuaccggcaccggcgugcugaccgagagcaacaagaaauuccugcccuuucagcaguucggccgggacaucgccgacaccaccgacgcugugcgggauccccagacccuggagauccuggacaucaccccuugcagcuucggcggcgugagcgugaucaccccaggcaccaacaccagcaaccagguggccgugcuguaccagggcgugaacugcaccgaggugcccguggccauccacgccgaccagcugacacccaccuggcgggucuacagcaccggcagcaacguguuccagacccgggccgguugccugaucggcgccgaguacgugaacaacagcuacgagugcgacauccccaucggcgccggcaucugugccagcuaccagacccagaccaauucaccccggagggcaaggagcguggccagccagagcaucaucgccuacaccaugagccugggcgccgagaacagcguggccuacagcaacaacagcaucgccauccccaccaacuucaccaucagcgugaccaccgagauucugcccgugagcaugaccaagaccagcguggacugcaccauguacaucugcggcgacagcaccgagugcagcaaccugcugcugcaguacggcagcuucugcacccagcugaaccgggcccugaccggcaucgccguggagcaggacaagaacacccaggagguguucgcccaggugaagcagaucuacaagaccccucccaucaaggacuucggcggcuucaacuucagccagauccugcccgaccccagcaagcccagcaagcggagcuucaucgaggaccugcuguucaacaaggugacccuagccgacgccggcuucaucaagcaguacggcgacugccucggcgacauagccgcccgggaccugaucugcgcccagaaguucaacggccugaccgugcugccuccccugcugaccgacgagaugaucgcccaguacaccagcgcccuguuagccggaaccaucaccagcggcuggacuuucggcgcuggagccgcucugcagauccccuucgccaugcagauggccuaccgguucaacggcaucggcgugacccagaacgugcuguacgagaaccagaagcugaucgccaaccaguucaacagcgccaucggcaagauccaggacagccugagcagcaccgcuagcgcccugggcaagcugcaggacguggugaaccagaacgcccaggcccugaacacccuggugaagcagcugagcagcaacuucggcgccaucagcagcgugcugaacgacauccugagccggcuggacaaggucgaggccgaggugcagaucgaccggcugaucacuggccggcugcagagccugcagaccuacgugacccagcagcugauccgggccgccgagauucgggccagcgccaaccuggccgccaucaagaugagcgagugcgugcugggccagagcaagcggguggacuucugcggcaagggcuaccaccugaugagcuuuccccagagcgcaccccacggagugguguuccugcacgugaccuacgugcccgcccaggagaagaacuucaccaccgccccagccaucugccacgacggcaaggcccacuuuccccgggagggcguguucgugagcaacggcacccacugguucgugacccagcggaacuucuacgagccccagaucaucaccaccgacaacaccuucgugagcggcaacugcgacguggugaucggcaucgugaacaacaccguguacgauccccugcagcccgagcuggacagcuucaaggaggagcuggacaaguacuucaagaaucacaccagccccgacguggaccugggcgacaucagcggcaucaacgccagcguggugaacauccagaaggagaucgaucggcugaacgagguggccaagaaccugaacgagagccugaucgaccugcaggagcugggcaaguacgagcaguacaucaaguggcccugguacaucuggcugggcuucaucgccggccugaucgccaucgugauggugaccaucaugcugugcugcaugaccagcugcugcagcugccugaagggcuguugcagcugcggcagcugcugcaaguucgacgaggacgacagcgagcccgugcugaagggcgugaagcugcacuacaccugaggacuaguguccaccugucccuccugggcugcuggauugucucguuuuccugccaaauaaacaggaucagcgcuuuacagaucuaaaaaaaaaaaaaaaaaaaaaaaaaaaaaaaaaaaaaaaaaaaaaaaaaaaaaaaaaaaaaaaaaaaaaaaaaaaaaaaaaaaaaaaaaaaaaaaaaaaa

SEQ ID NO: 25222 - RNA, 4105 nt, Artificial Sequence
  SARS-CoV-2/Wuhan/WIV05/2019__EPI_ISL_402128 spike protein mRNA gc (1-1273)(S13I_W152C_L452R_D614G)
aggagacccgugacccggaaguuguacggcuacgcgacuuucccucccacaaacccucgcgcccuuccuuuccuacuugggcccggcagaaagcuuaccauguucguguuccuggugcugcugccccuggugagcauccagugcgugaaccugaccacccggacccagcugccaccagccuacaccaacagcuucacccggggcgucuacuaccccgacaagguguuccggagcagcguccugcacagcacccaggaccuguuccugcccuucuucagcaacgugaccugguuccacgccauccacgugagcggcaccaacggcaccaagcgguucgacaaccccgugcugcccuucaacgacggcguguacuucgccagcaccgagaagagcaacaucauccggggcuggaucuucggcaccacccuggacagcaagacccagagccugcugaucgugaauaacgccaccaacguggugaucaaggugugcgaguuccaguucugcaacgaccccuuccugggcguguacuaccacaagaacaacaagagcugcauggagagcgaguuccggguguacagcagcgccaacaacugcaccuucgaguacgugagccagcccuuccugauggaccuggagggcaagcagggcaacuucaagaaccugcgggaguucguguucaagaacaucgacggcuacuucaagaucuacagcaagcacaccccaaucaaccuggugcgggaucugccccagggcuucucagcccuggagccccugguggaccugcccaucggcaucaacaucacccgguuccagacccugcuggcccugcaccggagcuaccugaccccaggcgacagcagcagcggguggacagcaggcgcggcugcuuacuacgugggcuaccugcagccccggaccuuccugcugaaguacaacgagaacggcaccaucaccgacgccguggacugcgcccuggacccucugagcgagaccaagugcacccugaagagcuucaccguggagaagggcaucuaccagaccagcaacuuccgggugcagcccaccgagagcaucgugcgguuccccaacaucaccaaccugugccccuucggcgagguguucaacgccacccgguucgccagcguguacgccuggaaccggaagcggaucagcaacugcguggccgacuacagcgugcuguacaacagcgccagcuucagcaccuucaagugcuacggcgugagccccaccaagcugaacgaccugugcuucaccaacguguacgccgacagcuucgugauccguggcgacgaggugcggcagaucgcacccggccagacaggcaagaucgccgacuacaacuacaagcugcccgacgacuucaccggcugcgugaucgccuggaacagcaacaaccucgacagcaaggugggcggcaacuacaacuaccgcuaccggcuguuccggaagagcaaccugaagcccuucgagcgggacaucagcaccgagaucuaccaagccggcuccaccccuugcaacggcguggagggcuucaacugcuacuucccucugcagagcuacggcuuccagcccaccaacggcgugggcuaccagcccuaccgggugguggugcugagcuucgagcugcugcacgccccagccaccguguguggccccaagaagagcaccaaccuggugaagaacaagugcgugaacuucaacuucaacggccuuaccggcaccggcgugcugaccgagagcaacaagaaauuccugcccuuucagcaguucggccgggacaucgccgacaccaccgacgcugugcgggauccccagacccuggagauccuggacaucaccccuugcagcuucggcggcgugagcgugaucaccccaggcaccaacaccagcaaccagguggccgugcuguaccagggcgugaacugcaccgaggugcccguggccauccacgccgaccagcugacacccaccuggcgggucuacagcaccggcagcaacguguuccagacccgggccgguugccugaucggcgccgagcacgugaacaacagcuacgagugcgacauccccaucggcgccggcaucugugccagcuaccagacccagaccaauucaccccggagggcaaggagcguggccagccagagcaucaucgccuacaccaugagccugggcgccgagaacagcguggccuacagcaacaacagcaucgccauccccaccaacuucaccaucagcgugaccaccgagauucugcccgugagcaugaccaagaccagcguggacugcaccauguacaucugcggcgacagcaccgagugcagcaaccugcugcugcaguacggcagcuucugcacccagcugaaccgggcccugaccggcaucgccguggagcaggacaagaacacccaggagguguucgcccaggugaagcagaucuacaagaccccucccaucaaggacuucggcggcuucaacuucagccagauccugcccgaccccagcaagcccagcaagcggagcuucaucgaggaccugcuguucaacaaggugacccuagccgacgccggcuucaucaagcaguacggcgacugccucggcgacauagccgcccgggaccugaucugcgcccagaaguucaacggccugaccgugcugccuccccugcugaccgacgagaugaucgcccaguacaccagcgcccuguuagccggaaccaucaccagcggcuggacuuucggcgcuggagccgcucugcagauccccuucgccaugcagauggccuaccgguucaacggcaucggcgugacccagaacgugcuguacgagaaccagaagcugaucgccaaccaguucaacagcgccaucggcaagauccaggacagccugagcagcaccgcuagcgcccugggcaagcugcaggacguggugaaccagaacgcccaggcccugaacacccuggugaagcagcugagcagcaacuucggcgccaucagcagcgugcugaacgacauccugagccggcuggacaaggucgaggccgaggugcagaucgaccggcugaucacuggccggcugcagagccugcagaccuacgugacccagcagcugauccgggccgccgagauucgggccagcgccaaccuggccgccaccaagaugagcgagugcgugcugggccagagcaagcggguggacuucugcggcaagggcuaccaccugaugagcuuuccccagagcgcaccccacggagugguguuccugcacgugaccuacgugcccgcccaggagaagaacuucaccaccgccccagccaucugccacgacggcaaggcccacuuuccccgggagggcguguucgugagcaacggcacccacugguucgugacccagcggaacuucuacgagccccagaucaucaccaccgacaacaccuucgugagcggcaacugcgacguggugaucggcaucgugaacaacaccguguacgauccccugcagcccgagcuggacagcuucaaggaggagcuggacaaguacuucaagaaucacaccagccccgacguggaccugggcgacaucagcggcaucaacgccagcguggugaacauccagaaggagaucgaucggcugaacgagguggccaagaaccugaacgagagccugaucgaccugcaggagcugggcaaguacgagcaguacaucaaguggcccugguacaucuggcugggcuucaucgccggccugaucgccaucgugauggugaccaucaugcugugcugcaugaccagcugcugcagcugccugaagggcuguugcagcugcggcagcugcugcaaguucgacgaggacgacagcgagcccgugcugaagggcgugaagcugcacuacaccugaggacuaguguccaccugucccuccugggcugcuggauugucucguuuuccugccaaauaaacaggaucagcgcuuuacagaucuaaaaaaaaaaaaaaaaaaaaaaaaaaaaaaaaaaaaaaaaaaaaaaaaaaaaaaaaaaaaaaaaaaaaaaaaaaaaaaaaaaaaaaaaaaaaaaaaaaaa

SEQ ID NO: 25223 - RNA, 4105 nt, Artificial Sequence
  SARS-CoV-2/Wuhan/WIV05/2019__EPI_ISL_402128 spike protein mRNA gc (1-1273)
aggagacccgugacccggaaguuguacggcuacgcgacuuucccucccacaaacccucgcgcccuuccuuuccuacuugggcccggcagaaagcuuaccauguucguguuccuggugcugcugccccuggugagcagccagugcgugaaccugaccacccggacccagcugcccccugccuacaccaacagcuucacccggggcguguacuaccccgacaagguguuccggagcagcgugcugcacagcacccaggaccuguuccugcccuucuucagcaacgugaccugguuccacgccauccacgugagcggcaccaacggcaccaagcgguucgacaacccagugcugcccuucaacgacggcguguacuucgccagcaccgagaagucaaacaucauccggggcuggaucuucggcaccacccuggacagcaagacacagagccugcugaucgugaacaacgccaccaacguggugaucaaggugugcgaguuucaguucugcaacgaccccuuccugggcguguacuaccacaagaacaacaagagcuggauggagagcgaguuccgggucuacagcagcgcuaacaauugcaccuucgaguacgugagccagcccuuccugauggaccucgagggcaagcagggcaacuucaagaaccugcgggaguucguguucaagaacaucgauggcuacuucaagaucuacagcaagcacacccccaucaaccuggugcgggaccugccccagggauucagcgcccuggagccucugguggaccugcccaucggcaucaacaucaccagguuccagacccugcuggcccugcaccggagcuaccugacccccggcgacagcagcagcggcuggaccgccggcgccgccgcauacuacgugggcuaccugcagccacggaccuuccugcugaaguacaacgagaacggcaccaucaccgacgccguggacugcgcccuggacccccugagcgagaccaagugcacccuaaagagcuucaccguggagaagggcaucuaccagaccagcaacuuccgggugcagcccacugagagcaucgugcgguuccccaacauuaccaaccugugucccuucggcgagguguucaacgccacccgguucgccagcguguacgccuggaaccggaagcggaucagcaacugcguggccgacuacagcgugcuguacaacagcgccagcuucagcaccuucaagugcuacggcgugagcccuaccaagcugaacgaccugugcuucaccaacguguacgcugacagcuucgugauccggggcgacgaggugcggcagaucgcccccggccagaccggcaagaucgccgacuacaacuacaagcugcccgacgacuucaccggcugcgugaucgccuggaacagcaacaaccuggacagcaaggugggcggcaacuacaacuaccuguaccggcuguuccguaagagcaaccugaagccauucgagcgggacaucagcaccgagaucuaccaggccggcagcacccccugcaacgguguggagggcuuuaacugcuacuucccccugcagagcuacggcuuccagcccaccaacggcgugggcuaccagcccuaccgggugguggugcugagcuucgagcugcugcacgcccccgccaccgugugcggcccuaaaaagagcaccaaccuggugaagaacaagugcgugaacuucaauuucaacggccugaccggcaccggcgugcugaccgagagcaacaagaaguuccugcccuuccagcaguucggccgggauaucgccgacaccaccgacgcagugcgggacccccagacccuggagauccuggacaucaccccaugcagcuucggcggcgugagcgucaucacccccggcacaaacaccagcaaccagguggccgugcuguaccaggacgugaacugcaccgaggugcccguggccauccacgccgaccagcugacccccaccuggcggguguacagcaccggaagcaacguguuccagacccgggccggcugccugaucggcgccgagcacgugaacaacuccuacgagugcgacauccccaucggcgcuggcaucugcgccagcuaccagacccagaccaacagcccccggcgggcccggagcguggccagccagagcaucaucgccuacaccaugagcuuaggcgccgagaacagcguggccuacagcaacaacagcaucgcgaucccuaccaacuucaccaucagcgugaccaccgagauacugcccgugagcaugaccaagaccagcguggacuguaccauguacaucugcggcgacagcaccgagugcagcaaccugcugcugcaguacggcagcuucugcacccagcugaaccgggcccugaccggcaucgccguggagcaggacaagaacacccaagagguguucgcccaggugaagcagaucuacaagacucccccaaucaaggacuucggcggcuucaacuucagccagauccugcccgaccccagcaagcccagcaagcggagcuucaucgaggaccugcuguucaacaaggugacccuggccgacgccggcuucaucaagcaguacggcgauugccugggcgacaucgccgcucgggaccugaucugcgcccagaaguucaacgggcugaccgugcugcccccucugcugaccgacgagaugaucgcccaguacaccagcgcccugcuugccggcaccaucaccagcggcuggaccuucggcgccggcgcagcccugcagauccccuucgccaugcagauggccuaccgguucaacggcaucggcgugacccagaacgugcuguacgagaaccagaagcugaucgccaaccaguucaacagcgccaucggcaagauccaggacagccugagcagcaccgccagcgcccugggcaagcugcaggacguggugaaccagaacgcucaggcccugaacacccuggugaagcagcugagcagcaacuucggcgccaucagcucagugcugaaugacauccugagcaggcuggacaagguggaggccgaggugcagaucgaccggcugaucaccggccggcugcagagccugcagaccuacgugacccagcagcugauccgggccgccgagauccgggccagcgccaaccuggcagccaccaagaugagcgagugcgugcugggccagagcaagcggguggacuuuugcggcaagggcuaccaccugaugagcuucccccagagcgccccacacggcgugguguuccuccacgucacauacgugcccgcccaggagaagaacuucaccaccgcccccgccauuugccacgacggcaaggcucacuucccccgggagggcguguucgugagcaacggaacccacugguucgugacccagcggaacuucuacgagccccagaucaucaccaccgacaacaccuucgugagcggcaacugcgacguggugaucggcaucgugaacaacaccguguacgacccccugcagccugagcuggacagcuucaaggaggagcuggacaaguacuucaagaaccacaccagccccgauguggaccugggcgacaucagcggcaucaacgccagcguggugaacauccagaaggagaucgaccggcugaacgagguggccaagaaccugaacgagagccugaucgaccugcaggagcugggcaaguacgagcaguacaucaaguggcccugguacaucuggcugggcuucaucgccggccugaucgccaucgugauggugaccaucaugcugugcugcaugaccagcugcuguagcugccugaagggcugcugcagcugcggcagcugcugcaaguucgacgaggacgacagcgagccagugcugaagggcgugaagcugcacuacaccugaggacuaguguccaccugucccuccugggcugcuggauugucucguuuuccugccaaauaaacaggaucagcgcuuuacagaucuaaaaaaaaaaaaaaaaaaaaaaaaaaaaaaaaaaaaaaaaaaaaaaaaaaaaaaaaaaaaaaaaaaaaaaaaaaaaaaaaaaaaaaaaaaaaaaaaaaaa

SEQ ID NO: 25224 - RNA, 4105 nt, Artificial Sequence
  SARS-CoV-2/Wuhan/WIV05/2019__EPI_ISL_402128 spike protein mRNA gc (1-1273)(D614G)
aggagacccgugacccggaaguuguacggcuacgcgacuuucccucccacaaacccucgcgcccuuccuuuccuacuugggcccggcagaaagcuuaccauguucguguuccuggugcugcugccccuggugagcagccagugcgugaaccugaccacccggacccagcugcccccugccuacaccaacagcuucacccggggcguguacuaccccgacaagguguuccggagcagcgugcugcacagcacccaggaccuguuccugcccuucuucagcaacgugaccugguuccacgccauccacgugagcggcaccaacggcaccaagcgguucgacaacccagugcugcccuucaacgacggcguguacuucgccagcaccgagaagucaaacaucauccggggcuggaucuucggcaccacccuggacagcaagacacagagccugcugaucgugaacaacgccaccaacguggugaucaaggugugcgaguuucaguucugcaacgaccccuuccugggcguguacuaccacaagaacaacaagagcuggauggagagcgaguuccgggucuacagcagcgcuaacaauugcaccuucgaguacgugagccagcccuuccugauggaccucgagggcaagcagggcaacuucaagaaccugcgggaguucguguucaagaacaucgauggcuacuucaagaucuacagcaagcacacccccaucaaccuggugcgggaccugccccagggauucagcgcccuggagccucugguggaccugcccaucggcaucaacaucaccagguuccagacccugcuggcccugcaccggagcuaccugacccccggcgacagcagcagcggcuggaccgccggcgccgccgcauacuacgugggcuaccugcagccacggaccuuccugcugaaguacaacgagaacggcaccaucaccgacgccguggacugcgcccuggacccccugagcgagaccaagugcacccuaaagagcuucaccguggagaagggcaucuaccagaccagcaacuuccgggugcagcccacugagagcaucgugcgguuccccaacauuaccaaccugugucccuucggcgagguguucaacgccacccgguucgccagcguguacgccuggaaccggaagcggaucagcaacugcguggccgacuacagcgugcuguacaacagcgccagcuucagcaccuucaagugcuacggcgugagcccuaccaagcugaacgaccugugcuucaccaacguguacgcugacagcuucgugauccggggcgacgaggugcggcagaucgcccccggccagaccggcaagaucgccgacuacaacuacaagcugcccgacgacuucaccggcugcgugaucgccuggaacagcaacaaccuggacagcaaggugggcggcaacuacaacuaccuguaccggcuguuccguaagagcaaccugaagccauucgagcgggacaucagcaccgagaucuaccaggccggcagcacccccugcaacgguguggagggcuuuaacugcuacuucccccugcagagcuacggcuuccagcccaccaacggcgugggcuaccagcccuaccgggugguggugcugagcuucgagcugcugcacgcccccgccaccgugugcggcccuaaaaagagcaccaaccuggugaagaacaagugcgugaacuucaauuucaacggccugaccggcaccggcgugcugaccgagagcaacaagaaguuccugcccuuccagcaguucggccgggauaucgccgacaccaccgacgcagugcgggacccccagacccuggagauccuggacaucaccccaugcagcuucggcggcgugagcgucaucacccccggcacaaacaccagcaaccagguggccgugcuguaccagggagugaacugcaccgaggugcccguggccauccacgccgaccagcugacccccaccuggcggguguacagcaccggcagcaacguguuccagacccgggccggcugccugaucggcgccgagcacgugaacaacuccuacgagugcgacauccccaucggcgcuggcaucugcgccagcuaccagacccagaccaacagcccccggcgggcccggagcguggccagccagagcaucaucgccuacaccaugagcuuaggcgccgagaacagcguggccuacagcaacaacagcaucgcgaucccuaccaacuucaccaucagcgugaccaccgagauacugcccgugagcaugaccaagaccagcguggacuguaccauguacaucugcggcgacagcaccgagugcagcaaccugcugcugcaguacggcagcuucugcacccagcugaaccgggcccugaccggcaucgccguggagcaggacaagaacacccaagagguguucgcccaggugaagcagaucuacaagacucccccaaucaaggacuucggcggcuucaacuucagccagauccugcccgaccccagcaagcccagcaagcggagcuucaucgaggaccugcuguucaacaaggugacccuggccgacgccggcuucaucaagcaguacggcgacugccugggggauaucgccgcucgggaccugaucugcgcccagaaguucaacggccugaccgugcugcccccucugcugaccgacgagaugaucgcccaguacaccagcgcccugcuugccggcaccaucaccagcggcuggaccuucggcgccggcgcagcccugcagauccccuucgccaugcagauggccuaccgguucaacggcaucggcgugacccagaacgugcuguacgagaaccagaagcugaucgccaaccaguucaacagcgccaucggcaagauccaggacagccugagcagcaccgccagcgcccugggcaagcugcaggacguggugaaccagaacgcucaggcccugaacacccuggugaagcagcugagcagcaacuucggcgccaucagcucagugcugaaugacauccugagcaggcuggacaagguggaggccgaggugcagaucgaccggcugaucaccggccggcugcagagccugcagaccuacgugacccagcagcugauccgggccgccgagauccgggccagcgccaaccuggcagccaccaagaugagcgagugcgugcugggccagagcaagcggguggacuuuugcggcaagggcuaccaccugaugagcuucccccagagcgccccacacggcgugguguuccuccacgucacauacgugcccgcccaggagaagaacuucaccaccgcccccgccauuugccacgacggcaaggcucacuucccccgggagggaguguucgugagcaacggcacccacugguucgugacccagcggaacuucuacgagccccagaucaucaccaccgacaacaccuucgugagcggcaacugcgacguggugaucggcaucgugaacaacaccguguacgacccccugcagccugagcuggacagcuucaaggaggagcuggacaaguacuucaagaaccacaccagccccgacguggaucugggcgacaucagcggcaucaacgccagcguggugaacauccagaaggagaucgaccggcugaacgagguggccaagaaccugaacgagagccugaucgaccugcaggagcugggcaaguacgagcaguacaucaaguggcccugguacaucuggcugggcuucaucgccggccugaucgccaucgugauggugaccaucaugcugugcugcaugaccagcugcuguagcugccugaagggcugcugcagcugcggcagcugcugcaaguucgacgaggacgacagcgagccagugcugaagggcgugaagcugcacuacaccugaggacuaguguccaccugucccuccugggcugcuggauugucucguuuuccugccaaauaaacaggaucagcgcuuuacagaucuaaaaaaaaaaaaaaaaaaaaaaaaaaaaaaaaaaaaaaaaaaaaaaaaaaaaaaaaaaaaaaaaaaaaaaaaaaaaaaaaaaaaaaaaaaaaaaaaaaaa

SEQ ID NO: 25225 - RNA, 4105 nt, Artificial Sequence
  SARS-CoV-2/Wuhan/WIV05/2019__EPI_ISL_402128 spike protein mRNA gc (1-1273)(A222V_D614G)
aggagacccgugacccggaaguuguacggcuacgcgacuuucccucccacaaacccucgcgcccuuccuuuccuacuugggcccggcagaaagcuuaccauguucguguuccuggugcugcugccccuggugagcagccagugcgugaaccugaccacccggacccagcugcccccugccuacaccaacagcuucacccggggcguguacuaccccgacaagguguuccggagcagcgugcugcacagcacccaggaccuguuccugcccuucuucagcaacgugaccugguuccacgccauccacgugagcggcaccaacggcaccaagcgguucgacaacccagugcugcccuucaacgacggcguguacuucgccagcaccgagaagucaaacaucauccggggcuggaucuucggcaccacccuggacagcaagacacagagccugcugaucgugaacaacgccaccaacguggugaucaaggugugcgaguuucaguucugcaacgaccccuuccugggcguguacuaccacaagaacaacaagagcuggauggagagcgaguuccgggucuacagcagcgcuaacaauugcaccuucgaguacgugagccagcccuuccugauggaccucgagggcaagcagggcaacuucaagaaccugcgggaguucguguucaagaacaucgauggcuacuucaagaucuacagcaagcacacccccaucaaccuggugcgggaccugccccagggauucagcgugcuggagccucugguggaccugcccaucggcaucaacaucaccagguuccagacccugcuggcccugcaccggagcuaccugacccccggcgacagcagcagcggcuggaccgccggcgccgccgccuacuacgugggcuaccugcagccacggaccuuccugcugaaguacaacgagaacggcaccaucaccgacgcaguggacugcgcccuggacccccugagcgagaccaagugcacccuaaagagcuucaccguggagaagggcaucuaccagaccagcaacuuccgggugcagcccacugagagcaucgugcgguuccccaacauuaccaaccugugucccuucggcgagguguucaacgccacccgguucgccagcguguacgccuggaaccggaagcggaucagcaacugcguggccgacuacagcgugcuguacaacagcgccagcuucagcaccuucaagugcuacggcgugagcccuaccaagcugaacgaccugugcuucaccaacguguacgccgacagcuucgugauccggggcgacgaggugcggcagaucgcucccggccagaccggcaagaucgccgacuacaacuacaagcugcccgacgacuucaccggcugcgugaucgccuggaacagcaacaaccuggacagcaaggugggcggcaacuacaacuaccuguaccggcuguuccguaagagcaaccugaagccauucgagcgggacaucagcaccgagaucuaccaggccggcagcacccccugcaacgguguggagggcuuuaacugcuacuucccccugcagagcuacggcuuccagcccaccaacggcgugggcuaccagcccuaccgggugguggugcugagcuucgagcugcugcacgcccccgccaccgugugcggcccuaaaaagagcaccaaccuggugaagaacaagugcgugaacuucaauuucaacggccugaccggcaccggcgugcugaccgagagcaacaagaaguuccugcccuuccagcaguucggccgggauaucgccgacaccaccgacgccgugcgggacccccagacccuggagauccuggacaucaccccaugcagcuucggcggcgucagcgugaucacccccggcacaaacaccagcaaccagguggcagugcuguaccagggagugaacugcaccgaggugcccguggccauccacgccgaccagcugacccccaccuggcggguguacagcaccggcagcaacguguuccagacccgggccggcugccugaucggcgccgagcacgugaacaacuccuacgagugcgacauccccaucggcgccggcaucugcgcuagcuaccagacccagaccaacagcccccggcgggcccggagcguggccagccagagcaucaucgccuacaccaugagcuuaggcgccgagaacagcguggccuacagcaacaacagcaucgccaucccuaccaacuucaccaucagcgugaccaccgagauacugcccgugagcaugaccaagaccagcguggacuguaccauguacaucugcggcgacagcaccgagugcagcaaccugcugcugcaguacggcagcuucugcacccagcugaaccgggcgcugaccggcaucgccguggagcaggacaagaacacccaagagguguucgcccaggugaagcagaucuacaagacucccccaaucaaggacuucggcggcuucaacuucagccagauccugcccgaccccagcaagcccagcaagcggagcuucaucgaggaccugcuguucaacaaggugacccuggccgacgccggcuucaucaagcaguacggcgacugccugggggauaucgccgcccgggaccugaucugcgcucagaaguucaacggccugaccgugcugcccccucugcugaccgacgagaugaucgcccaguacaccagcgcccugcuugccggcaccaucaccagcggcuggaccuucggcgccggcgccgcacugcagauccccuucgccaugcagauggccuaccgguucaacggcaucggcgugacccagaacgugcuguacgagaaccagaagcugaucgccaaccaguucaacagcgccaucggcaagauccaggacagccugagcagcaccgccagcgcccugggcaagcugcaggacguggugaaccagaacgcccaggcucugaacacccuggugaagcagcugagcagcaacuucggcgccaucagcucagugcugaaugacauccugagcaggcuggacaagguggaggccgaggugcagaucgaccggcugaucaccggccggcugcagagccugcagaccuacgugacccagcagcugauccgggccgccgagauccgggccagcgccaaccuggccgcaaccaagaugagcgagugcgugcugggccagagcaagcggguggacuuuugcggcaagggcuaccaccugaugagcuucccccagagcgccccacacggcguggucuuccuccacgugacauacgugcccgcccaggagaagaacuucaccaccgcccccgccauuugccacgacggcaaggcccacuucccccgggagggaguguucgugagcaacggcacccacugguucgugacccagcggaacuucuacgagccccagaucaucaccaccgacaacaccuucgugagcggcaacugcgacguggugaucggcaucgugaacaacaccguguacgacccccugcagccugagcuggacagcuucaaggaggagcuggacaaguacuucaagaaccacaccagccccgacguggaucugggcgacaucagcggcaucaacgcuagcguggugaacauccagaaggagaucgaccggcugaacgagguggccaagaaccugaacgagagccugaucgaccugcaggagcugggcaaguacgagcaguacaucaaguggcccugguacaucuggcugggcuucaucgccggccugaucgccaucgugauggugaccaucaugcugugcugcaugaccagcugcuguagcugccugaagggcugcugcagcugcggcagcugcugcaaguucgacgaggacgacagcgagccagugcugaagggcgugaagcugcacuacaccugaggacuaguguccaccugucccuccugggcugcuggauugucucguuuuccugccaaauaaacaggaucagcgcuuuacagaucuaaaaaaaaaaaaaaaaaaaaaaaaaaaaaaaaaaaaaaaaaaaaaaaaaaaaaaaaaaaaaaaaaaaaaaaaaaaaaaaaaaaaaaaaaaaaaaaaaaaa

SEQ ID NO: 25226 - RNA, 4105 nt, Artificial Sequence
  SARS-CoV-2/Wuhan/WIV05/2019__EPI_ISL_402128 spike protein mRNA gc (1-1273)(N439K_D614G)
aggagacccgugacccggaaguuguacggcuacgcgacuuucccucccacaaacccucgcgcccuuccuuuccuacuugggcccggcagaaagcuuaccauguucguguuccuggugcugcugccccuggugagcagccagugcgugaaccugaccacccggacccagcugcccccugccuacaccaacagcuucacccggggcguguacuaccccgacaagguguuccggagcagcgugcugcacagcacccaggaccuguuccugcccuucuucagcaacgugaccugguuccacgccauccacgugagcggcaccaacggcaccaagcgguucgacaacccagugcugcccuucaacgacggcguguacuucgccagcaccgagaagucaaacaucauccggggcuggaucuucggcaccacccuggacagcaagacacagagccugcugaucgugaacaacgccaccaacguggugaucaaggugugcgaguuucaguucugcaacgaccccuuccugggcguguacuaccacaagaacaacaagagcuggauggagagcgaguuccgggucuacagcagcgcuaacaauugcaccuucgaguacgugagccagcccuuccugauggaccucgagggcaagcagggcaacuucaagaaccugcgggaguucguguucaagaacaucgauggcuacuucaagaucuacagcaagcacacccccaucaaccuggugcgggaccugccccagggauucagcgcccuggagccucugguggaccugcccaucggcaucaacaucaccagguuccagacccugcuggcccugcaccggagcuaccugacccccggcgacagcagcagcggcuggaccgccggcgccgccgcauacuacgugggcuaccugcagccacggaccuuccugcugaaguacaacgagaacggcaccaucaccgacgccguggacugcgcccuggacccccugagcgagaccaagugcacccuaaagagcuucaccguggagaagggcaucuaccagaccagcaacuuccgggugcagcccacugagagcaucgugcgguuccccaacauuaccaaccugugucccuucggcgagguguucaacgccacccgguucgccagcguguacgccuggaaccggaagcggaucagcaacugcguggccgacuacagcgugcuguacaacagcgccagcuucagcaccuucaagugcuacggcgugagcccuaccaagcugaacgaccugugcuucaccaacguguacgcugacagcuucgugauccggggcgacgaggugcggcagaucgcccccggccagaccggcaagaucgccgacuacaacuacaagcugcccgacgacuucaccggcugcgugaucgccuggaacagcaagaaccuggacagcaaggugggcggcaacuacaacuaccuguaccggcuguuccguaagagcaaccugaagccauucgagcgggacaucagcaccgagaucuaccaggccggcagcacccccugcaacgguguggagggcuuuaacugcuacuucccccugcagagcuacggcuuccagcccaccaacggcgugggcuaccagcccuaccgggugguggugcugagcuucgagcugcugcacgcccccgccaccgugugcggcccuaaaaagagcaccaaccuggugaagaacaagugcgugaacuucaacuucaauggccugaccggcaccggcgugcugaccgagagcaacaagaaguuccugcccuuccagcaguucggccgggauaucgccgacaccaccgacgcagugcgggacccccagacccuggagauccuggacaucaccccaugcagcuucggcggcgugagcgucaucacccccggcacaaacaccagcaaccagguggccgugcuguaccagggagugaacugcaccgaggugcccguggccauccacgccgaccagcugacccccaccuggcggguguacagcaccggcagcaacguguuccagacccgggccggcugccugaucggcgccgagcacgugaacaacuccuacgagugcgacauccccaucggcgcuggcaucugcgccagcuaccagacccagaccaacagcccccggcgggcccggagcguggccagccagagcaucaucgccuacaccaugagcuuaggcgccgagaacagcguggccuacagcaacaacagcaucgcgaucccuaccaacuucaccaucagcgugaccaccgagauacugcccgugagcaugaccaagaccagcguggacuguaccauguacaucugcggcgacagcaccgagugcagcaaccugcugcugcaguacggcagcuucugcacccagcugaaccgggcccugaccggcaucgccguggagcaggacaagaacacccaagagguguucgcccaggugaagcagaucuacaagacucccccaaucaaggacuucggcggcuucaacuucagccagauccugcccgaccccagcaagcccagcaagcggagcuucaucgaggaccugcuguucaacaaggugacccuggccgacgccggcuucaucaagcaguacggcgacugccugggggauaucgccgcucgggaccugaucugcgcccagaaguucaacggccugaccgugcugcccccucugcugaccgacgagaugaucgcccaguacaccagcgcccugcuugccggcaccaucaccagcggcuggaccuucggcgccggcgcagcccugcagauccccuucgccaugcagauggccuaccgguucaacggcaucggcgugacccagaacgugcuguacgagaaccagaagcugaucgccaaccaguucaacagcgccaucggcaagauccaggacagccugagcagcaccgccagcgcccugggcaagcugcaggacguggugaaccagaacgcucaggcccugaacacccuggugaagcagcugagcagcaacuucggcgccaucagcucagugcugaacgacauccugagcaggcuggacaagguggaggccgaggugcagaucgaccggcugaucaccggccggcugcagagccugcagaccuacgugacccagcagcugauccgggccgccgagauccgggccagcgccaaucuggcagccaccaagaugagcgagugcgugcugggccagagcaagcggguggacuuuugcggcaagggcuaccaccugaugagcuucccccagagcgccccacacggcgugguguuccuccacgucacauacgugcccgcccaggagaagaacuucaccaccgcccccgccauuugccacgacggcaaggcucacuucccccgggagggaguguucgugagcaacggcacccacugguucgugacccagcggaacuucuacgagccccagaucaucaccaccgacaacaccuucgugagcggcaacugcgacguggugaucggcaucgugaacaacaccguguacgacccccugcagccugagcuggacagcuucaaggaggagcuggacaaguacuucaagaaccacaccagccccgacguggaucugggcgacaucagcggcaucaacgccagcguggugaacauccagaaggagaucgaccggcugaacgagguggccaagaaccugaacgagagccugaucgaccugcaggagcugggcaaguacgagcaguacaucaaguggcccugguacaucuggcugggcuucaucgccggccugaucgccaucgugauggugaccaucaugcugugcugcaugaccagcugcuguagcugccugaagggcugcugcagcugcggcagcugcugcaaguucgacgaggacgacagcgagccagugcugaagggcgugaagcugcacuacaccugaggacuaguguccaccugucccuccugggcugcuggauugucucguuuuccugccaaauaaacaggaucagcgcuuuacagaucuaaaaaaaaaaaaaaaaaaaaaaaaaaaaaaaaaaaaaaaaaaaaaaaaaaaaaaaaaaaaaaaaaaaaaaaaaaaaaaaaaaaaaaaaaaaaaaaaaaaa

SEQ ID NO: 25227 - RNA, 4105 nt, Artificial Sequence
  SARS-CoV-2/Wuhan/WIV05/2019__EPI_ISL_402128 spike protein mRNA gc (1-1273)(S477N_D614G)
aggagacccgugacccggaaguuguacggcuacgcgacuuucccucccacaaacccucgcgcccuuccuuuccuacuugggcccggcagaaagcuuaccauguucguguuccuggugcugcugccccuggugagcagccagugcgugaaccugaccacccggacccagcugcccccugccuacaccaacagcuucacccggggcguguacuaccccgacaagguguuccggagcagcgugcugcacagcacccaggaccuguuccugcccuucuucagcaacgugaccugguuccacgccauccacgugagcggcaccaacggcaccaagcgguucgacaacccagugcugcccuucaacgacggcguguacuucgccagcaccgagaagucaaacaucauccggggcuggaucuucggcaccacccuggacagcaagacacagagccugcugaucgugaacaacgccaccaacguggugaucaaggugugcgaguuucaguucugcaacgaccccuuccugggcguguacuaccacaagaacaacaagagcuggauggagagcgaguuccgggucuacagcagcgcuaacaauugcaccuucgaguacgugagccagcccuuccugauggaccucgagggcaagcagggcaacuucaagaaccugcgggaguucguguucaagaacaucgauggcuacuucaagaucuacagcaagcacacccccaucaaccuggugcgggaccugccccagggauucagcgcccuggagccucugguggaccugcccaucggcaucaacaucaccagguuccagacccugcuggcccugcaccggagcuaccugacccccggcgacagcagcagcggcuggaccgccggcgccgccgcauacuacgugggcuaccugcagccacggaccuuccugcugaaguacaacgagaacggcaccaucaccgacgccguggacugcgcccuggacccccugagcgagaccaagugcacccuaaagagcuucaccguggagaagggcaucuaccagaccagcaacuuccgggugcagcccacugagagcaucgugcgguuccccaacauuaccaaccugugucccuucggcgagguguucaacgccacccgguucgccagcguguacgccuggaaccggaagcggaucagcaacugcguggccgacuacagcgugcuguacaacagcgccagcuucagcaccuucaagugcuacggcgugagcccuaccaagcugaacgaccugugcuucaccaacguguacgcugacagcuucgugauccggggcgacgaggugcggcagaucgcccccggccagaccggcaagaucgccgacuacaacuacaagcugcccgacgacuucaccggcugcgugaucgccuggaacagcaacaaccuggacagcaaggugggcggcaacuacaacuaccuguaccggcuguuccguaagagcaaccugaagccauucgagcgggacaucagcaccgagaucuaccaggccggcaacacccccugcaacgguguggagggcuuuaacugcuacuucccccugcagagcuacggcuuccagcccaccaacggcgugggcuaccagcccuaccgggugguggugcugagcuucgagcugcugcacgcccccgccaccgugugcggcccuaaaaagagcaccaaccuggugaagaacaagugcgugaauuucaacuucaacggccugaccggcaccggcgugcugaccgagagcaacaagaaguuccugcccuuccagcaguucggccgggauaucgccgacaccaccgacgcagugcgggacccccagacccuggagauccuggacaucaccccaugcagcuucggcggcgugagcgucaucacccccggcacaaacaccagcaaccagguggccgugcuguaccagggagugaacugcaccgaggugcccguggccauccacgccgaccagcugacccccaccuggcggguguacagcaccggcagcaacguguuccagacccgggccggcugccugaucggcgccgagcacgugaacaacagcuacgagugcgacauccccaucggcgcuggcaucugcgccuccuaccagacccagaccaacagcccccggcgggcccggagcguggccagccagagcaucaucgccuacaccaugagcuuaggcgccgagaacagcguggccuacagcaacaacagcaucgcgaucccuaccaacuucaccaucagcgugaccaccgagauacugcccgugagcaugaccaagaccagcguggacuguaccauguacaucugcggcgacagcaccgagugcagcaaccugcugcugcaguacggcagcuucugcacccagcugaaccgggcccugaccggcaucgccguggagcaggacaagaacacccaagagguguucgcccaggugaagcagaucuacaagacucccccaaucaaggacuucggcggcuucaacuucagccagauccugcccgaccccagcaagcccagcaagcggagcuucaucgaggaccugcuguucaacaaggugacccuggccgacgccggcuucaucaagcaguacggcgacugccugggggauaucgccgcucgggaccugaucugcgcccagaaguucaacggccugaccgugcugcccccucugcugaccgacgagaugaucgcccaguacaccagcgcccugcuugccggcaccaucaccagcggcuggaccuucggcgccggcgcagcccugcagauccccuucgccaugcagauggccuaccgguucaacggcaucggcgugacccagaacgugcuguacgagaaccagaagcugaucgccaaccaguucaacagcgccaucggcaagauccaggacagccugagcagcaccgccagcgcccugggcaagcugcaggacguggugaaccagaacgcucaggcccugaacacccuggugaagcagcugagcagcaauuucggcgccaucagcagcgugcugaacgacauccugucaaggcuggacaagguggaggccgaggugcagaucgaccggcugaucaccggccggcugcagagccugcagaccuacgugacccagcagcugauccgggccgccgagauccgggccagcgccaaccuggcagccaccaagaugagcgagugcgugcugggccagagcaagcggguggacuuuugcggcaagggcuaccaccugaugagcuucccccagagcgccccacacggcgugguguuccuccacgucacauacgugcccgcccaggagaagaacuucaccaccgcccccgccauuugccacgacggcaaggcucacuucccccgggagggaguguucgugagcaacggcacccacugguucgugacccagcggaacuucuacgagccccagaucaucaccaccgacaacaccuucgugagcggcaacugcgacguggugaucggcaucgugaacaacaccguguacgacccccugcagccugagcuggacagcuucaaggaggagcuggacaaguacuucaagaaccacaccagccccgacguggaucugggcgacaucagcggcaucaacgccagcguggugaacauccagaaggagaucgaccggcugaacgagguggccaagaaccugaacgagagccugaucgaccugcaggagcugggcaaguacgagcaguacaucaaguggcccugguacaucuggcugggcuucaucgccggccugaucgccaucgugauggugaccaucaugcugugcugcaugaccagcugcuguagcugccugaagggcugcugcagcugcggcagcugcugcaaguucgacgaggacgacagcgagccagugcugaagggcgugaagcugcacuacaccugaggacuaguguccaccugucccuccugggcugcuggauugucucguuuuccugccaaauaaacaggaucagcgcuuuacagaucuaaaaaaaaaaaaaaaaaaaaaaaaaaaaaaaaaaaaaaaaaaaaaaaaaaaaaaaaaaaaaaaaaaaaaaaaaaaaaaaaaaaaaaaaaaaaaaaaaaaa

SEQ ID NO: 25228 - RNA, 4105 nt, Artificial Sequence
  SARS-CoV-2/Wuhan/WIV05/2019__EPI_ISL_402128 spike protein mRNA gc (1-1273)(N501Y_D614G)
aggagacccgugacccggaaguuguacggcuacgcgacuuucccucccacaaacccucgcgcccuuccuuuccuacuugggcccggcagaaagcuuaccauguucguguuccuggugcugcugccccuggugagcagccagugcgugaaccugaccacccggacccagcugcccccugccuacaccaacagcuucacccggggcguguacuaccccgacaagguguuccggagcagcgugcugcacagcacccaggaccuguuccugcccuucuucagcaacgugaccugguuccacgccauccacgugagcggcaccaacggcaccaagcgguucgacaacccagugcugcccuucaacgacggcguguacuucgccagcaccgagaagucaaacaucauccggggcuggaucuucggcaccacccuggacagcaagacacagagccugcugaucgugaacaacgccaccaacguggugaucaaggugugcgaguuucaguucugcaacgaccccuuccugggcguguacuaccacaagaacaacaagagcuggauggagagcgaguuccgggucuacagcagcgcuaacaauugcaccuucgaguacgugagccagcccuuccugauggaccucgagggcaagcagggcaacuucaagaaccugcgggaguucguguucaagaacaucgauggcuacuucaagaucuacagcaagcacacccccaucaaccuggugcgggaccugccccagggauucagcgcccuggagccucugguggaccugcccaucggcaucaacaucaccagguuccagacccugcuggcccugcaccggagcuaccugacccccggcgacagcagcagcggcuggaccgccggcgccgccgcauacuacgugggcuaccugcagccacggaccuuccugcugaaguacaacgagaacggcaccaucaccgacgccguggacugcgcccuggacccccugagcgagaccaagugcacccuaaagagcuucaccguggagaagggcaucuaccagaccagcaacuuccgggugcagcccacugagagcaucgugcgguuccccaacauuaccaaccugugucccuucggcgagguguucaacgccacccgguucgccagcguguacgccuggaaccggaagcggaucagcaacugcguggccgacuacagcgugcuguacaacagcgccagcuucagcaccuucaagugcuacggcgugagcccuaccaagcugaacgaccugugcuucaccaacguguacgcugacagcuucgugauccggggcgacgaggugcggcagaucgcccccggccagaccggcaagaucgccgacuacaacuacaagcugcccgacgacuucaccggcugcgugaucgccuggaacagcaacaaccuggacagcaaggugggcggcaacuacaacuaccuguaccggcuguuccguaagagcaaccugaagccauucgagcgggacaucagcaccgagaucuaccaggccggcagcacccccugcaacgguguggagggcuuuaacugcuacuucccccugcagagcuacggcuuccagcccaccuacggcgugggcuaccagcccuaccgggugguggugcugagcuucgagcugcugcacgcccccgccaccgugugcggcccuaaaaagagcaccaaccuggugaagaacaagugcgugaacuucaacuucaauggccugaccggcaccggcgugcugaccgagagcaacaagaaguuccugcccuuccagcaguucggccgggauaucgccgacaccaccgacgcagugcgggacccccagacccuggagauccuggacaucaccccaugcagcuucggcggcgugagcgucaucacccccggcacaaacaccagcaaccagguggccgugcuguaccagggagugaacugcaccgaggugcccguggccauccacgccgaccagcugacccccaccuggcggguguacagcaccggcagcaacguguuccagacccgggccggcugccugaucggcgccgagcacgugaacaacuccuacgagugcgacauccccaucggcgcuggcaucugcgccagcuaccagacccagaccaacagcccccggcgggcccggagcguggccagccagagcaucaucgccuacaccaugagcuuaggcgccgagaacagcguggccuacagcaacaacagcaucgcgaucccuaccaacuucaccaucagcgugaccaccgagauacugcccgugagcaugaccaagaccagcguggacuguaccauguacaucugcggcgacagcaccgagugcagcaaccugcugcugcaguacggcagcuucugcacccagcugaaccgggcccugaccggcaucgccguggagcaggacaagaacacccaagagguguucgcccaggugaagcagaucuacaagacucccccaaucaaggacuucggcggcuucaacuucagccagauccugcccgaccccagcaagcccagcaagcggagcuucaucgaggaccugcuguucaacaaggugacccuggccgacgccggcuucaucaagcaguacggcgacugccugggggauaucgccgcucgggaccugaucugcgcccagaaguucaacggccugaccgugcugcccccucugcugaccgacgagaugaucgcccaguacaccagcgcccugcuugccggcaccaucaccagcggcuggaccuucggcgccggcgcagcccugcagauccccuucgccaugcagauggccuaccgguucaacggcaucggcgugacccagaacgugcuguacgagaaccagaagcugaucgccaaccaguucaacagcgccaucggcaagauccaggacagccugagcagcaccgccagcgcccugggcaagcugcaggacguggugaaccagaacgcucaggcccugaacacccuggugaagcagcugagcagcaacuucggcgccaucagcucagugcugaacgacauccugagcaggcuggacaagguggaggccgaggugcagaucgaccggcugaucaccggccggcugcagagccugcagaccuacgugacccagcagcugauccgggccgccgagauccgggccagcgccaaucuggcagccaccaagaugagcgagugcgugcugggccagagcaagcggguggacuuuugcggcaagggcuaccaccugaugagcuucccccagagcgccccacacggcgugguguuccuccacgucacauacgugcccgcccaggagaagaacuucaccaccgcccccgccauuugccacgacggcaaggcucacuucccccgggagggaguguucgugagcaacggcacccacugguucgugacccagcggaacuucuacgagccccagaucaucaccaccgacaacaccuucgugagcggcaacugcgacguggugaucggcaucgugaacaacaccguguacgacccccugcagccugagcuggacagcuucaaggaggagcuggacaaguacuucaagaaccacaccagccccgacguggaucugggcgacaucagcggcaucaacgccagcguggugaacauccagaaggagaucgaccggcugaacgagguggccaagaaccugaacgagagccugaucgaccugcaggagcugggcaaguacgagcaguacaucaaguggcccugguacaucuggcugggcuucaucgccggccugaucgccaucgugauggugaccaucaugcugugcugcaugaccagcugcuguagcugccugaagggcugcugcagcugcggcagcugcugcaaguucgacgaggacgacagcgagccagugcugaagggcgugaagcugcacuacaccugaggacuaguguccaccugucccuccugggcugcuggauugucucguuuuccugccaaauaaacaggaucagcgcuuuacagaucuaaaaaaaaaaaaaaaaaaaaaaaaaaaaaaaaaaaaaaaaaaaaaaaaaaaaaaaaaaaaaaaaaaaaaaaaaaaaaaaaaaaaaaaaaaaaaaaaaaaa

SEQ ID NO: 25229 - RNA, 4099 nt, Artificial Sequence
  SARS-CoV-2/Wuhan/WIV05/2019__EPI_ISL_402128 spike protein mRNA gc (1-1273)(H69del_V70del_D614G)
aggagacccgugacccggaaguuguacggcuacgcgacuuucccucccacaaacccucgcgcccuuccuuuccuacuugggcccggcagaaagcuuaccauguucguguuccuggugcugcugccccuggugagcagccagugcgugaaccugaccacccggacccagcugcccccugccuacaccaacagcuucacccggggcguguacuaccccgacaagguguuccggagcagcgugcugcacagcacccaggaccuguuccugcccuucuucagcaacgugaccugguuccacgccaucagcggcaccaacggcaccaagcgguucgacaacccagugcugcccuucaacgacggcguguacuucgccagcaccgagaagucaaacaucauccggggcuggaucuucggcaccacccuggacagcaagacacagagccugcugaucgugaacaacgccaccaacguggugaucaaggugugcgaguuucaguucugcaacgaccccuuccugggcguguacuaccacaagaacaacaagagcuggauggagagcgaguuccggguguacagcagcgcuaacaauugcaccuucgaguacgucagccagcccuuccugauggaccucgagggcaagcagggcaacuucaagaaccugcgggaguucguguucaagaacaucgauggcuacuucaagaucuacagcaagcacacccccaucaaccuggugcgggaccugccccagggauucagcgcccuggagccucugguggaccugcccaucggcaucaacaucaccagguuccagacccugcuggcccugcaccggagcuaccugacccccggcgacagcagcagcggcuggaccgccggcgccgccgcauacuacgugggcuaccugcagccacggaccuuccugcugaaguacaacgagaacggcaccaucaccgacgccguggacugcgcccuggacccccugagcgagaccaagugcacccuaaagagcuucaccguggagaagggcaucuaccagaccagcaacuuccgggugcagcccacugagagcaucgugcgguuccccaacauuaccaaccugugucccuucggcgagguguucaacgccacccgguucgccagcguguacgccuggaaccggaagcggaucagcaacugcguggccgacuacagcgugcuguacaacagcgccagcuucagcaccuucaagugcuacggcgugagcccuaccaagcugaacgaccugugcuucaccaacguguacgcugacagcuucgugauccggggcgacgaggugcggcagaucgcccccggccagaccggcaagaucgccgacuacaacuacaagcugcccgacgacuucaccggcugcgugaucgccuggaacagcaacaaccuggacagcaaggugggcggcaacuacaacuaccuguaccggcuguuccguaagagcaaccugaagccauucgagcgggacaucagcaccgagaucuaccaggccggcagcacccccugcaacgguguggagggcuuuaacugcuacuucccccugcagagcuacggcuuccagcccaccaacggcgugggcuaccagcccuaccgggugguggugcugagcuucgagcugcugcacgcccccgccaccgugugcggcccuaaaaagagcaccaaccuggugaagaacaagugcgugaacuucaauuucaacggccugaccggcaccggcgugcugaccgagagcaacaagaaguuccugcccuuccagcaguucggccgggauaucgccgacaccaccgacgcagugcgggacccccagacccuggagauccuggacaucaccccaugcagcuucggcggcgugagcgugaucacccccggcacaaacaccagcaaccaggucgccgugcuguaccagggagugaacugcaccgaggugcccguggccauccacgccgaccagcugacccccaccuggcggguguacagcaccggcagcaacguguuccagacccgggccggcugccugaucggcgccgagcacgugaacaacuccuacgagugcgacauccccaucggcgcuggcaucugcgccagcuaccagacccagaccaacagcccccggcgggcccggagcguggccagccagagcaucaucgccuacaccaugagcuuaggcgccgagaacagcguggccuacagcaacaacagcaucgcgaucccuaccaacuucaccaucagcgugaccaccgagauacugcccgugagcaugaccaagaccagcguggacuguaccauguacaucugcggcgacagcaccgagugcagcaaccugcugcugcaguacggcagcuucugcacccagcugaaccgggcccugaccggcaucgccguggagcaggacaagaacacccaagagguguucgcccaggugaagcagaucuacaagacucccccaaucaaggacuucggcggcuucaacuucagccagauccugcccgaccccagcaagcccagcaagcggagcuucaucgaggaccugcuguucaacaaggugacccuggccgacgccggcuucaucaagcaguacggcgacugccugggggauaucgccgcucgggaccugaucugcgcccagaaguucaacggccugaccgugcugcccccucugcugaccgacgagaugaucgcccaguacaccagcgcccugcuugccggcaccaucaccagcggcuggaccuucggcgccggcgcagcccugcagauccccuucgccaugcagauggccuaccgguucaacggcaucggcgugacccagaacgugcuguacgagaaccagaagcugaucgccaaccaguucaacagcgccaucggcaagauccaggacagccugagcagcaccgccagcgcccugggcaagcugcaggacguggugaaccagaacgcucaggcccugaacacccuggugaagcagcugagcagcaacuucggcgccaucagcucagugcugaaugacauccugagcaggcuggacaagguggaggccgaggugcagaucgaccggcugaucaccggccggcugcagagccugcagaccuacgugacccagcagcugauccgggccgccgagauccgggccagcgccaaccuggcagccaccaagaugagcgagugcgugcugggccagagcaagcggguggacuuuugcggcaagggcuaccaccugaugagcuucccccagagcgccccacacggcgugguguuccuccacgugacauacguccccgcccaggagaagaacuucaccaccgcccccgccauuugccacgacggcaaggcucacuucccccgggagggaguguucgugagcaacggcacccacugguucgugacccagcggaacuucuacgagccccagaucaucaccaccgacaacaccuucgugagcggcaacugcgacguggugaucggcaucgugaacaacaccguguacgacccccugcagccugagcuggacagcuucaaggaggagcuggacaaguacuucaagaaccacaccagccccgacguggaucugggcgacaucagcggcaucaacgccagcguggugaacauccagaaggagaucgaccggcugaacgagguggccaagaaccugaacgagagccugaucgaccugcaggagcugggcaaguacgagcaguacaucaaguggcccugguacaucuggcugggcuucaucgccggccugaucgccaucgugauggugaccaucaugcugugcugcaugaccagcugcuguagcugccugaagggcugcugcagcugcggcagcugcugcaaguucgacgaggacgacagcgagccagugcugaagggcgugaagcugcacuacaccugaggacuaguguccaccugucccuccugggcugcuggauugucucguuuuccugccaaauaaacaggaucagcgcuuuacagaucuaaaaaaaaaaaaaaaaaaaaaaaaaaaaaaaaaaaaaaaaaaaaaaaaaaaaaaaaaaaaaaaaaaaaaaaaaaaaaaaaaaaaaaaaaaaaaaaaaaaa

SEQ ID NO: 25230 - RNA, 4105 nt, Artificial Sequence
  SARS-CoV-2/Wuhan/WIV05/2019__EPI_ISL_402128 spike protein mRNA gc (1-1273)(Y453F_D614G)
aggagacccgugacccggaaguuguacggcuacgcgacuuucccucccacaaacccucgcgcccuuccuuuccuacuugggcccggcagaaagcuuaccauguucguguuccuggugcugcugccccuggugagcagccagugcgugaaccugaccacccggacccagcugcccccugccuacaccaacagcuucacccggggcguguacuaccccgacaagguguuccggagcagcgugcugcacagcacccaggaccuguuccugcccuucuucagcaacgugaccugguuccacgccauccacgugagcggcaccaacggcaccaagcgguucgacaacccagugcugcccuucaacgacggcguguacuucgccagcaccgagaagucaaacaucauccggggcuggaucuucggcaccacccuggacagcaagacacagagccugcugaucgugaacaacgccaccaacguggugaucaaggugugcgaguuucaguucugcaacgaccccuuccugggcguguacuaccacaagaacaacaagagcuggauggagagcgaguuccgggucuacagcagcgcuaacaauugcaccuucgaguacgugagccagcccuuccugauggaccucgagggcaagcagggcaacuucaagaaccugcgggaguucguguucaagaacaucgauggcuacuucaagaucuacagcaagcacacccccaucaaccuggugcgggaccugccccagggauucagcgcccuggagccucugguggaccugcccaucggcaucaacaucaccagguuccagacccugcuggcccugcaccggagcuaccugacccccggcgacagcagcagcggcuggaccgccggcgccgccgcauacuacgugggcuaccugcagccacggaccuuccugcugaaguacaacgagaacggcaccaucaccgacgccguggacugcgcccuggacccccugagcgagaccaagugcacccuaaagagcuucaccguggagaagggcaucuaccagaccagcaacuuccgggugcagcccacugagagcaucgugcgguuccccaacauuaccaaccugugucccuucggcgagguguucaacgccacccgguucgccagcguguacgccuggaaccggaagcggaucagcaacugcguggccgacuacagcgugcuguacaacagcgccagcuucagcaccuucaagugcuacggcgugagcccuaccaagcugaacgaccugugcuucaccaacguguacgcugacagcuucgugauccggggcgacgaggugcggcagaucgcccccggccagaccggcaagaucgccgacuacaacuacaagcugcccgacgacuucaccggcugcgugaucgccuggaacagcaacaaccuggacagcaaggugggcggcaacuacaacuaccuguuccggcuguuccguaagagcaaccugaagccauuugagcgggacaucagcaccgagaucuaccaggccggcagcacccccugcaacgguguggagggcuucaacugcuacuucccccugcagagcuacggcuuccagcccaccaacggcgugggcuaccagcccuaccgggugguggugcugagcuucgagcugcugcacgcccccgccaccgugugcggcccuaaaaagagcaccaaccuggugaagaacaagugcgugaacuucaauuucaacggccugaccggcaccggcgugcugaccgagagcaacaagaaguuccugcccuuccagcaguucggccgggauaucgccgacaccaccgacgcagugcgggacccccagacccuggagauccuggacaucaccccaugcagcuucggcggcgugagcgucaucacccccggcacaaacaccagcaaccagguggccgugcuguaccagggagugaacugcaccgaggugcccguggccauccacgccgaccagcugacccccaccuggcggguguacagcaccggcagcaacguguuccagacccgggccggcugccugaucggcgccgagcacgugaacaacuccuacgagugcgacauccccaucggcgcuggcaucugcgccagcuaccagacccagaccaacagcccccggcgggcccggagcguggccagccagagcaucaucgccuacaccaugagcuuaggcgccgagaacagcguggccuacagcaacaacagcaucgcgaucccuaccaacuucaccaucagcgugaccaccgagauacugcccgugagcaugaccaagaccagcguggacuguaccauguacaucugcggcgacagcaccgagugcagcaaccugcugcugcaguacggcagcuucugcacccagcugaaccgggcccugaccggcaucgccguggagcaggacaagaacacccaagagguguucgcccaggugaagcagaucuacaagacucccccaaucaaggacuucggcggcuucaacuucagccagauccugcccgaccccagcaagcccagcaagcggagcuucaucgaggaccugcuguucaacaaggugacccuggccgacgccggcuucaucaagcaguacggcgacugccugggggauaucgccgcucgggaccugaucugcgcccagaaguucaacggccugaccgugcugcccccucugcugaccgacgagaugaucgcccaguacaccagcgcccugcuugccggcaccaucaccagcggcuggaccuucggcgccggcgcagcccugcagauccccuucgccaugcagauggccuaccgguucaacggcaucggcgugacccagaacgugcuguacgagaaccagaagcugaucgccaaccaguucaacagcgccaucggcaagauccaggacagccugagcagcaccgccagcgcccugggcaagcugcaggacguggugaaccagaacgcucaggcccugaacacccuggugaagcagcugagcagcaacuuuggcgccaucagcucagugcugaaugacauccugagcaggcuggacaagguggaggccgaggugcagaucgaccggcugaucaccggccggcugcagagccugcagaccuacgugacccagcagcugauccgggccgccgagauccgggccagcgccaaccuggcagccaccaagaugagcgagugcgugcugggccagagcaagcggguggacuucugcggcaagggcuaccaccugaugagcuucccccagagcgccccacacggcgugguguuccuccacgucacauacgugcccgcccaggagaagaacuucaccaccgcccccgccauuugccacgacggcaaggcucacuucccccgggagggaguguucgugagcaacggcacccacugguucgugacccagcggaacuucuacgagccccagaucaucaccaccgacaacaccuucgugagcggcaacugcgacguggugaucggcaucgugaacaacaccguguacgacccccugcagccugagcuggacagcuucaaggaggagcuggacaaguacuucaagaaccacaccagccccgacguggaucugggcgacaucagcggcaucaacgccagcguggugaacauccagaaggagaucgaccggcugaacgagguggccaagaaccugaacgagagccugaucgaccugcaggagcugggcaaguacgagcaguacaucaaguggcccugguacaucuggcugggcuucaucgccggccugaucgccaucgugauggugaccaucaugcugugcugcaugaccagcugcuguagcugccugaagggcugcugcagcugcggcagcugcugcaaguucgacgaggacgacagcgagccagugcugaagggcgugaagcugcacuacaccugaggacuaguguccaccugucccuccugggcugcuggauugucucguuuuccugccaaauaaacaggaucagcgcuuuacagaucuaaaaaaaaaaaaaaaaaaaaaaaaaaaaaaaaaaaaaaaaaaaaaaaaaaaaaaaaaaaaaaaaaaaaaaaaaaaaaaaaaaaaaaaaaaaaaaaaaaaa

SEQ ID NO: 25231 - RNA, 4105 nt, Artificial Sequence
  SARS-CoV-2/Wuhan/WIV05/2019__EPI_ISL_402128 spike protein mRNA gc (1-1273)(D614G_I692V)
aggagacccgugacccggaaguuguacggcuacgcgacuuucccucccacaaacccucgcgcccuuccuuuccuacuugggcccggcagaaagcuuaccauguucguguuccuggugcugcugccccuggugagcagccagugcgugaaccugaccacccggacccagcugcccccugccuacaccaacagcuucacccggggcguguacuaccccgacaagguguuccggagcagcgugcugcacagcacccaggaccuguuccugcccuucuucagcaacgugaccugguuccacgccauccacgugagcggcaccaacggcaccaagcgguucgacaacccagugcugcccuucaacgacggcguguacuucgccagcaccgagaagucaaacaucauccggggcuggaucuucggcaccacccuggacagcaagacacagagccugcugaucgugaacaacgccaccaacguggugaucaaggugugcgaguuucaguucugcaacgaccccuuccugggcguguacuaccacaagaacaacaagagcuggauggagagcgaguuccgggucuacagcagcgcuaacaauugcaccuucgaguacgugagccagcccuuccugauggaccucgagggcaagcagggcaacuucaagaaccugcgggaguucguguucaagaacaucgauggcuacuucaagaucuacagcaagcacacccccaucaaccuggugcgggaccugccccagggauucagcgcccuggagccucugguggaccugcccaucggcaucaacaucaccagguuccagacccugcuggcccugcaccggagcuaccugacccccggcgacagcagcagcggcuggaccgccggcgccgccgcauacuacgugggcuaccugcagccacggaccuuccugcugaaguacaacgagaacggcaccaucaccgacgccguggacugcgcccuggacccccugagcgagaccaagugcacccuaaagagcuucaccguggagaagggcaucuaccagaccagcaacuuccgggugcagcccacugagagcaucgugcgguuccccaacauuaccaaccugugucccuucggcgagguguucaacgccacccgguucgccagcguguacgccuggaaccggaagcggaucagcaacugcguggccgacuacagcgugcuguacaacagcgccagcuucagcaccuucaagugcuacggcgugagcccuaccaagcugaacgaccugugcuucaccaacguguacgcugacagcuucgugauccggggcgacgaggugcggcagaucgcccccggccagaccggcaagaucgccgacuacaacuacaagcugcccgacgacuucaccggcugcgugaucgccuggaacagcaacaaccuggacagcaaggugggcggcaacuacaacuaccuguaccggcuguuccguaagagcaaccugaagccauucgagcgggacaucagcaccgagaucuaccaggccggcagcacccccugcaacgguguggagggcuuuaacugcuacuucccccugcagagcuacggcuuccagcccaccaacggcgugggcuaccagcccuaccgggugguggugcugagcuucgagcugcugcacgcccccgccaccgugugcggcccuaaaaagagcaccaaccuggugaagaacaagugcgugaacuucaauuucaacggccugaccggcaccggcgugcugaccgagagcaacaagaaguuccugcccuuccagcaguucggccgggauaucgccgacaccaccgacgcagugcgggacccccagacccuggagauccuggacaucaccccaugcagcuucggcggcgugagcgucaucacccccggcacaaacaccagcaaccagguggccgugcuguaccagggagugaacugcaccgaggugcccguggccauccacgccgaccagcugacccccaccuggcggguguacagcaccggcagcaacguguuccagacccgggccggcugccugaucggcgccgagcacgugaacaacuccuacgagugcgacauccccaucggcgcuggcaucugcgccagcuaccagacccagaccaacagcccccggcgggcccggagcguggccagccagagcgugaucgccuacaccaugagcuuaggcgccgagaacagcguggccuacagcaacaacagcaucgcgaucccuaccaacuucaccaucagcgugaccaccgagauccugcccgugagcaugaccaagaccagcguggacuguaccauguacauaugcggcgacagcaccgagugcagcaaccugcugcugcaguacggcagcuucugcacccagcugaaccgggcccugaccggcaucgccguggagcaggacaagaacacccaagagguguucgcccaggugaagcagaucuacaagacucccccaaucaaggacuucggcggcuucaacuucagccagauccugcccgaccccagcaagcccagcaagcggagcuucaucgaggaccugcuguucaacaaggugacccuggccgacgccggcuucaucaagcaguacggcgacugccugggggauaucgccgcucgggaccugaucugcgcccagaaguucaacggccugaccgugcugcccccucugcugaccgacgagaugaucgcccaguacaccagcgcccugcuugccggcaccaucaccagcggcuggaccuucggcgccggcgcagcccugcagauccccuucgccaugcagauggccuaccgguucaacggcaucggcgugacccagaacgugcuguacgagaaccagaagcugaucgccaaccaguucaacagcgccaucggcaagauccaggacagccugagcagcaccgccagcgcccugggcaagcugcaggacguggugaaccagaacgcucaggcccugaacacccuggugaagcagcugagcagcaacuucggcgccaucagcucagugcugaaugacauccugagcaggcuggacaagguggaggccgaggugcagaucgaccggcugaucaccggccggcugcagagccugcagaccuacgugacccagcagcugauccgggccgccgagauccgggccagcgccaaccuggcagccaccaagaugagcgagugcgugcugggccagagcaagcggguggacuuuugcggcaagggcuaccaccugaugagcuucccccagagcgccccacacggcguggucuuccuccacgugacauacgugcccgcccaggagaagaacuucaccaccgcccccgccaucugccacgacggcaaggcucacuucccccgggagggaguguucgugagcaacggcacccacugguucgugacccagcggaacuucuacgagccccagauuaucaccaccgacaacaccuucgugagcggcaacugcgacguggugaucggcaucgugaacaacaccguguacgacccccugcagccugagcuggacagcuucaaggaggagcuggacaaguacuucaagaaccacaccagccccgacguggaucugggcgacaucagcggcaucaacgccagcguggugaacauccagaaggagaucgaccggcugaacgagguggccaagaaccugaacgagagccugaucgaccugcaggagcugggcaaguacgagcaguacaucaaguggcccugguacaucuggcugggcuucaucgccggccugaucgccaucgugauggugaccaucaugcugugcugcaugaccagcugcuguagcugccugaagggcugcugcagcugcggcagcugcugcaaguucgacgaggacgacagcgagccagugcugaagggcgugaagcugcacuacaccugaggacuaguguccaccugucccuccugggcugcuggauugucucguuuuccugccaaauaaacaggaucagcgcuuuacagaucuaaaaaaaaaaaaaaaaaaaaaaaaaaaaaaaaaaaaaaaaaaaaaaaaaaaaaaaaaaaaaaaaaaaaaaaaaaaaaaaaaaaaaaaaaaaaaaaaaaaa

SEQ ID NO: 25232 - RNA, 4105 nt, Artificial Sequence
  SARS-CoV-2/Wuhan/WIV05/2019__EPI_ISL_402128 spike protein mRNA gc (1-1273)(D614G_M1229I)
aggagacccgugacccggaaguuguacggcuacgcgacuuucccucccacaaacccucgcgcccuuccuuuccuacuugggcccggcagaaagcuuaccauguucguguuccuggugcugcugccccuggugagcagccagugcgugaaccugaccacccggacccagcugcccccugccuacaccaacagcuucacccggggcguguacuaccccgacaagguguuccggagcagcgugcugcacagcacccaggaccuguuccugcccuucuucagcaacgugaccugguuccacgccauccacgugagcggcaccaacggcaccaagcgguucgacaacccagugcugcccuucaacgacggcguguacuucgccagcaccgagaagucaaacaucauccggggcuggaucuucggcaccacccuggacagcaagacacagagccugcugaucgugaacaacgccaccaacguggugaucaaggugugcgaguuucaguucugcaacgaccccuuccugggcguguacuaccacaagaacaacaagagcuggauggagagcgaguuccgggucuacagcagcgcuaacaauugcaccuucgaguacgugagccagcccuuccugauggaccucgagggcaagcagggcaacuucaagaaccugcgggaguucguguucaagaacaucgauggcuacuucaagaucuacagcaagcacacccccaucaaccuggugcgggaccugccccagggauucagcgcccuggagccucugguggaccugcccaucggcaucaacaucaccagguuccagacccugcuggcccugcaccggagcuaccugacccccggcgacagcagcagcggcuggaccgccggcgccgccgcauacuacgugggcuaccugcagccacggaccuuccugcugaaguacaacgagaacggcaccaucaccgacgccguggacugcgcccuggacccccugagcgagaccaagugcacccuaaagagcuucaccguggagaagggcaucuaccagaccagcaacuuccgggugcagcccacugagagcaucgugcgguuccccaacauuaccaaccugugucccuucggcgagguguucaacgccacccgguucgccagcguguacgccuggaaccggaagcggaucagcaacugcguggccgacuacagcgugcuguacaacagcgccagcuucagcaccuucaagugcuacggcgugagcccuaccaagcugaacgaccugugcuucaccaacguguacgcugacagcuucgugauccggggcgacgaggugcggcagaucgcccccggccagaccggcaagaucgccgacuacaacuacaagcugcccgacgacuucaccggcugcgugaucgccuggaacagcaacaaccuggacagcaaggugggcggcaacuacaacuaccuguaccggcuguuccguaagagcaaccugaagccauucgagcgggacaucagcaccgagaucuaccaggccggcagcacccccugcaacgguguggagggcuuuaacugcuacuucccccugcagagcuacggcuuccagcccaccaacggcgugggcuaccagcccuaccgggugguggugcugagcuucgagcugcugcacgcccccgccaccgugugcggcccuaaaaagagcaccaaccuggugaagaacaagugcgugaacuucaauuucaacggccugaccggcaccggcgugcugaccgagagcaacaagaaguuccugcccuuccagcaguucggccgggauaucgccgacaccaccgacgcagugcgggacccccagacccuggagauccuggacaucaccccaugcagcuucggcggcgugagcgucaucacccccggcacaaacaccagcaaccagguggccgugcuguaccagggagugaacugcaccgaggugcccguggccauccacgccgaccagcugacccccaccuggcggguguacagcaccggcagcaacguguuccagacccgggccggcugccugaucggcgccgagcacgugaacaacuccuacgagugcgacauccccaucggcgcuggcaucugcgccagcuaccagacccagaccaacagcccccggcgggcccggagcguggccagccagagcaucaucgccuacaccaugagcuuaggcgccgagaacagcguggccuacagcaacaacagcaucgcgaucccuaccaacuucaccaucagcgugaccaccgagauacugcccgugagcaugaccaagaccagcguggacuguaccauguacaucugcggcgacagcaccgagugcagcaaccugcugcugcaguacggcagcuucugcacccagcugaaccgggcccugaccggcaucgccguggagcaggacaagaacacccaagagguguucgcccaggugaagcagaucuacaagacucccccaaucaaggacuucggcggcuucaacuucagccagauccugcccgaccccagcaagcccagcaagcggagcuucaucgaggaccugcuguucaacaaggugacccuggccgacgccggcuucaucaagcaguacggcgacugccugggggauaucgccgcucgggaccugaucugcgcccagaaguucaacggccugaccgugcugcccccucugcugaccgacgagaugaucgcccaguacaccagcgcccugcuugccggcaccaucaccagcggcuggaccuucggcgccggcgcagcccugcagauccccuucgccaugcagauggccuaccgguucaacggcaucggcgugacccagaacgugcuguacgagaaccagaagcugaucgccaaccaguucaacagcgccaucggcaagauccaggacagccugagcagcaccgccagcgcccugggcaagcugcaggacguggugaaccagaacgcucaggcccugaacacccuggugaagcagcugagcagcaacuucggcgccaucagcucagugcugaaugacauccugagcaggcuggacaagguggaggccgaggugcagaucgaccggcugaucaccggccggcugcagagccugcagaccuacgugacccagcagcugauccgggccgccgagauccgggccagcgccaaccuggcagccaccaagaugagcgagugcgugcugggccagagcaagcggguggacuuuugcggcaagggcuaccaccugaugagcuucccccagagcgccccacacggcgugguguuccuccacgucacauacgugcccgcccaggagaagaacuucaccaccgcccccgccauuugccacgacggcaaggcucacuucccccgggagggaguguucgugagcaacggcacccacugguucgugacccagcggaacuucuacgagccccagaucaucaccaccgacaacaccuucgugagcggcaacugcgacguggugaucggcaucgugaacaacaccguguacgacccccugcagccugagcuggacagcuucaaggaggagcuggacaaguacuucaagaaccacaccagccccgacguggaucugggcgacaucagcggcaucaacgccagcguggugaacauccagaaggagaucgaccggcugaacgagguggccaagaaccugaacgagagccugaucgaccugcaggagcugggcaaguacgagcaguacaucaaguggcccugguacaucuggcugggcuucaucgccggccugaucgccaucgugaucgugaccaucaugcugugcugcaugaccagcugcuguagcugccugaagggcugcugcagcugcggcagcugcugcaaguucgacgaggacgacagcgagccagugcugaagggcgugaagcugcacuacaccugaggacuaguguccaccugucccuccugggcugcuggauugucucguuuuccugccaaauaaacaggaucagcgcuuuacagaucuaaaaaaaaaaaaaaaaaaaaaaaaaaaaaaaaaaaaaaaaaaaaaaaaaaaaaaaaaaaaaaaaaaaaaaaaaaaaaaaaaaaaaaaaaaaaaaaaaaaa

SEQ ID NO: 25233 - RNA, 4099 nt, Artificial Sequence
  SARS-CoV-2/Wuhan/WIV05/2019__EPI_ISL_402128 spike protein mRNA gc (1-1273)(H69del_V70del_A222V_Y453F_S477N_D614G_I692V)
aggagacccgugacccggaaguuguacggcuacgcgacuuucccucccacaaacccucgcgcccuuccuuuccuacuugggcccggcagaaagcuuaccauguucguguuccuggugcugcugccccuggugagcagccagugcgugaaccugaccacccggacccagcugcccccugccuacaccaacagcuucacccggggcguguacuaccccgacaagguguuccggagcagcgugcugcacagcacccaggaccuguuccugcccuucuucagcaacgugaccugguuccacgccaucagcggcaccaacggcaccaagcgguucgacaacccagugcugcccuucaacgacggcguguacuucgccagcaccgagaagucaaacaucauccggggcuggaucuucggcaccacccuggacagcaagacacagagccugcugaucgugaacaacgccaccaacguggugaucaaggugugcgaguuucaguucugcaacgaccccuuccugggcguguacuaccacaagaacaacaagagcuggauggagagcgaguuccggguguacagcagcgcuaacaauugcaccuucgaguacgucagccagcccuuccugauggaccucgagggcaagcagggcaacuucaagaaccugcgggaguucguguucaagaacaucgauggcuacuucaagaucuacagcaagcacacccccaucaaccuggugcgggaccugccccagggauucagcgugcuggagccucugguggaccugcccaucggcaucaacaucaccagguuccagacccugcuggcccugcaccggagcuaccugacccccggcgacagcagcagcggcuggaccgccggcgccgccgccuacuacgugggcuaccugcagccacggaccuuccugcugaaguacaacgagaacggcaccaucaccgacgcaguggacugcgcccuggacccccugagcgagaccaagugcacccuaaagagcuucaccguggagaagggcaucuaccagaccagcaacuuccgggugcagcccacugagagcaucgugcgguuccccaacauuaccaaccugugucccuucggcgagguguucaacgccacccgguucgccagcguguacgccuggaaccggaagcggaucagcaacugcguggccgacuacagcgugcuguacaacagcgccagcuucagcaccuucaagugcuacggcgugagcccuaccaagcugaacgaccugugcuucaccaacguguacgccgacagcuucgugauccggggcgacgaggugcggcagaucgcucccggccagaccggcaagaucgccgacuacaacuacaagcugcccgacgacuucaccggcugcgugaucgccuggaacagcaacaaccuggacagcaaggugggcggcaacuacaacuaccuguuccggcuguuccguaagagcaaccugaagccauuugagcgggacaucagcaccgagaucuaccaggccggcaacacccccugcaacgguguggagggcuucaacugcuacuucccccugcagagcuacggcuuccagcccaccaacggcgugggcuaccagcccuaccgggugguggugcugagcuucgagcugcugcacgcccccgccaccgugugcggcccuaaaaagagcaccaaccuggugaagaacaagugcgugaauuucaacuucaacggccugaccggcaccggcgugcugaccgagagcaacaagaaguuccugcccuuccagcaguucggccgggauaucgccgacaccaccgacgccgugcgggacccccagacccuggagauccuggacaucaccccaugcagcuucggcggcgugagcgucaucacccccggcacaaacaccagcaaccagguggcagugcuguaccagggagugaacugcaccgaggugcccguggccauccacgccgaccagcugacccccaccuggcggguguacagcaccggcagcaacguguuccagacccgggccggcugccugaucggcgccgagcacgugaacaacagcuacgagugcgacauccccaucggcgccggcaucugcgcuuccuaccagacccagaccaacagcccccggcgggcccggagcguggccagccagagcgugaucgccuacaccaugagcuuaggcgccgagaacagcguggccuacagcaacaacagcaucgccaucccuaccaacuucaccaucagcgugaccaccgagauccugcccgugagcaugaccaagaccagcguggacuguaccauguacauaugcggcgacagcaccgagugcagcaaccugcugcugcaguacggcagcuucugcacccagcugaaccgggcgcugaccggcaucgccguggagcaggacaagaacacccaagagguguucgcccaggugaagcagaucuacaagacucccccaaucaaggacuucggcggcuucaacuucagccagauccugcccgaccccagcaagcccagcaagcggagcuucaucgaggaccugcuguucaacaaggugacccuggccgacgccggcuucaucaagcaguacggcgacugccugggggauaucgccgcccgggaccugaucugcgcucagaaguucaacggccugaccgugcugcccccucugcugaccgacgagaugaucgcccaguacaccagcgcccugcuugccggcaccaucaccagcggcuggaccuucggcgccggcgccgcacugcagauccccuucgccaugcagauggccuaccgguucaacggcaucggcgugacccagaacgugcuguacgagaaccagaagcugaucgccaaccaguucaacagcgccaucggcaagauccaggacagccugagcagcaccgccagcgcccugggcaagcugcaggacguggugaaccagaacgcccaggcucugaacacccuggugaagcagcugagcagcaauuuuggcgccaucagcagcgugcugaacgacauccugucaaggcuggacaagguggaggccgaggugcagaucgaccggcugaucaccggccggcugcagagccugcagaccuacgugacccagcagcugauccgggccgccgagauccgggccagcgccaaccuggccgcaaccaagaugagcgagugcgugcugggccagagcaagcggguggacuucugcggcaagggcuaccaccugaugagcuucccccagagcgccccacacggcguggucuuccuccacgugacauacgugcccgcccaggagaagaacuucaccaccgcccccgccaucugccacgacggcaaggcccacuucccccgggagggaguguucgugagcaacggcacccacugguucgugacccagcggaacuucuacgagccccagauuaucaccaccgacaacaccuucgugagcggcaacugcgacguggugaucggcaucgugaacaacaccguguacgacccccugcagccugagcuggacagcuucaaggaggagcuggacaaguacuucaagaaccacaccagccccgacguggaucugggcgacaucagcggcaucaacgcuagcguggugaacauccagaaggagaucgaccggcugaacgagguggccaagaaccugaacgagagccugaucgaccugcaggagcugggcaaguacgagcaguacaucaaguggcccugguacaucuggcugggcuucaucgccggccugaucgccaucgugauggugaccaucaugcugugcugcaugaccagcugcuguagcugccugaagggcugcugcagcugcggcagcugcugcaaguucgacgaggacgacagcgagccagugcugaagggcgugaagcugcacuacaccugaggacuaguguccaccugucccuccugggcugcuggauugucucguuuuccugccaaauaaacaggaucagcgcuuuacagaucuaaaaaaaaaaaaaaaaaaaaaaaaaaaaaaaaaaaaaaaaaaaaaaaaaaaaaaaaaaaaaaaaaaaaaaaaaaaaaaaaaaaaaaaaaaaaaaaaaaaa

SEQ ID NO: 25234 - RNA, 4099 nt, Artificial Sequence
  SARS-CoV-2/Wuhan/WIV05/2019__EPI_ISL_402128 spike protein mRNA gc (1-1273)(H69del_V70del_Y453F_D614G_I692V_M1229I)
aggagacccgugacccggaaguuguacggcuacgcgacuuucccucccacaaacccucgcgcccuuccuuuccuacuugggcccggcagaaagcuuaccauguucguguuccuggugcugcugccccuggugagcagccagugcgugaaccugaccacccggacccagcugcccccugccuacaccaacagcuucacccggggcguguacuaccccgacaagguguuccggagcagcgugcugcacagcacccaggaccuguuccugcccuucuucagcaacgugaccugguuccacgccaucagcggcaccaacggcaccaagcgguucgacaacccagugcugcccuucaacgacggcguguacuucgccagcaccgagaagucaaacaucauccggggcuggaucuucggcaccacccuggacagcaagacacagagccugcugaucgugaacaacgccaccaacguggugaucaaggugugcgaguuucaguucugcaacgaccccuuccugggcguguacuaccacaagaacaacaagagcuggauggagagcgaguuccggguguacagcagcgcuaacaauugcaccuucgaguacgucagccagcccuuccugauggaccucgagggcaagcagggcaacuucaagaaccugcgggaguucguguucaagaacaucgauggcuacuucaagaucuacagcaagcacacccccaucaaccuggugcgggaccugccccagggauucagcgcccuggagccucugguggaccugcccaucggcaucaacaucaccagguuccagacccugcuggcccugcaccggagcuaccugacccccggcgacagcagcagcggcuggaccgccggcgccgccgcauacuacgugggcuaccugcagccacggaccuuccugcugaaguacaacgagaacggcaccaucaccgacgccguggacugcgcccuggacccccugagcgagaccaagugcacccuaaagagcuucaccguggagaagggcaucuaccagaccagcaacuuccgggugcagcccacugagagcaucgugcgguuccccaacauuaccaaccugugucccuucggcgagguguucaacgccacccgguucgccagcguguacgccuggaaccggaagcggaucagcaacugcguggccgacuacagcgugcuguacaacagcgccagcuucagcaccuucaagugcuacggcgugagcccuaccaagcugaacgaccugugcuucaccaacguguacgcugacagcuucgugauccggggcgacgaggugcggcagaucgcccccggccagaccggcaagaucgccgacuacaacuacaagcugcccgacgacuucaccggcugcgugaucgccuggaacagcaacaaccuggacagcaaggugggcggcaacuacaacuaccuguuccggcuguuccguaagagcaaccugaagccauuugagcgggacaucagcaccgagaucuaccaggccggcagcacccccugcaacgguguggagggcuucaacugcuacuucccccugcagagcuacggcuuccagcccaccaacggcgugggcuaccagcccuaccgggugguggugcugagcuucgagcugcugcacgcccccgccaccgugugcggcccuaaaaagagcaccaaccuggugaagaacaagugcgugaacuucaauuucaacggccugaccggcaccggcgugcugaccgagagcaacaagaaguuccugcccuuccagcaguucggccgggauaucgccgacaccaccgacgcagugcgggacccccagacccuggagauccuggacaucaccccaugcagcuucggcggcgugagcgugaucacccccggcacaaacaccagcaaccaggucgccgugcuguaccagggagugaacugcaccgaggugcccguggccauccacgccgaccagcugacccccaccuggcggguguacagcaccggcagcaacguguuccagacccgggccggcugccugaucggcgccgagcacgugaacaacuccuacgagugcgacauccccaucggcgcuggcaucugcgccagcuaccagacccagaccaacagcccccggcgggcccggagcguggccagccagagcgugaucgccuacaccaugagcuuaggcgccgagaacagcguggccuacagcaacaacagcaucgcgaucccuaccaacuucaccaucagcgugaccaccgagauccugcccgugagcaugaccaagaccagcguggacuguaccauguacauaugcggcgacagcaccgagugcagcaaccugcugcugcaguacggcagcuucugcacccagcugaaccgggcccugaccggcaucgccguggagcaggacaagaacacccaagagguguucgcccaggugaagcagaucuacaagacucccccaaucaaggacuucggcggcuucaacuucagccagauccugcccgaccccagcaagcccagcaagcggagcuucaucgaggaccugcuguucaacaaggugacccuggccgacgccggcuucaucaagcaguacggcgacugccugggggauaucgccgcucgggaccugaucugcgcccagaaguucaacggccugaccgugcugcccccucugcugaccgacgagaugaucgcccaguacaccagcgcccugcuugccggcaccaucaccagcggcuggaccuucggcgccggcgcagcccugcagauccccuucgccaugcagauggccuaccgguucaacggcaucggcgugacccagaacgugcuguacgagaaccagaagcugaucgccaaccaguucaacagcgccaucggcaagauccaggacagccugagcagcaccgccagcgcccugggcaagcugcaggacguggugaaccagaacgcucaggcccugaacacccuggugaagcagcugagcagcaacuuuggcgccaucagcucagugcugaaugacauccugagcaggcuggacaagguggaggccgaggugcagaucgaccggcugaucaccggccggcugcagagccugcagaccuacgugacccagcagcugauccgggccgccgagauccgggccagcgccaaccuggcagccaccaagaugagcgagugcgugcugggccagagcaagcggguggacuucugcggcaagggcuaccaccugaugagcuucccccagagcgccccacacggcgugguguuccuccacgucacauacgugcccgcccaggagaagaacuucaccaccgcccccgccaucugccacgacggcaaggcucacuucccccgggagggaguguucgugagcaacggcacccacugguucgugacccagcggaacuucuacgagccccagauuaucaccaccgacaacaccuucgugagcggcaacugcgacguggugaucggcaucgugaacaacaccguguacgacccccugcagccugagcuggacagcuucaaggaggagcuggacaaguacuucaagaaccacaccagccccgacguggaucugggcgacaucagcggcaucaacgccagcguggugaacauccagaaggagaucgaccggcugaacgagguggccaagaaccugaacgagagccugaucgaccugcaggagcugggcaaguacgagcaguacaucaaguggcccugguacaucuggcugggcuucaucgccggccugaucgccaucgugaucgugaccaucaugcugugcugcaugaccagcugcuguagcugccugaagggcugcugcagcugcggcagcugcugcaaguucgacgaggacgacagcgagccagugcugaagggcgugaagcugcacuacaccugaggacuaguguccaccugucccuccugggcugcuggauugucucguuuuccugccaaauaaacaggaucagcgcuuuacagaucuaaaaaaaaaaaaaaaaaaaaaaaaaaaaaaaaaaaaaaaaaaaaaaaaaaaaaaaaaaaaaaaaaaaaaaaaaaaaaaaaaaaaaaaaaaaaaaaaaaaa

SEQ ID NO: 25235 - RNA, 4096 nt, Artificial Sequence
  SARS-CoV-2/Wuhan/WIV05/2019__EPI_ISL_402128 spike protein mRNA gc (1-1273)(H69del_V70del_Y144del_N501Y_A570D_D614G_P681H_T716I_S982 A_D1118H)
aggagacccgugacccggaaguuguacggcuacgcgacuuucccucccacaaacccucgcgcccuuccuuuccuacuugggcccggcagaaagcuuaccauguucguguuccuggugcugcugccccuggugagcagccagugcgugaaccugaccacccggacccagcugcccccugccuacaccaacagcuucacccggggcguguacuaccccgacaagguguuccggagcagcgugcugcacagcacccaggaccuguuccugcccuucuucagcaacgugaccugguuccacgccaucagcggcaccaacggcaccaagcgguucgacaacccagugcugcccuucaacgacggcguguacuucgccagcaccgagaagucaaacaucauccggggcuggaucuucggcaccacccuggacagcaagacacagagccugcugaucgugaacaacgccaccaacguggugaucaaggugugcgaguuucaguucugcaacgaccccuuccugggcguguaccacaagaacaacaagagcuggauggagagcgaguuccggguguacagcagcgcuaacaauugcaccuucgaguacgucagccagcccuuccugauggaccucgagggcaagcagggcaacuucaagaaccugcgggaguucguguucaagaacaucgauggcuacuucaagaucuacagcaagcacacccccaucaaccuggugcgggaccugccccagggauucagcgcccuggagccucugguggaccugcccaucggcaucaacaucaccagguuccagacccugcuggcccugcaccggagcuaccugacccccggcgacagcagcagcggcuggaccgccggcgccgccgcauacuacgugggcuaccugcagccacggaccuuccugcugaaguacaacgagaacggcaccaucaccgacgccguggacugcgcccuggacccccugagcgagaccaagugcacccuaaagagcuucaccguggagaagggcaucuaccagaccagcaacuuccgggugcagcccacugagagcaucgugcgguuccccaacauuaccaaccugugucccuucggcgagguguucaacgccacccgguucgccagcguguacgccuggaaccggaagcggaucagcaacugcguggccgacuacagcgugcuguacaacagcgccagcuucagcaccuucaagugcuacggcgugagcccuaccaagcugaacgaccugugcuucaccaacguguacgcugacagcuucgugauccggggcgacgaggugcggcagaucgcccccggccagaccggcaagaucgccgacuacaacuacaagcugcccgacgacuucaccggcugcgugaucgccuggaacagcaacaaccuggacagcaaggugggcggcaacuacaacuaccuguaccggcuguuccguaagagcaaccugaagccauucgagcgggacaucagcaccgagaucuaccaggccggcagcacccccugcaacgguguggagggcuuuaacugcuacuucccccugcagagcuacggcuuccagcccaccuacggcgugggcuaccagcccuaccgggugguggugcugagcuucgagcugcugcacgcccccgccaccgugugcggcccuaaaaagagcaccaaccuggugaagaacaagugcgugaacuucaacuucaauggccugaccggcaccggcgugcugaccgagagcaacaagaaguuccugcccuuccagcaguucggccgggauaucgacgacaccaccgacgccgugcgggacccccagacccuggagauccuggacaucaccccaugcagcuucggcggcgugagcgugaucacccccggcacaaacaccagcaaccaggucgcagugcuguaccagggagugaacugcaccgaggugcccguggccauccacgccgaccagcugacccccaccuggcggguguacagcaccggcagcaacguguuccagacccgggccggcugccugaucggcgccgagcacgugaacaacuccuacgagugcgacauccccaucggcgccggcaucugcgcuagcuaccagacccagaccaacagccaccggcgggcccggagcguggccagccagagcaucaucgccuacaccaugagcuuaggcgccgagaacagcguggccuacagcaacaacagcaucgccauccccaucaacuucaccauaagcgugaccaccgagauccugccugugagcaugaccaagaccagcguggacuguaccauguacaucugcggcgacagcaccgagugcagcaaccugcugcugcaguacggcagcuucugcacccagcugaaccgggcgcugaccggcaucgccguggagcaggacaagaacacccaagagguguucgcccaggugaagcagaucuacaagaccccacccaucaaggacuucggcggcuucaacuucagccagauccugcccgaccccagcaagcccagcaagcggagcuucaucgaggaccugcuguucaacaaggugacucuggccgacgccggcuucaucaagcaguacggcgauugccugggggacaucgccgcccgggaccugaucugcgcucagaaguucaacggccugaccgugcugccuccccugcugaccgacgagaugaucgcccaguacaccagcgcccugcuugccggcaccaucaccagcggcuggaccuucggcgccggcgccgcacugcagauccccuucgccaugcagauggccuaccgguucaacggcaucggcgugacccagaacgugcuguacgagaaccagaagcugaucgccaaccaguucaacagcgccaucggcaagauccaggacagccugagcagcaccgccagcgcccugggcaagcugcaggacguggugaaccagaacgcccaggcucugaacacccuggugaagcagcugagcagcaacuucggcgccaucagcucagugcugaacgacauccuggccaggcuggacaagguggaggccgaggugcagaucgaccggcugaucaccggccggcugcagagccugcagaccuacgugacccagcagcugauccgggccgccgagauucgggccagcgccaaucuggcagccaccaagaugagcgagugcgugcugggccagagcaagcggguggacuuuugcggcaagggcuaccaccugaugagcuucccccagagcgcuccccacggcgugguguuccuccacgugaccuacgucccagcccaggagaagaacuucacaaccgcccccgccaucugccacgacggcaaggcccacuucccccgggagggaguguucgugagcaacggcacccacugguucgugacccagcggaacuucuacgagccccagaucaucaccacccacaacaccuucgugagcggcaacugcgacguggugaucggcaucgugaacaacaccguguacgacccccugcagcccgagcuggacagcuucaaggaggagcuggacaaguacuucaagaaccacaccagcccugacguggaucugggcgacaucagcggcaucaacgccagcguggugaacauccagaaggagaucgaccggcugaacgagguggccaagaaccugaacgagagccugaucgaccugcaggagcugggcaaguacgagcaguacaucaaguggcccugguacaucuggcugggcuucaucgccggccugaucgccaucgugauggugaccaucaugcugugcugcaugaccagcugcuguagcugccugaagggcugcugcagcugcggcagcugcugcaaguucgacgaggacgacagcgagcccgugcugaagggcgugaagcugcacuacaccugaggacuaguguccaccugucccuccugggcugcuggauugucucguuuuccugccaaauaaacaggaucagcgcuuuacagaucuaaaaaaaaaaaaaaaaaaaaaaaaaaaaaaaaaaaaaaaaaaaaaaaaaaaaaaaaaaaaaaaaaaaaaaaaaaaaaaaaaaaaaaaaaaaaaaaaaaaa

SEQ ID NO: 25236 - RNA, 4105 nt, Artificial Sequence
  SARS-CoV-2/Wuhan/WIV05/2019__EPI_ISL_402128 spike protein mRNA gc (1-1273)(K417N_E484K_N501Y_D614G)
aggagacccgugacccggaaguuguacggcuacgcgacuuucccucccacaaacccucgcgcccuuccuuuccuacuugggcccggcagaaagcuuaccauguucguguuccuggugcugcugccccuggugagcagccagugcgugaaccugaccacccggacccagcugcccccugccuacaccaacagcuucacccggggcguguacuaccccgacaagguguuccggagcagcgugcugcacagcacccaggaccuguuccugcccuucuucagcaacgugaccugguuccacgccauccacgugagcggcaccaacggcaccaagcgguucgacaacccagugcugcccuucaacgacggcguguacuucgccagcaccgagaagucaaacaucauccggggcuggaucuucggcaccacccuggacagcaagacacagagccugcugaucgugaacaacgccaccaacguggugaucaaggugugcgaguuucaguucugcaacgaccccuuccugggcguguacuaccacaagaacaacaagagcuggauggagagcgaguuccgggucuacagcagcgcuaacaauugcaccuucgaguacgugagccagcccuuccugauggaccucgagggcaagcagggcaacuucaagaaccugcgggaguucguguucaagaacaucgauggcuacuucaagaucuacagcaagcacacccccaucaaccuggugcgggaccugccccagggauucagcgcccuggagccucugguggaccugcccaucggcaucaacaucaccagguuccagacccugcuggcccugcaccggagcuaccugacccccggcgacagcagcagcggcuggaccgccggcgccgccgcauacuacgugggcuaccugcagccacggaccuuccugcugaaguacaacgagaacggcaccaucaccgacgccguggacugcgcccuggacccccugagcgagaccaagugcacccuaaagagcuucaccguggagaagggcaucuaccagaccagcaacuuccgggugcagcccacugagagcaucgugcgguuccccaacauuaccaaccugugucccuucggcgagguguucaacgccacccgguucgccagcguguacgccuggaaccggaagcggaucagcaacugcguggccgacuacagcgugcuguacaacagcgccagcuucagcaccuucaagugcuacggcgugagcccuaccaagcugaacgaccugugcuucaccaacguguacgcugacagcuucgugauccggggcgacgaggugcggcagaucgcccccggccagaccggcaacaucgccgacuacaacuacaagcugcccgacgacuucaccggcugcgugaucgccuggaacagcaacaaccuggacagcaaggugggcggcaacuacaacuaccuguaccggcuguuccguaagagcaaccugaagccauucgagcgggacaucagcaccgagaucuaccaggccggcagcacccccugcaacggugugaagggcuuuaacugcuacuucccccugcagagcuacggcuuccagcccaccuacggcgugggcuaccagcccuaccgggugguggugcugagcuucgagcugcugcacgcccccgccaccgugugcggcccuaaaaagagcaccaaccuggugaagaacaagugcgugaacuucaauuucaacggccugaccggcaccggcgugcugaccgagagcaacaagaaguuccugcccuuccagcaguucggccgggauaucgccgacaccaccgacgcagugcgggacccccagacccuggagauccuggacaucaccccaugcagcuucggcggcgugagcgucaucacccccggcacaaacaccagcaaccagguggccgugcuguaccagggagugaacugcaccgaggugcccguggccauccacgccgaccagcugacccccaccuggcggguguacagcaccggcagcaacguguuccagacccgggccggcugccugaucggcgccgagcacgugaacaacuccuacgagugcgacauccccaucggcgcuggcaucugcgccagcuaccagacccagaccaacagcccccggcgggcccggagcguggccagccagagcaucaucgccuacaccaugagcuuaggcgccgagaacagcguggccuacagcaacaacagcaucgcgaucccuaccaacuucaccaucagcgugaccaccgagauacugcccgugagcaugaccaagaccagcguggacuguaccauguacaucugcggcgacagcaccgagugcagcaaccugcugcugcaguacggcagcuucugcacccagcugaaccgggcccugaccggcaucgccguggagcaggacaagaacacccaagagguguucgcccaggugaagcagaucuacaagacucccccaaucaaggacuucggcggcuucaacuucagccagauccugcccgaccccagcaagcccagcaagcggagcuucaucgaggaccugcuguucaacaaggugacccuggccgacgccggcuucaucaagcaguacggcgacugccugggggauaucgccgcucgggaccugaucugcgcccagaaguucaacggccugaccgugcugcccccucugcugaccgacgagaugaucgcccaguacaccagcgcccugcuugccggcaccaucaccagcggcuggaccuucggcgccggcgcagcccugcagauccccuucgccaugcagauggccuaccgguucaacggcaucggcgugacccagaacgugcuguacgagaaccagaagcugaucgccaaccaguucaacagcgccaucggcaagauccaggacagccugagcagcaccgccagcgcccugggcaagcugcaggacguggugaaccagaacgcucaggcccugaacacccuggugaagcagcugagcagcaacuucggcgccaucagcucagugcugaaugacauccugagcaggcuggacaagguggaggccgaggugcagaucgaccggcugaucaccggccggcugcagagccugcagaccuacgugacccagcagcugauccgggccgccgagauccgggccagcgccaaccuggcagccaccaagaugagcgagugcgugcugggccagagcaagcggguggacuuuugcggcaagggcuaccaccugaugagcuucccccagagcgccccacacggcgugguguuccuccacgucacauacgugcccgcccaggagaagaacuucaccaccgcccccgccauuugccacgacggcaaggcucacuucccccgggagggaguguucgugagcaacggcacccacugguucgugacccagcggaacuucuacgagccccagaucaucaccaccgacaacaccuucgugagcggcaacugcgacguggugaucggcaucgugaacaacaccguguacgacccccugcagccugagcuggacagcuucaaggaggagcuggacaaguacuucaagaaccacaccagccccgacguggaucugggcgacaucagcggcaucaacgccagcguggugaacauccagaaggagaucgaccggcugaacgagguggccaagaaccugaacgagagccugaucgaccugcaggagcugggcaaguacgagcaguacaucaaguggcccugguacaucuggcugggcuucaucgccggccugaucgccaucgugauggugaccaucaugcugugcugcaugaccagcugcuguagcugccugaagggcugcugcagcugcggcagcugcugcaaguucgacgaggacgacagcgagccagugcugaagggcgugaagcugcacuacaccugaggacuaguguccaccugucccuccugggcugcuggauugucucguuuuccugccaaauaaacaggaucagcgcuuuacagaucuaaaaaaaaaaaaaaaaaaaaaaaaaaaaaaaaaaaaaaaaaaaaaaaaaaaaaaaaaaaaaaaaaaaaaaaaaaaaaaaaaaaaaaaaaaaaaaaaaaaa

SEQ ID NO: 25237 - RNA, 4096 nt, Artificial Sequence
  SARS-CoV-2/Wuhan/WIV05/2019__EPI_ISL_402128 spike protein mRNA gc (1-1273)(L18F_D80A_D215G_L242del_A243del_L244del_R246I_K417N_E484 K_N501Y_D614G_A701V)
aggagacccgugacccggaaguuguacggcuacgcgacuuucccucccacaaacccucgcgcccuuccuuuccuacuugggcccggcagaaagcuuaccauguucguguuccuggugcugcugccccuggugagcagccagugcgugaacuucaccacccggacccagcugcccccugccuacaccaacagcuucacccggggcguguacuaccccgacaagguguuccggagcagcgugcugcacagcacccaggaccuguuccugcccuucuucagcaacgugaccugguuccacgccauccacgugagcggcaccaacggcaccaagcgguucgccaacccagugcugcccuucaacgacggcguguacuucgccagcaccgagaagucaaacaucauccggggcuggaucuuuggcaccacccuggacagcaagacacagagccugcugaucgugaacaacgcuaccaacguggugaucaaggugugcgaguuccaguucugcaacgaccccuuccugggcguguacuaccacaagaacaacaagagcuggauggagagcgaguuccgggucuacagcagcgccaacaauugcaccuucgaguacgugagccagcccuuccugauggaccuggagggcaagcagggcaacuucaagaaccuccgggaguucguguucaagaacaucgacggcuacuucaagaucuacagcaagcacacccccaucaaccuggugcggggacugccccagggcuucagcgcccuggagccucugguggaucugcccaucggcaucaacaucaccagguuccagacccugcacaucagcuaccugacccccggcgacagcagcagcggcuggaccgccggcgccgccgcauacuacgugggcuaccugcagccacggaccuuccugcugaaguacaacgagaacggcaccaucaccgacgccguggacugcgcccuggacccccugagcgagaccaagugcacccuuaagagcuucaccguggagaagggcaucuaccagaccagcaacuuccgggugcagcccacugagagcauugugcgguuccccaacaucaccaaccugugucccuucggcgagguguucaacgccacccgguucgccagcguguacgccuggaaccggaagcggaucagcaacugcguggccgacuacagcgugcuguacaacagcgccagcuucagcaccuucaagugcuacggcgugagcccuaccaagcugaacgaccugugcuucaccaacguguacgcugacagcuucgugauccggggcgacgaggugcggcagaucgcccccggccagaccggcaacaucgccgacuacaacuacaagcugcccgacgacuucaccggcugcgugaucgccuggaacagcaacaaccuggacagcaaggugggcggcaacuacaacuaccuguaccggcuauuccguaagagcaaccugaagccauuugagcgggacaucagcaccgagaucuaccaggccgguagcacccccugcaacggcgugaagggcuucaacugcuacuucccccugcagagcuacggcuuccagcccaccuacggcgugggcuaccagcccuaccgggugguggugcugagcuucgagcugcugcacgcccccgccaccgugugcggcccuaaaaagagcaccaaccuggugaagaacaagugcgugaacuucaauuucaacggccugaccggcaccggcgugcugaccgagagcaacaagaaguuccugcccuuccagcaguucggccgggacaucgccgacaccaccgaugcagugcgggacccccagacccuggagauccuggacaucaccccaugcagcuucggcggcgugagcgucaucacccccggaacaaacaccagcaaccagguggccgugcuguaccagggcgugaacugcaccgaggugcccguggccauccacgccgaccagcugacccccaccuggcggguguacagcaccggcagcaacguguuccagacccgggccggcugccugaucggcgccgagcacgugaacaacuccuacgagugcgacauccccaucggcgcuggcaucugcgccagcuaccagacccagaccaacagcccccggcgggcccggagcguggccagccagagcaucaucgccuacaccaugagccugggcguggagaacagcguggccuacagcaacaacagcaucgccaucccuaccaacuucaccauaagcgugaccaccgagauccugcccgugagcaugaccaagaccagcguggacuguaccauguacaucugcggcgacagcaccgagugcagcaaccuguuacugcaguacggcagcuucugcacccagcugaaccgggcgcugaccggcaucgccguggagcaggacaagaacacccaagagguguucgcccaggugaagcagaucuacaagacucccccaaucaaggacuucggcggcuucaacuucagccagauccugcccgaccccagcaagcccagcaagcggagcuucaucgaggaccugcuguucaacaaggugacccuggccgacgccggcuucaucaagcaguacggggacugccugggcgacaucgccgcccgggaccugaucugcgcucagaaguucaacggccugaccgugcugcccccucugcugaccgaugagaugaucgcccaguacaccagcgcccugcuggccggcaccaucaccagcggcuggaccuucggcgccggcgccgcacugcagauccccuucgccaugcagauggccuaccgguucaacggcaucggcgugacccagaacgugcuguacgagaaccagaagcugaucgccaaccaguucaacagcgccaucggcaagauccaggacagccugagcagcaccgccagcgcccugggcaagcugcaggacguggugaaccagaacgcccaggcucugaacacccuggugaagcagcugagcagcaacuuuggcgccaucagcucagugcugaaugacauccugagccggcuggacaagguggaggccgaggugcagaucgacaggcugaucaccggccggcugcagagccugcagaccuacgugacccagcagcugauccgggccgccgagauucgggccagcgccaaccuggccgcaaccaagaugagcgagugcgugcugggccagagcaagcggguggacuucugcggcaagggcuaccaccugaugagcuucccccagagcgccccacacggcguggucuuccugcacgugacauacgugcccgcccaggagaagaacuucaccaccgcccccgccaucugccacgacggaaaggcccacuucccccgggagggcguguucgugagcaacggcacccacugguucgugacccagcggaacuucuacgagccccagaucaucaccaccgacaacaccuucgugagcggcaacugcgacguggugaucggcaucgugaacaacaccguguacgacccccugcagccugagcuggacagcuucaaggaggagcucgacaaguacuucaagaaccacaccagccccgacguggaccugggcgacaucagcggcaucaacgcuagcguggugaacauccagaaggagaucgaucggcugaacgagguggccaagaaccugaacgagagccugaucgaccugcaggagcugggcaaguacgagcaguacaucaaguggcccugguacaucuggcugggcuucaucgccggccugaucgccaucgugauggugaccaucaugcugugcugcaugaccagcugcuguagcugccugaagggcugcugcagcugcggcagcugcugcaaguucgacgaggacgacagcgagccagugcugaagggcgugaagcugcacuacaccugaggacuaguguccaccugucccuccugggcugcuggauugucucguuuuccugccaaauaaacaggaucagcgcuuuacagaucuaaaaaaaaaaaaaaaaaaaaaaaaaaaaaaaaaaaaaaaaaaaaaaaaaaaaaaaaaaaaaaaaaaaaaaaaaaaaaaaaaaaaaaaaaaaaaaaaaaaa

SEQ ID NO: 25238 - RNA, 4105 nt, Artificial Sequence
  SARS-CoV-2/Wuhan/WIV05/2019__EPI_ISL_402128 spike protein mRNA gc (1-1273)(E484K_D614G)
aggagacccgugacccggaaguuguacggcuacgcgacuuucccucccacaaacccucgcgcccuuccuuuccuacuugggcccggcagaaagcuuaccauguucguguuccuggugcugcugccccuggugagcagccagugcgugaaccugaccacccggacccagcugcccccugccuacaccaacagcuucacccggggcguguacuaccccgacaagguguuccggagcagcgugcugcacagcacccaggaccuguuccugcccuucuucagcaacgugaccugguuccacgccauccacgugagcggcaccaacggcaccaagcgguucgacaacccagugcugcccuucaacgacggcguguacuucgccagcaccgagaagucaaacaucauccggggcuggaucuucggcaccacccuggacagcaagacacagagccugcugaucgugaacaacgccaccaacguggugaucaaggugugcgaguuucaguucugcaacgaccccuuccugggcguguacuaccacaagaacaacaagagcuggauggagagcgaguuccgggucuacagcagcgcuaacaauugcaccuucgaguacgugagccagcccuuccugauggaccucgagggcaagcagggcaacuucaagaaccugcgggaguucguguucaagaacaucgauggcuacuucaagaucuacagcaagcacacccccaucaaccuggugcgggaccugccccagggauucagcgcccuggagccucugguggaccugcccaucggcaucaacaucaccagguuccagacccugcuggcccugcaccggagcuaccugacccccggcgacagcagcagcggcuggaccgccggcgccgccgcauacuacgugggcuaccugcagccacggaccuuccugcugaaguacaacgagaacggcaccaucaccgacgccguggacugcgcccuggacccccugagcgagaccaagugcacccuaaagagcuucaccguggagaagggcaucuaccagaccagcaacuuccgggugcagcccacugagagcaucgugcgguuccccaacauuaccaaccugugucccuucggcgagguguucaacgccacccgguucgccagcguguacgccuggaaccggaagcggaucagcaacugcguggccgacuacagcgugcuguacaacagcgccagcuucagcaccuucaagugcuacggcgugagcccuaccaagcugaacgaccugugcuucaccaacguguacgcugacagcuucgugauccggggcgacgaggugcggcagaucgcccccggccagaccggcaagaucgccgacuacaacuacaagcugcccgacgacuucaccggcugcgugaucgccuggaacagcaacaaccuggacagcaaggugggcggcaacuacaacuaccuguaccggcuguuccguaagagcaaccugaagccauucgagcgggacaucagcaccgagaucuaccaggccggcagcacccccugcaacggugugaagggcuuuaacugcuacuucccccugcagagcuacggcuuccagcccaccaacggcgugggcuaccagcccuaccgggugguggugcugagcuucgagcugcugcacgcccccgccaccgugugcggcccuaaaaagagcaccaaccuggugaagaacaagugcgugaacuucaauuucaacggccugaccggcaccggcgugcugaccgagagcaacaagaaguuccugcccuuccagcaguucggccgggauaucgccgacaccaccgacgcagugcgggacccccagacccuggagauccuggacaucaccccaugcagcuucggcggcgugagcgucaucacccccggcacaaacaccagcaaccagguggccgugcuguaccagggagugaacugcaccgaggugcccguggccauccacgccgaccagcugacccccaccuggcggguguacagcaccggcagcaacguguuccagacccgggccggcugccugaucggcgccgagcacgugaacaacuccuacgagugcgacauccccaucggcgcuggcaucugcgccagcuaccagacccagaccaacagcccccggcgggcccggagcguggccagccagagcaucaucgccuacaccaugagcuuaggcgccgagaacagcguggccuacagcaacaacagcaucgcgaucccuaccaacuucaccaucagcgugaccaccgagauacugcccgugagcaugaccaagaccagcguggacuguaccauguacaucugcggcgacagcaccgagugcagcaaccugcugcugcaguacggcagcuucugcacccagcugaaccgggcccugaccggcaucgccguggagcaggacaagaacacccaagagguguucgcccaggugaagcagaucuacaagacucccccaaucaaggacuucggcggcuucaacuucagccagauccugcccgaccccagcaagcccagcaagcggagcuucaucgaggaccugcuguucaacaaggugacccuggccgacgccggcuucaucaagcaguacggcgacugccugggggauaucgccgcucgggaccugaucugcgcccagaaguucaacggccugaccgugcugcccccucugcugaccgacgagaugaucgcccaguacaccagcgcccugcuugccggcaccaucaccagcggcuggaccuucggcgccggcgcagcccugcagauccccuucgccaugcagauggccuaccgguucaacggcaucggcgugacccagaacgugcuguacgagaaccagaagcugaucgccaaccaguucaacagcgccaucggcaagauccaggacagccugagcagcaccgccagcgcccugggcaagcugcaggacguggugaaccagaacgcucaggcccugaacacccuggugaagcagcugagcagcaacuucggcgccaucagcucagugcugaaugacauccugagcaggcuggacaagguggaggccgaggugcagaucgaccggcugaucaccggccggcugcagagccugcagaccuacgugacccagcagcugauccgggccgccgagauccgggccagcgccaaccuggcagccaccaagaugagcgagugcgugcugggccagagcaagcggguggacuuuugcggcaagggcuaccaccugaugagcuucccccagagcgccccacacggcgugguguuccuccacgucacauacgugcccgcccaggagaagaacuucaccaccgcccccgccauuugccacgacggcaaggcucacuucccccgggagggaguguucgugagcaacggcacccacugguucgugacccagcggaacuucuacgagccccagaucaucaccaccgacaacaccuucgugagcggcaacugcgacguggugaucggcaucgugaacaacaccguguacgacccccugcagccugagcuggacagcuucaaggaggagcuggacaaguacuucaagaaccacaccagccccgacguggaucugggcgacaucagcggcaucaacgccagcguggugaacauccagaaggagaucgaccggcugaacgagguggccaagaaccugaacgagagccugaucgaccugcaggagcugggcaaguacgagcaguacaucaaguggcccugguacaucuggcugggcuucaucgccggccugaucgccaucgugauggugaccaucaugcugugcugcaugaccagcugcuguagcugccugaagggcugcugcagcugcggcagcugcugcaaguucgacgaggacgacagcgagccagugcugaagggcgugaagcugcacuacaccugaggacuaguguccaccugucccuccugggcugcuggauugucucguuuuccugccaaauaaacaggaucagcgcuuuacagaucuaaaaaaaaaaaaaaaaaaaaaaaaaaaaaaaaaaaaaaaaaaaaaaaaaaaaaaaaaaaaaaaaaaaaaaaaaaaaaaaaaaaaaaaaaaaaaaaaaaaa

SEQ ID NO: 25239 - RNA, 4105 nt, Artificial Sequence
  SARS-CoV-2/Wuhan/WIV05/2019__EPI_ISL_402128 spike protein mRNA gc (1-1273)(L18F_T20N_P26S_D138Y_R190S_K417T_E484K_N501Y_D614G_H655Y _T1027I)
aggagacccgugacccggaaguuguacggcuacgcgacuuucccucccacaaacccucgcgcccuuccuuuccuacuugggcccggcagaaagcuuaccauguucguguuccuggugcugcugccccuggugagcagccagugcgugaacuucaccaaccggacccagcugcccagcgccuacaccaacagcuucacccggggcguguacuacccugacaagguguuccggagcagcgugcugcacagcacccaggaccuguuccugcccuucuucagcaacgugaccugguuccacgccauccacgugagcggcaccaacggcaccaagcgguucgacaaccccgugcugccauucaacgacggcguguacuucgccagcaccgagaagucaaacaucauccggggcuggaucuuuggcaccacccuggacagcaagacccagagccugcugaucgugaacaacgccacaaacguggugaucaaggugugcgaguuccaguucugcaacuaccccuuccugggcguguacuaccacaagaacaacaagagcuggauggagagcgaguuccgggucuacagcagcgcuaauaacugcaccuucgaguacgugagccagcccuuccugauggaccuggagggcaagcagggcaacuucaagaaccucagcgaguucguguucaagaacaucgacggcuacuucaagaucuacagcaagcacacccccaucaaccuggugcgggaucugccccagggauucagcgcccuggagccccugguggaccugccuaucggcaucaacaucacccgguuccagacccugcuggcccugcacaggagcuaccugacccccggcgacagcagcagcggcuggaccgccggcgccgccgcauacuacgugggcuaccugcagccccggaccuuccugcugaaguacaacgagaacggcaccaucaccgacgccguggacugcgcccuggacccacugagcgagaccaagugcacccuaaagagcuucaccguggagaagggcaucuaccagaccagcaacuuccgggugcagcccaccgagagcaucgugcgguuccccaacauuacuaaccugugucccuucggcgagguguucaacgccacccgguucgccagcguguacgccuggaaccggaagcggaucagcaacugcguggccgacuacagcgugcuguacaacagcgccagcuucagcaccuucaagugcuacggcgugagccccaccaagcugaacgaccugugcuucaccaacguguacgcugacagcuucgugauccggggcgacgaggugcggcagaucgccccuggccagaccggcaccaucgccgacuacaacuacaagcugcccgacgacuucaccggcugcgugaucgccuggaacagcaacaaccuggacagcaaggugggcggcaacuacaacuaccuguaccggcuguuccguaagagcaaccugaagcccuuugagcgggacaucagcaccgagaucuaccaggccggcagcaccccaugcaacggugugaagggcuucaacugcuacuucccccugcagagcuacggcuuccagcccaccuacggcgugggcuaccagcccuaccgggugguggugcugagcuucgagcugcugcacgcccccgccaccgugugcggccccaaaaagagcaccaaccuggugaagaacaagugcgugaacuucaauuucaacggccugaccggcaccggcgugcugaccgagagcaacaagaaguuccugccuuuccagcaguucggccgggacaucgccgauaccaccgacgcagugcgggacccccagacccuggagauccuggacaucacccccugcagcuucggcggcgugagcgucaucaccccaggcacaaacaccagcaaccagguggccgugcuguaccagggagugaacugcaccgaggugcccguggccauccacgccgaccagcugacccccaccuggcggguguacuccaccggcagcaacguguuccagacccgggccggcugccugaucggcgccgaguacgugaacaacagcuacgagugcgacauccccaucggcgcuggcaucugcgccagcuaccagacccagaccaacagcccccggcgggcccggagcguggccagccagagcaucaucgccuacaccaugagccugggcgccgagaacagcguggccuacagcaacaacagcaucgcgauccccaccaacuucaccaucagcgugaccaccgagauauuaccugugagcaugaccaagaccagcguggacuguaccauguacaucugcggcgacagcaccgagugcagcaaccugcugcugcaguacggcagcuucugcacccagcugaaccgggcccugaccggcaucgccguggagcaggacaagaacacccaagagguguucgcccaggugaagcagaucuacaagacuccacccaucaaggacuucggcggcuucaacuucagccagauccugcccgaccccagcaagcccagcaagcggagcuucaucgaggaccugcuguucaacaaggugacccuggccgacgccggcuucaucaagcaguacggcgacugccugggggacaucgccgcucgggaucugaucugcgcccagaaguucaacggccugaccgugcugccuccccugcugaccgacgagaugaucgcccaguacaccagcgcccugcuggccggcaccaucaccagcggcuggaccuucggcgccggcgcagcccuucagauccccuucgccaugcagauggccuaccgguucaacggcaucggcgugacccagaacgugcuguacgagaaccagaagcugaucgccaaccaguucaacagcgccaucggcaagauccaggacagccugagcagcaccgccagcgcccugggcaagcugcaggacguggugaaccagaacgcucaggcccugaacacccuggugaagcagcugagcucaaacuuuggcgccaucagcagcgugcugaaugacauccugagccggcuggacaagguggaggccgaggugcagaucgacaggcugaucaccggccggcugcagagccugcagaccuacgugacccagcagcugauccgggccgccgagauccgggccagcgccaaccuggcagccauuaagaugagcgagugcgugcugggccagagcaagcggguggacuucugcggcaagggcuaccaccugaugagcuucccccagagcgcuccccacggcgugguguuccugcacgucaccuacgugccagcccaggagaagaacuucacaaccgcccccgccaucugccacgacggcaaggcccacuucccccgggagggaguguucgugagcaacggcacccacugguucgugacccagcggaacuucuacgagccccagaucaucaccaccgacaacaccuucgugagcggcaacugcgacguggugaucggcaucgugaacaacaccguguacgacccccuccagcccgagcuggacagcuucaaggaggagcuggacaaguacuucaagaaccacaccagcccugacguggaccugggcgauaucagcggcaucaacgccagcguggugaacauccagaaggagaucgaccggcugaacgagguggccaagaaccugaacgagagccugaucgaccugcaggagcugggcaaguacgagcaguacaucaaguggcccugguacaucuggcugggcuucaucgccggccugaucgccaucgugauggugaccaucaugcugugcugcaugaccagcugcuguagcugccugaagggcugcugcagcugcggcagcugcugcaaguucgacgaggacgacagcgagcccgugcugaagggcgugaagcugcacuacaccugaggacuaguguccaccugucccuccugggcugcuggauugucucguuuuccugccaaauaaacaggaucagcgcuuuacagaucuaaaaaaaaaaaaaaaaaaaaaaaaaaaaaaaaaaaaaaaaaaaaaaaaaaaaaaaaaaaaaaaaaaaaaaaaaaaaaaaaaaaaaaaaaaaaaaaaaaaa

SEQ ID NO: 25240 - RNA, 4105 nt, Artificial Sequence
  SARS-CoV-2/Wuhan/WIV05/2019__EPI_ISL_402128 spike protein mRNA gc (1-1273)(S13I_W152C_L452R_D614G)
aggagacccgugacccggaaguuguacggcuacgcgacuuucccucccacaaacccucgcgcccuuccuuuccuacuugggcccggcagaaagcuuaccauguucguguuccuggugcugcugccccuggugagcauccagugcgugaaccugaccacccggacccagcugcccccugccuacaccaacagcuucacccggggcguguacuaccccgacaagguguuccggagcagcgugcugcacagcacccaggaccuguuccugcccuucuucagcaacgugaccugguuccacgccauccacgugagcggcaccaacggcaccaagcgguucgacaacccagugcugcccuucaacgacggcguguacuucgccagcaccgagaagucaaacaucauccggggcuggaucuucggcaccacccuggacagcaagacacagagccugcugaucgugaacaacgccaccaacguggugaucaaggugugcgaguuucaguucugcaacgaccccuuccugggcguguacuaccacaagaacaacaagagcugcauggagagcgaguuccgggucuacagcagcgcuaacaauugcaccuucgaguacgugagccagcccuuccugauggaccucgagggcaagcagggcaacuucaagaaccugcgggaguucguguucaagaacaucgauggcuacuucaagaucuacagcaagcacacccccaucaaccuggugcgggaccugccccagggauucagcgcccuggagccucugguggaccugcccaucggcaucaacaucaccagguuccagacccugcuggcccugcaccggagcuaccugacccccggcgacagcagcagcggcuggaccgccggcgccgccgcauacuacgugggcuaccugcagccacggaccuuccugcugaaguacaacgagaacggcaccaucaccgacgccguggacugcgcccuggacccccugagcgagaccaaguguacccuaaagagcuucaccguggagaagggcaucuaccagaccagcaacuuccgggugcagcccacugagagcauugugcgguuccccaacaucaccaaccugugccccuucggcgagguguucaacgccacccgguucgccagcguguacgccuggaaccggaagcggaucagcaacugcguggccgacuacagcgugcuguacaacagcgccagcuucagcaccuucaagugcuacggcgugagcccuaccaagcugaacgaccugugcuucaccaacguguacgcugacagcuucgugauccggggcgacgaggugcggcagaucgcccccggccagaccggcaagaucgccgacuacaacuacaagcugcccgacgacuucaccggcugcgugaucgccuggaacagcaacaaccuggacagcaaggugggcggcaacuacaacuaccgguaccggcuguuccguaagagcaaccugaagccauucgagcgggacaucagcaccgagaucuaccaggccggcagcacccccugcaacgguguggagggcuuuaacugcuacuucccccugcagagcuacggcuuccagcccaccaacggcgugggcuaccagcccuaccgggugguggugcugagcuucgagcugcugcacgcccccgccaccgugugcggcccuaaaaagagcaccaaccuggugaagaacaagugcgugaacuucaauuucaacggccugaccggcaccggcgugcugaccgagagcaacaagaaguuccugcccuuccagcaguucggccgggauaucgccgacaccaccgacgcagugcgggacccccagacccuggagauccuggacaucaccccaugcagcuucggcggcgugagcgucaucacccccggcacaaacaccagcaaccagguggccgugcuguaccagggagugaacugcaccgaggugcccguggccauccacgccgaccagcugacccccaccuggcggguguacagcaccggcagcaacguguuccagacccgggccggcugccugaucggcgccgagcacgugaacaacagcuacgagugcgacauccccaucggcgcuggcaucugugccuccuaccagacccagaccaacagcccccggcgggcccggagcguggccagccagagcaucaucgccuacaccaugagccugggcgccgagaacagcguggccuacagcaacaacagcaucgcgaucccuaccaacuucaccauaagcgugaccaccgagaucuuacccgugagcaugaccaagaccagcguggacugcaccauguacaucugcggcgacagcaccgagugcagcaaccugcugcugcaguacggcagcuucugcacccagcugaaccgggcccugaccggcaucgccguggagcaggacaagaacacccaagagguguucgcccaggugaagcagaucuacaagacucccccaaucaaggacuucggcggcuucaacuucagccagauccugcccgaccccagcaagcccagcaagcggagcuucaucgaggaccugcuguucaacaaggugacccuggccgacgccggcuucaucaagcaguacggcgacugccugggggauaucgccgcucgggaccugaucugcgcccagaaguucaacggccugaccgugcugcccccucugcugaccgacgagaugaucgcccaguacaccagcgcccugcuggccggcaccaucaccagcggcuggaccuucggcgccggcgcagcccuucagauccccuucgccaugcagauggccuacagguucaacggcaucggcgugacccagaacgugcuguacgagaaccagaagcugaucgccaaccaguucaacagcgccaucggcaagauccaggacagccugagcagcaccgccagcgcccugggcaagcugcaggacguggugaaccagaacgcucaggcccugaacacccuggugaagcagcugagcagcaacuucggcgccaucagcagcgugcugaaugacauccugucacggcuggacaagguggaggccgaggugcagaucgaccggcugaucaccggccggcugcagagccugcagaccuacgugacccagcagcugauccgggccgccgagauucgggccagcgccaaccuggcagccaccaagaugagcgagugcgugcugggccagagcaagcggguggacuuuugcggcaagggcuaccaccugaugagcuucccccagagcgccccacacggcgugguguuccugcacgucacauacgugcccgcccaggagaagaacuucaccaccgcccccgccaucugccacgacggcaaggcucacuucccccgggagggaguguucgugagcaacggcacccacugguucgugacccagcggaacuucuacgagccccagaucaucaccaccgacaacaccuucgugagcggcaacugcgacguggugaucggcaucgugaacaacaccguguacgacccccuccagccugagcuggacagcuucaaggaggagcuggacaaguacuucaagaaccacaccagccccgacguggaucugggcgacaucagcggcaucaacgccagcguggugaacauccagaaggagaucgaccggcugaacgagguggccaagaaccugaacgagagccugaucgaccugcaggagcugggcaaguacgagcaguacaucaaguggcccugguacaucuggcugggcuucaucgccggccugaucgccaucgugauggugaccaucaugcugugcugcaugaccagcuguugcagcugccugaagggcugcugcagcugcggcagcugcugcaaguucgacgaggacgacagcgagccagugcugaagggcgugaagcugcacuacaccugaggacuaguguccaccugucccuccugggcugcuggauugucucguuuuccugccaaauaaacaggaucagcgcuuuacagaucuaaaaaaaaaaaaaaaaaaaaaaaaaaaaaaaaaaaaaaaaaaaaaaaaaaaaaaaaaaaaaaaaaaaaaaaaaaaaaaaaaaaaaaaaaaaaaaaaaaaa

SEQ ID NO: 25241 - RNA, 4105 nt, Artificial Sequence
  SARS-CoV-2/Wuhan/WIV05/2019__EPI_ISL_402128 spike protein mRNA gc mod (1-1273)
aggagacccgugacccggaaguuguacggcuacgcgacuuucccucccacaaacccucgcgcccuuccuuuccuacuugggcccggcagaaagcuuaccauguucguguuucuggugcugcugccccugguguccagccagugugugaaccugaccaccagaacacagcugccuccagccuacaccaacagcuucaccagaggcguguacuaccccgacaagguguucagauccagcgugcugcacucuacccaggaccuguuccugccuuucuucagcaacgugaccugguuccacgccauccacguguccggcaccaauggcaccaagagauucgacaaccccgugcugcccuucaacgacgggguguacuuugccagcaccgagaaguccaacaucaucagaggcuggaucuucggcaccacacuggacagcaagacccagagccugcugaucgugaacaacgccaccaacguggucaucaaagugugcgaguuccaguucugcaacgaccccuuccugggcgucuacuaccacaagaacaacaagagcuggauggaaagcgaguuccggguguacagcagcgccaacaacugcaccuucgaguacgugucccagccuuuccugauggaccuggaaggcaagcagggcaacuucaagaaccugcgcgaguucguguucaagaacaucgacggcuacuucaaaaucuacagcaagcacaccccuaucaaccucgugcgggaucugccucagggcuucucugcucuggaaccccugguggaucugcccaucggcaucaacaucacccgguuucagacacugcuggcccugcacagaagcuaccugacaccuggcgauagcagcagcggauggacagcuggugccgccgcuuacuaugugggcuaccugcagccuagaaccuuccugcugaaguacaacgagaacggcaccaucaccgacgccguggauugugcucuggauccucugagcgagacaaagugcacccugaaguccuucaccguggaaaagggcaucuaccagaccagcaacuuccgggugcagcccaccgaauccaucgugcgguuccccaauaucaccaaucugugccccuucggcgagguguucaaugccaccagauucgccucuguguacgccuggaaccggaagcggaucagcaauugcguggccgacuacuccgugcuguacaacuccgccagcuucagcaccuucaagugcuacggcguguccccuaccaagcugaacgaccugugcuucacaaacguguacgccgacagcuucgugauccggggagaugaagugcggcagauugccccuggacagacaggcaagaucgccgacuacaacuacaagcugcccgacgacuucaccggcugugugauugccuggaacagcaacaaccuggacuccaaagucggcggcaacuacaauuaccuguaccggcuguuccggaaguccaaucugaagcccuucgagcgggacaucagcaccgaaaucuaucaggccggcagcaccccuugcaacggcguggaaggcuucaacugcuacuucccacugcaguccuacggcuuucagcccacaaauggcgugggcuaucagcccuacagagugguggugcugagcuucgaacugcugcaugcuccugccacagugugcggcccuaagaaaagcaccaaucucgugaagaacaaaugcgugaacuucaacuucaacggccugaccggcaccggcgugcugacagagagcaacaagaaguuccugccauuccagcaguuuggccgggauaucgccgauaccacagacgccguuagagauccccagacacuggaaauccuggacaucaccccaugcagcuucggcggagugucugugaucaccccuggcaccaacaccagcaaucagguggcagugcuguaccaggacgugaacuguaccgaagugcccguggccauucacgccgaucagcugacaccuacauggcggguguacuccaccggcagcaauguguuucagaccagagccggcugucugaucggagccgagcacgugaacaauagcuacgagugcgacauccccaucggcgcuggcaucugugccagcuaccagacacagacaaacagccccagacgggcuagaagcguggccagccagagcaucauugccuacacaaugucucugggcgccgagaacagcguggccuacuccaacaacucuaucgcuauccccaccaacuucaccaucagcgugaccaccgagauccugccuguguccaugaccaagaccagcguggacugcaccauguacaucugcggcgauuccaccgagugcuccaaccugcugcugcaguacggcagcuucugcacccagcugaauagagcccugacagggaucgccguggaacaggacaagaacacccaagagguguucgcccaagugaagcaaaucuacaagaccccuccuaucaaggacuucggcggcuucaauuucagccagauucugcccgauccuagcaagcccagcaagcggagcuucaucgaggaccugcuguucaacaaagugacacuggccgacgccggcuucaucaagcaguauggcgauugucugggcgacauugccgccagggaucugauuugcgcccagaaguuuaacggacugacagugcugccuccucugcugaccgaugagaugaucgcccaguacacaucugcccugcuggccggcacaaucacaagcggcuggacauuuggagcuggcgccgcucugcagauccccuuugcuaugcagauggccuaccgguucaacggcaucggagugacccagaaugugcuguacgagaaccagaagcugaucgccaaccaguucaacagcgccaucggcaagauccaggacagccugagcagcacagcaagcgcccugggaaagcugcaggacguggucaaccagaaugcccaggcacugaacacccuggucaagcagcuguccuccaacuucggcgccaucagcucugugcugaacgauauccugagcagacuggacaaggucgaggccgaggugcagaucgacagacugaucacaggcagacugcagagccuccagacauacgugacccagcagcugaucagagccgccgagauuagagccucugccaaucuggccgccaccaagaugucugagugugugcugggccagagcaagagaguggacuuuugcggcaagggcuaccaccugaugagcuucccucagucugccccucacggcgugguguuucugcacgugacauaugugcccgcucaagagaagaauuucaccaccgcuccagccaucugccacgacggcaaagcccacuuuccuagagaaggcguguucguguccaacggcacccauugguucgugacacagcggaacuucuacgagccccagaucaucaccaccgacaacaccuucgugucuggcaacugcgacguugugaucggcauugugaacaauaccguguacgacccucugcagcccgagcuggacagcuucaaagaggaacuggacaaguacuuuaagaaccacacaagccccgacguggaccugggcgauaucagcggaaucaaugccagcgucgugaacauccagaaagagaucgaccggcugaacgagguggccaagaaucugaacgagagccugaucgaccugcaagaacuggggaaguacgagcaguacaucaaguggcccugguacaucuggcugggcuuuaucgccggacugauugccaucgugauggucacaaucaugcuguguugcaugaccagcugcuguagcugccugaagggcuguuguagcuguggcagcugcugcaaguucgacgaggacgauucugagcccgugcugaagggcgugaaacugcacuacaccugaggacuaguguccaccugucccuccugggcugcuggauugucucguuuuccugccaaauaaacaggaucagcgcuuuacagaucuaaaaaaaaaaaaaaaaaaaaaaaaaaaaaaaaaaaaaaaaaaaaaaaaaaaaaaaaaaaaaaaaaaaaaaaaaaaaaaaaaaaaaaaaaaaaaaaaaaaa

SEQ ID NO: 25242 - RNA, 4105 nt, Artificial Sequence
  SARS-CoV-2/Wuhan/WIV05/2019__EPI_ISL_402128 spike protein mRNA gc mod (1-1273)(D614G)
aggagacccgugacccggaaguuguacggcuacgcgacuuucccucccacaaacccucgcgcccuuccuuuccuacuugggcccggcagaaagcuuaccauguucguguuucuggugcugcugccccugguguccagccagugugugaaccugaccaccagaacacagcugccuccagccuacaccaacagcuucaccagaggcguguacuaccccgacaagguguucagauccagcgugcugcacucuacccaggaccuguuccugccuuucuucagcaacgugaccugguuccacgccauccacguguccggcaccaauggcaccaagagauucgacaaccccgugcugcccuucaacgacgggguguacuuugccagcaccgagaaguccaacaucaucagaggcuggaucuucggcaccacacuggacagcaagacccagagccugcugaucgugaacaacgccaccaacguggucaucaaagugugcgaguuccaguucugcaacgaccccuuccugggcgucuacuaccacaagaacaacaagagcuggauggaaagcgaguuccggguguacagcagcgccaacaacugcaccuucgaguacgugucccagccuuuccugauggaccuggaaggcaagcagggcaacuucaagaaccugcgcgaguucguguucaagaacaucgacggcuacuucaaaaucuacagcaagcacaccccuaucaaccucgugcgggaucugccucagggcuucucugcucuggaaccccugguggaucugcccaucggcaucaacaucacccgguuucagacacugcuggcccugcacagaagcuaccugacaccuggcgauagcagcagcggauggacagcuggugccgccgcuuacuaugugggcuaccugcagccuagaaccuuccugcugaaguacaacgagaacggcaccaucaccgacgccguggauugugcucuggauccucugagcgagacaaagugcacccugaaguccuucaccguggaaaagggcaucuaccagaccagcaacuuccgggugcagcccaccgaauccaucgugcgguuccccaauaucaccaaucugugccccuucggcgagguguucaaugccaccagauucgccucuguguacgccuggaaccggaagcggaucagcaauugcguggccgacuacuccgugcuguacaacuccgccagcuucagcaccuucaagugcuacggcguguccccuaccaagcugaacgaccugugcuucacaaacguguacgccgacagcuucgugauccggggagaugaagugcggcagauugccccuggacagacaggcaagaucgccgacuacaacuacaagcugcccgacgacuucaccggcugugugauugccuggaacagcaacaaccuggacuccaaagucggcggcaacuacaauuaccuguaccggcuguuccggaaguccaaucugaagcccuucgagcgggacaucagcaccgaaaucuaucaggccggcagcaccccuugcaacggcguggaaggcuucaacugcuacuucccacugcaguccuacggcuuucagcccacaaauggcgugggcuaucagcccuacagagugguggugcugagcuucgaacugcugcaugcuccugccacagugugcggcccuaagaaaagcaccaaucucgugaagaacaaaugcgugaacuucaacuucaacggccugaccggcaccggcgugcugacagagagcaacaagaaguuccugccauuccagcaguuuggccgggauaucgccgauaccacagacgccguuagagauccccagacacuggaaauccuggacaucaccccaugcagcuucggcggagugucugugaucaccccuggcaccaacaccagcaaucagguggcagugcuguaccagggcgugaacuguaccgaagugcccguggccauucacgccgaucagcugacaccuacauggcggguguacuccaccggcagcaauguguuucagaccagagccggcugucugaucggagccgagcacgugaacaauagcuacgagugcgacauccccaucggcgcuggcaucugugccagcuaccagacacagacaaacagccccagacgggcuagaagcguggccagccagagcaucauugccuacacaaugucucugggcgccgagaacagcguggccuacuccaacaacucuaucgcuauccccaccaacuucaccaucagcgugaccaccgagauccugccuguguccaugaccaagaccagcguggacugcaccauguacaucugcggcgauuccaccgagugcuccaaccugcugcugcaguacggcagcuucugcacccagcugaauagagcccugacagggaucgccguggaacaggacaagaacacccaagagguguucgcccaagugaagcaaaucuacaagaccccuccuaucaaggacuucggcggcuucaauuucagccagauucugcccgauccuagcaagcccagcaagcggagcuucaucgaggaccugcuguucaacaaagugacacuggccgacgccggcuucaucaagcaguauggcgauugucugggcgacauugccgccagggaucugauuugcgcccagaaguuuaacggacugacagugcugccuccucugcugaccgaugagaugaucgcccaguacacaucugcccugcuggccggcacaaucacaagcggcuggacauuuggagcuggcgccgcucugcagauccccuuugcuaugcagauggccuaccgguucaacggcaucggagugacccagaaugugcuguacgagaaccagaagcugaucgccaaccaguucaacagcgccaucggcaagauccaggacagccugagcagcacagcaagcgcccugggaaagcugcaggacguggucaaccagaaugcccaggcacugaacacccuggucaagcagcuguccuccaacuucggcgccaucagcucugugcugaacgauauccugagcagacuggacaaggucgaggccgaggugcagaucgacagacugaucacaggcagacugcagagccuccagacauacgugacccagcagcugaucagagccgccgagauuagagccucugccaaucuggccgccaccaagaugucugagugugugcugggccagagcaagagaguggacuuuugcggcaagggcuaccaccugaugagcuucccucagucugccccucacggcgugguguuucugcacgugacauaugugcccgcucaagagaagaauuucaccaccgcuccagccaucugccacgacggcaaagcccacuuuccuagagaaggcguguucguguccaacggcacccauugguucgugacacagcggaacuucuacgagccccagaucaucaccaccgacaacaccuucgugucuggcaacugcgacguugugaucggcauugugaacaauaccguguacgacccucugcagcccgagcuggacagcuucaaagaggaacuggacaaguacuuuaagaaccacacaagccccgacguggaccugggcgauaucagcggaaucaaugccagcgucgugaacauccagaaagagaucgaccggcugaacgagguggccaagaaucugaacgagagccugaucgaccugcaagaacuggggaaguacgagcaguacaucaaguggcccugguacaucuggcugggcuuuaucgccggacugauugccaucgugauggucacaaucaugcuguguugcaugaccagcugcuguagcugccugaagggcuguuguagcuguggcagcugcugcaaguucgacgaggacgauucugagcccgugcugaagggcgugaaacugcacuacaccugaggacuaguguccaccugucccuccugggcugcuggauugucucguuuuccugccaaauaaacaggaucagcgcuuuacagaucuaaaaaaaaaaaaaaaaaaaaaaaaaaaaaaaaaaaaaaaaaaaaaaaaaaaaaaaaaaaaaaaaaaaaaaaaaaaaaaaaaaaaaaaaaaaaaaaaaaaa

SEQ ID NO: 25243 - RNA, 4105 nt, Artificial Sequence
  SARS-CoV-2/Wuhan/WIV05/2019__EPI_ISL_402128 spike protein mRNA gc mod (1-1273)(A222V_D614G)
aggagacccgugacccggaaguuguacggcuacgcgacuuucccucccacaaacccucgcgcccuuccuuuccuacuugggcccggcagaaagcuuaccauguucguguuucuggugcugcugccccugguguccagccagugugugaaccugaccaccagaacacagcugccuccagccuacaccaacagcuucaccagaggcguguacuaccccgacaagguguucagauccagcgugcugcacucuacccaggaccuguuccugccuuucuucagcaacgugaccugguuccacgccauccacguguccggcaccaauggcaccaagagauucgacaaccccgugcugcccuucaacgacgggguguacuuugccagcaccgagaaguccaacaucaucagaggcuggaucuucggcaccacacuggacagcaagacccagagccugcugaucgugaacaacgccaccaacguggucaucaaagugugcgaguuccaguucugcaacgaccccuuccugggcgucuacuaccacaagaacaacaagagcuggauggaaagcgaguuccggguguacagcagcgccaacaacugcaccuucgaguacgugucccagccuuuccugauggaccuggaaggcaagcagggcaacuucaagaaccugcgcgaguucguguucaagaacaucgacggcuacuucaaaaucuacagcaagcacaccccuaucaaccucgugcgggaucugccucagggcuucucugugcuggaaccccugguggaucugcccaucggcaucaacaucacccgguuucagacacugcuggcccugcacagaagcuaccugacaccuggcgauagcagcagcggauggacagcuggugccgccgcuuacuaugugggcuaccugcagccuagaaccuuccugcugaaguacaacgagaacggcaccaucaccgacgccguggauugugcucuggauccucugagcgagacaaagugcacccugaaguccuucaccguggaaaagggcaucuaccagaccagcaacuuccgggugcagcccaccgaauccaucgugcgguuccccaauaucaccaaucugugccccuucggcgagguguucaaugccaccagauucgccucuguguacgccuggaaccggaagcggaucagcaauugcguggccgacuacuccgugcuguacaacuccgccagcuucagcaccuucaagugcuacggcguguccccuaccaagcugaacgaccugugcuucacaaacguguacgccgacagcuucgugauccggggagaugaagugcggcagauugccccuggacagacaggcaagaucgccgacuacaacuacaagcugcccgacgacuucaccggcugugugauugccuggaacagcaacaaccuggacuccaaagucggcggcaacuacaauuaccuguaccggcuguuccggaaguccaaucugaagcccuucgagcgggacaucagcaccgaaaucuaucaggccggcagcaccccuugcaacggcguggaaggcuucaacugcuacuucccacugcaguccuacggcuuucagcccacaaauggcgugggcuaucagcccuacagagugguggugcugagcuucgaacugcugcaugcuccugccacagugugcggcccuaagaaaagcaccaaucucgugaagaacaaaugcgugaacuucaacuucaacggccugaccggcaccggcgugcugacagagagcaacaagaaguuccugccauuccagcaguuuggccgggauaucgccgauaccacagacgccguuagagauccccagacacuggaaauccuggacaucaccccaugcagcuucggcggagugucugugaucaccccuggcaccaacaccagcaaucagguggcagugcuguaccagggcgugaacuguaccgaagugcccguggccauucacgccgaucagcugacaccuacauggcggguguacuccaccggcagcaauguguuucagaccagagccggcugucugaucggagccgagcacgugaacaauagcuacgagugcgacauccccaucggcgcuggcaucugugccagcuaccagacacagacaaacagccccagacgggcuagaagcguggccagccagagcaucauugccuacacaaugucucugggcgccgagaacagcguggccuacuccaacaacucuaucgcuauccccaccaacuucaccaucagcgugaccaccgagauccugccuguguccaugaccaagaccagcguggacugcaccauguacaucugcggcgauuccaccgagugcuccaaccugcugcugcaguacggcagcuucugcacccagcugaauagagcccugacagggaucgccguggaacaggacaagaacacccaagagguguucgcccaagugaagcaaaucuacaagaccccuccuaucaaggacuucggcggcuucaauuucagccagauucugcccgauccuagcaagcccagcaagcggagcuucaucgaggaccugcuguucaacaaagugacacuggccgacgccggcuucaucaagcaguauggcgauugucugggcgacauugccgccagggaucugauuugcgcccagaaguuuaacggacugacagugcugccuccucugcugaccgaugagaugaucgcccaguacacaucugcccugcuggccggcacaaucacaagcggcuggacauuuggagcuggcgccgcucugcagauccccuuugcuaugcagauggccuaccgguucaacggcaucggagugacccagaaugugcuguacgagaaccagaagcugaucgccaaccaguucaacagcgccaucggcaagauccaggacagccugagcagcacagcaagcgcccugggaaagcugcaggacguggucaaccagaaugcccaggcacugaacacccuggucaagcagcuguccuccaacuucggcgccaucagcucugugcugaacgauauccugagcagacuggacaaggucgaggccgaggugcagaucgacagacugaucacaggcagacugcagagccuccagacauacgugacccagcagcugaucagagccgccgagauuagagccucugccaaucuggccgccaccaagaugucugagugugugcugggccagagcaagagaguggacuuuugcggcaagggcuaccaccugaugagcuucccucagucugccccucacggcgugguguuucugcacgugacauaugugcccgcucaagagaagaauuucaccaccgcuccagccaucugccacgacggcaaagcccacuuuccuagagaaggcguguucguguccaacggcacccauugguucgugacacagcggaacuucuacgagccccagaucaucaccaccgacaacaccuucgugucuggcaacugcgacguugugaucggcauugugaacaauaccguguacgacccucugcagcccgagcuggacagcuucaaagaggaacuggacaaguacuuuaagaaccacacaagccccgacguggaccugggcgauaucagcggaaucaaugccagcgucgugaacauccagaaagagaucgaccggcugaacgagguggccaagaaucugaacgagagccugaucgaccugcaagaacuggggaaguacgagcaguacaucaaguggcccugguacaucuggcugggcuuuaucgccggacugauugccaucgugauggucacaaucaugcuguguugcaugaccagcugcuguagcugccugaagggcuguuguagcuguggcagcugcugcaaguucgacgaggacgauucugagcccgugcugaagggcgugaaacugcacuacaccugaggacuaguguccaccugucccuccugggcugcuggauugucucguuuuccugccaaauaaacaggaucagcgcuuuacagaucuaaaaaaaaaaaaaaaaaaaaaaaaaaaaaaaaaaaaaaaaaaaaaaaaaaaaaaaaaaaaaaaaaaaaaaaaaaaaaaaaaaaaaaaaaaaaaaaaaaaa

SEQ ID NO: 25244 - RNA, 4105 nt, Artificial Sequence
  SARS-CoV-2/Wuhan/WIV05/2019__EPI_ISL_402128 spike protein mRNA gc mod (1-1273)(N439K_D614G)
aggagacccgugacccggaaguuguacggcuacgcgacuuucccucccacaaacccucgcgcccuuccuuuccuacuugggcccggcagaaagcuuaccauguucguguuucuggugcugcugccccugguguccagccagugugugaaccugaccaccagaacacagcugccuccagccuacaccaacagcuucaccagaggcguguacuaccccgacaagguguucagauccagcgugcugcacucuacccaggaccuguuccugccuuucuucagcaacgugaccugguuccacgccauccacguguccggcaccaauggcaccaagagauucgacaaccccgugcugcccuucaacgacgggguguacuuugccagcaccgagaaguccaacaucaucagaggcuggaucuucggcaccacacuggacagcaagacccagagccugcugaucgugaacaacgccaccaacguggucaucaaagugugcgaguuccaguucugcaacgaccccuuccugggcgucuacuaccacaagaacaacaagagcuggauggaaagcgaguuccggguguacagcagcgccaacaacugcaccuucgaguacgugucccagccuuuccugauggaccuggaaggcaagcagggcaacuucaagaaccugcgcgaguucguguucaagaacaucgacggcuacuucaaaaucuacagcaagcacaccccuaucaaccucgugcgggaucugccucagggcuucucugcucuggaaccccugguggaucugcccaucggcaucaacaucacccgguuucagacacugcuggcccugcacagaagcuaccugacaccuggcgauagcagcagcggauggacagcuggugccgccgcuuacuaugugggcuaccugcagccuagaaccuuccugcugaaguacaacgagaacggcaccaucaccgacgccguggauugugcucuggauccucugagcgagacaaagugcacccugaaguccuucaccguggaaaagggcaucuaccagaccagcaacuuccgggugcagcccaccgaauccaucgugcgguuccccaauaucaccaaucugugccccuucggcgagguguucaaugccaccagauucgccucuguguacgccuggaaccggaagcggaucagcaauugcguggccgacuacuccgugcuguacaacuccgccagcuucagcaccuucaagugcuacggcguguccccuaccaagcugaacgaccugugcuucacaaacguguacgccgacagcuucgugauccggggagaugaagugcggcagauugccccuggacagacaggcaagaucgccgacuacaacuacaagcugcccgacgacuucaccggcugugugauugccuggaacagcaagaaccuggacuccaaagucggcggcaacuacaauuaccuguaccggcuguuccggaaguccaaucugaagcccuucgagcgggacaucagcaccgaaaucuaucaggccggcagcaccccuugcaacggcguggaaggcuucaacugcuacuucccacugcaguccuacggcuuucagcccacaaauggcgugggcuaucagcccuacagagugguggugcugagcuucgaacugcugcaugcuccugccacagugugcggcccuaagaaaagcaccaaucucgugaagaacaaaugcgugaacuucaacuucaacggccugaccggcaccggcgugcugacagagagcaacaagaaguuccugccauuccagcaguuuggccgggauaucgccgauaccacagacgccguuagagauccccagacacuggaaauccuggacaucaccccaugcagcuucggcggagugucugugaucaccccuggcaccaacaccagcaaucagguggcagugcuguaccagggcgugaacuguaccgaagugcccguggccauucacgccgaucagcugacaccuacauggcggguguacuccaccggcagcaauguguuucagaccagagccggcugucugaucggagccgagcacgugaacaauagcuacgagugcgacauccccaucggcgcuggcaucugugccagcuaccagacacagacaaacagccccagacgggcuagaagcguggccagccagagcaucauugccuacacaaugucucugggcgccgagaacagcguggccuacuccaacaacucuaucgcuauccccaccaacuucaccaucagcgugaccaccgagauccugccuguguccaugaccaagaccagcguggacugcaccauguacaucugcggcgauuccaccgagugcuccaaccugcugcugcaguacggcagcuucugcacccagcugaauagagcccugacagggaucgccguggaacaggacaagaacacccaagagguguucgcccaagugaagcaaaucuacaagaccccuccuaucaaggacuucggcggcuucaauuucagccagauucugcccgauccuagcaagcccagcaagcggagcuucaucgaggaccugcuguucaacaaagugacacuggccgacgccggcuucaucaagcaguauggcgauugucugggcgacauugccgccagggaucugauuugcgcccagaaguuuaacggacugacagugcugccuccucugcugaccgaugagaugaucgcccaguacacaucugcccugcuggccggcacaaucacaagcggcuggacauuuggagcuggcgccgcucugcagauccccuuugcuaugcagauggccuaccgguucaacggcaucggagugacccagaaugugcuguacgagaaccagaagcugaucgccaaccaguucaacagcgccaucggcaagauccaggacagccugagcagcacagcaagcgcccugggaaagcugcaggacguggucaaccagaaugcccaggcacugaacacccuggucaagcagcuguccuccaacuucggcgccaucagcucugugcugaacgauauccugagcagacuggacaaggucgaggccgaggugcagaucgacagacugaucacaggcagacugcagagccuccagacauacgugacccagcagcugaucagagccgccgagauuagagccucugccaaucuggccgccaccaagaugucugagugugugcugggccagagcaagagaguggacuuuugcggcaagggcuaccaccugaugagcuucccucagucugccccucacggcgugguguuucugcacgugacauaugugcccgcucaagagaagaauuucaccaccgcuccagccaucugccacgacggcaaagcccacuuuccuagagaaggcguguucguguccaacggcacccauugguucgugacacagcggaacuucuacgagccccagaucaucaccaccgacaacaccuucgugucuggcaacugcgacguugugaucggcauugugaacaauaccguguacgacccucugcagcccgagcuggacagcuucaaagaggaacuggacaaguacuuuaagaaccacacaagccccgacguggaccugggcgauaucagcggaaucaaugccagcgucgugaacauccagaaagagaucgaccggcugaacgagguggccaagaaucugaacgagagccugaucgaccugcaagaacuggggaaguacgagcaguacaucaaguggcccugguacaucuggcugggcuuuaucgccggacugauugccaucgugauggucacaaucaugcuguguugcaugaccagcugcuguagcugccugaagggcuguuguagcuguggcagcugcugcaaguucgacgaggacgauucugagcccgugcugaagggcgugaaacugcacuacaccugaggacuaguguccaccugucccuccugggcugcuggauugucucguuuuccugccaaauaaacaggaucagcgcuuuacagaucuaaaaaaaaaaaaaaaaaaaaaaaaaaaaaaaaaaaaaaaaaaaaaaaaaaaaaaaaaaaaaaaaaaaaaaaaaaaaaaaaaaaaaaaaaaaaaaaaaaaa

SEQ ID NO: 25245 - RNA, 4105 nt, Artificial Sequence
  SARS-CoV-2/Wuhan/WIV05/2019__EPI_ISL_402128 spike protein mRNA gc mod (1-1273)(S477N_D614G)
aggagacccgugacccggaaguuguacggcuacgcgacuuucccucccacaaacccucgcgcccuuccuuuccuacuugggcccggcagaaagcuuaccauguucguguuucuggugcugcugccccugguguccagccagugugugaaccugaccaccagaacacagcugccuccagccuacaccaacagcuucaccagaggcguguacuaccccgacaagguguucagauccagcgugcugcacucuacccaggaccuguuccugccuuucuucagcaacgugaccugguuccacgccauccacguguccggcaccaauggcaccaagagauucgacaaccccgugcugcccuucaacgacgggguguacuuugccagcaccgagaaguccaacaucaucagaggcuggaucuucggcaccacacuggacagcaagacccagagccugcugaucgugaacaacgccaccaacguggucaucaaagugugcgaguuccaguucugcaacgaccccuuccugggcgucuacuaccacaagaacaacaagagcuggauggaaagcgaguuccggguguacagcagcgccaacaacugcaccuucgaguacgugucccagccuuuccugauggaccuggaaggcaagcagggcaacuucaagaaccugcgcgaguucguguucaagaacaucgacggcuacuucaaaaucuacagcaagcacaccccuaucaaccucgugcgggaucugccucagggcuucucugcucuggaaccccugguggaucugcccaucggcaucaacaucacccgguuucagacacugcuggcccugcacagaagcuaccugacaccuggcgauagcagcagcggauggacagcuggugccgccgcuuacuaugugggcuaccugcagccuagaaccuuccugcugaaguacaacgagaacggcaccaucaccgacgccguggauugugcucuggauccucugagcgagacaaagugcacccugaaguccuucaccguggaaaagggcaucuaccagaccagcaacuuccgggugcagcccaccgaauccaucgugcgguuccccaauaucaccaaucugugccccuucggcgagguguucaaugccaccagauucgccucuguguacgccuggaaccggaagcggaucagcaauugcguggccgacuacuccgugcuguacaacuccgccagcuucagcaccuucaagugcuacggcguguccccuaccaagcugaacgaccugugcuucacaaacguguacgccgacagcuucgugauccggggagaugaagugcggcagauugccccuggacagacaggcaagaucgccgacuacaacuacaagcugcccgacgacuucaccggcugugugauugccuggaacagcaacaaccuggacuccaaagucggcggcaacuacaauuaccuguaccggcuguuccggaaguccaaucugaagcccuucgagcgggacaucagcaccgaaaucuaucaggccggcaacaccccuugcaacggcguggaaggcuucaacugcuacuucccacugcaguccuacggcuuucagcccacaaauggcgugggcuaucagcccuacagagugguggugcugagcuucgaacugcugcaugcuccugccacagugugcggcccuaagaaaagcaccaaucucgugaagaacaaaugcgugaacuucaacuucaacggccugaccggcaccggcgugcugacagagagcaacaagaaguuccugccauuccagcaguuuggccgggauaucgccgauaccacagacgccguuagagauccccagacacuggaaauccuggacaucaccccaugcagcuucggcggagugucugugaucaccccuggcaccaacaccagcaaucagguggcagugcuguaccagggcgugaacuguaccgaagugcccguggccauucacgccgaucagcugacaccuacauggcggguguacuccaccggcagcaauguguuucagaccagagccggcugucugaucggagccgagcacgugaacaauagcuacgagugcgacauccccaucggcgcuggcaucugugccagcuaccagacacagacaaacagccccagacgggcuagaagcguggccagccagagcaucauugccuacacaaugucucugggcgccgagaacagcguggccuacuccaacaacucuaucgcuauccccaccaacuucaccaucagcgugaccaccgagauccugccuguguccaugaccaagaccagcguggacugcaccauguacaucugcggcgauuccaccgagugcuccaaccugcugcugcaguacggcagcuucugcacccagcugaauagagcccugacagggaucgccguggaacaggacaagaacacccaagagguguucgcccaagugaagcaaaucuacaagaccccuccuaucaaggacuucggcggcuucaauuucagccagauucugcccgauccuagcaagcccagcaagcggagcuucaucgaggaccugcuguucaacaaagugacacuggccgacgccggcuucaucaagcaguauggcgauugucugggcgacauugccgccagggaucugauuugcgcccagaaguuuaacggacugacagugcugccuccucugcugaccgaugagaugaucgcccaguacacaucugcccugcuggccggcacaaucacaagcggcuggacauuuggagcuggcgccgcucugcagauccccuuugcuaugcagauggccuaccgguucaacggcaucggagugacccagaaugugcuguacgagaaccagaagcugaucgccaaccaguucaacagcgccaucggcaagauccaggacagccugagcagcacagcaagcgcccugggaaagcugcaggacguggucaaccagaaugcccaggcacugaacacccuggucaagcagcuguccuccaacuucggcgccaucagcucugugcugaacgauauccugagcagacuggacaaggucgaggccgaggugcagaucgacagacugaucacaggcagacugcagagccuccagacauacgugacccagcagcugaucagagccgccgagauuagagccucugccaaucuggccgccaccaagaugucugagugugugcugggccagagcaagagaguggacuuuugcggcaagggcuaccaccugaugagcuucccucagucugccccucacggcgugguguuucugcacgugacauaugugcccgcucaagagaagaauuucaccaccgcuccagccaucugccacgacggcaaagcccacuuuccuagagaaggcguguucguguccaacggcacccauugguucgugacacagcggaacuucuacgagccccagaucaucaccaccgacaacaccuucgugucuggcaacugcgacguugugaucggcauugugaacaauaccguguacgacccucugcagcccgagcuggacagcuucaaagaggaacuggacaaguacuuuaagaaccacacaagccccgacguggaccugggcgauaucagcggaaucaaugccagcgucgugaacauccagaaagagaucgaccggcugaacgagguggccaagaaucugaacgagagccugaucgaccugcaagaacuggggaaguacgagcaguacaucaaguggcccugguacaucuggcugggcuuuaucgccggacugauugccaucgugauggucacaaucaugcuguguugcaugaccagcugcuguagcugccugaagggcuguuguagcuguggcagcugcugcaaguucgacgaggacgauucugagcccgugcugaagggcgugaaacugcacuacaccugaggacuaguguccaccugucccuccugggcugcuggauugucucguuuuccugccaaauaaacaggaucagcgcuuuacagaucuaaaaaaaaaaaaaaaaaaaaaaaaaaaaaaaaaaaaaaaaaaaaaaaaaaaaaaaaaaaaaaaaaaaaaaaaaaaaaaaaaaaaaaaaaaaaaaaaaaaa

SEQ ID NO: 25246 - RNA, 4105 nt, Artificial Sequence
  SARS-CoV-2/Wuhan/WIV05/2019__EPI_ISL_402128 spike protein mRNA gc mod (1-1273)(N501Y_D614G)
aggagacccgugacccggaaguuguacggcuacgcgacuuucccucccacaaacccucgcgcccuuccuuuccuacuugggcccggcagaaagcuuaccauguucguguuucuggugcugcugccccugguguccagccagugugugaaccugaccaccagaacacagcugccuccagccuacaccaacagcuucaccagaggcguguacuaccccgacaagguguucagauccagcgugcugcacucuacccaggaccuguuccugccuuucuucagcaacgugaccugguuccacgccauccacguguccggcaccaauggcaccaagagauucgacaaccccgugcugcccuucaacgacgggguguacuuugccagcaccgagaaguccaacaucaucagaggcuggaucuucggcaccacacuggacagcaagacccagagccugcugaucgugaacaacgccaccaacguggucaucaaagugugcgaguuccaguucugcaacgaccccuuccugggcgucuacuaccacaagaacaacaagagcuggauggaaagcgaguuccggguguacagcagcgccaacaacugcaccuucgaguacgugucccagccuuuccugauggaccuggaaggcaagcagggcaacuucaagaaccugcgcgaguucguguucaagaacaucgacggcuacuucaaaaucuacagcaagcacaccccuaucaaccucgugcgggaucugccucagggcuucucugcucuggaaccccugguggaucugcccaucggcaucaacaucacccgguuucagacacugcuggcccugcacagaagcuaccugacaccuggcgauagcagcagcggauggacagcuggugccgccgcuuacuaugugggcuaccugcagccuagaaccuuccugcugaaguacaacgagaacggcaccaucaccgacgccguggauugugcucuggauccucugagcgagacaaagugcacccugaaguccuucaccguggaaaagggcaucuaccagaccagcaacuuccgggugcagcccaccgaauccaucgugcgguuccccaauaucaccaaucugugccccuucggcgagguguucaaugccaccagauucgccucuguguacgccuggaaccggaagcggaucagcaauugcguggccgacuacuccgugcuguacaacuccgccagcuucagcaccuucaagugcuacggcguguccccuaccaagcugaacgaccugugcuucacaaacguguacgccgacagcuucgugauccggggagaugaagugcggcagauugccccuggacagacaggcaagaucgccgacuacaacuacaagcugcccgacgacuucaccggcugugugauugccuggaacagcaacaaccuggacuccaaagucggcggcaacuacaauuaccuguaccggcuguuccggaaguccaaucugaagcccuucgagcgggacaucagcaccgaaaucuaucaggccggcagcaccccuugcaacggcguggaaggcuucaacugcuacuucccacugcaguccuacggcuuucagcccacauacggcgugggcuaucagcccuacagagugguggugcugagcuucgaacugcugcaugcuccugccacagugugcggcccuaagaaaagcaccaaucucgugaagaacaaaugcgugaacuucaacuucaacggccugaccggcaccggcgugcugacagagagcaacaagaaguuccugccauuccagcaguuuggccgggauaucgccgauaccacagacgccguuagagauccccagacacuggaaauccuggacaucaccccaugcagcuucggcggagugucugugaucaccccuggcaccaacaccagcaaucagguggcagugcuguaccagggcgugaacuguaccgaagugcccguggccauucacgccgaucagcugacaccuacauggcggguguacuccaccggcagcaauguguuucagaccagagccggcugucugaucggagccgagcacgugaacaauagcuacgagugcgacauccccaucggcgcuggcaucugugccagcuaccagacacagacaaacagccccagacgggcuagaagcguggccagccagagcaucauugccuacacaaugucucugggcgccgagaacagcguggccuacuccaacaacucuaucgcuauccccaccaacuucaccaucagcgugaccaccgagauccugccuguguccaugaccaagaccagcguggacugcaccauguacaucugcggcgauuccaccgagugcuccaaccugcugcugcaguacggcagcuucugcacccagcugaauagagcccugacagggaucgccguggaacaggacaagaacacccaagagguguucgcccaagugaagcaaaucuacaagaccccuccuaucaaggacuucggcggcuucaauuucagccagauucugcccgauccuagcaagcccagcaagcggagcuucaucgaggaccugcuguucaacaaagugacacuggccgacgccggcuucaucaagcaguauggcgauugucugggcgacauugccgccagggaucugauuugcgcccagaaguuuaacggacugacagugcugccuccucugcugaccgaugagaugaucgcccaguacacaucugcccugcuggccggcacaaucacaagcggcuggacauuuggagcuggcgccgcucugcagauccccuuugcuaugcagauggccuaccgguucaacggcaucggagugacccagaaugugcuguacgagaaccagaagcugaucgccaaccaguucaacagcgccaucggcaagauccaggacagccugagcagcacagcaagcgcccugggaaagcugcaggacguggucaaccagaaugcccaggcacugaacacccuggucaagcagcuguccuccaacuucggcgccaucagcucugugcugaacgauauccugagcagacuggacaaggucgaggccgaggugcagaucgacagacugaucacaggcagacugcagagccuccagacauacgugacccagcagcugaucagagccgccgagauuagagccucugccaaucuggccgccaccaagaugucugagugugugcugggccagagcaagagaguggacuuuugcggcaagggcuaccaccugaugagcuucccucagucugccccucacggcgugguguuucugcacgugacauaugugcccgcucaagagaagaauuucaccaccgcuccagccaucugccacgacggcaaagcccacuuuccuagagaaggcguguucguguccaacggcacccauugguucgugacacagcggaacuucuacgagccccagaucaucaccaccgacaacaccuucgugucuggcaacugcgacguugugaucggcauugugaacaauaccguguacgacccucugcagcccgagcuggacagcuucaaagaggaacuggacaaguacuuuaagaaccacacaagccccgacguggaccugggcgauaucagcggaaucaaugccagcgucgugaacauccagaaagagaucgaccggcugaacgagguggccaagaaucugaacgagagccugaucgaccugcaagaacuggggaaguacgagcaguacaucaaguggcccugguacaucuggcugggcuuuaucgccggacugauugccaucgugauggucacaaucaugcuguguugcaugaccagcugcuguagcugccugaagggcuguuguagcuguggcagcugcugcaaguucgacgaggacgauucugagcccgugcugaagggcgugaaacugcacuacaccugaggacuaguguccaccugucccuccugggcugcuggauugucucguuuuccugccaaauaaacaggaucagcgcuuuacagaucuaaaaaaaaaaaaaaaaaaaaaaaaaaaaaaaaaaaaaaaaaaaaaaaaaaaaaaaaaaaaaaaaaaaaaaaaaaaaaaaaaaaaaaaaaaaaaaaaaaaa

SEQ ID NO: 25247 - RNA, 4099 nt, Artificial Sequence
  SARS-CoV-2/Wuhan/WIV05/2019__EPI_ISL_402128 spike protein mRNA gc mod (1-1273)(H69del_V70del_D614G)
aggagacccgugacccggaaguuguacggcuacgcgacuuucccucccacaaacccucgcgcccuuccuuuccuacuugggcccggcagaaagcuuaccauguucguguuucuggugcugcugccccugguguccagccagugugugaaccugaccaccagaacacagcugccuccagccuacaccaacagcuucaccagaggcguguacuaccccgacaagguguucagauccagcgugcugcacucuacccaggaccuguuccugccuuucuucagcaacgugaccugguuccacgccaucuccggcaccaauggcaccaagagauucgacaaccccgugcugcccuucaacgacgggguguacuuugccagcaccgagaaguccaacaucaucagaggcuggaucuucggcaccacacuggacagcaagacccagagccugcugaucgugaacaacgccaccaacguggucaucaaagugugcgaguuccaguucugcaacgaccccuuccugggcgucuacuaccacaagaacaacaagagcuggauggaaagcgaguuccggguguacagcagcgccaacaacugcaccuucgaguacgugucccagccuuuccugauggaccuggaaggcaagcagggcaacuucaagaaccugcgcgaguucguguucaagaacaucgacggcuacuucaaaaucuacagcaagcacaccccuaucaaccucgugcgggaucugccucagggcuucucugcucuggaaccccugguggaucugcccaucggcaucaacaucacccgguuucagacacugcuggcccugcacagaagcuaccugacaccuggcgauagcagcagcggauggacagcuggugccgccgcuuacuaugugggcuaccugcagccuagaaccuuccugcugaaguacaacgagaacggcaccaucaccgacgccguggauugugcucuggauccucugagcgagacaaagugcacccugaaguccuucaccguggaaaagggcaucuaccagaccagcaacuuccgggugcagcccaccgaauccaucgugcgguuccccaauaucaccaaucugugccccuucggcgagguguucaaugccaccagauucgccucuguguacgccuggaaccggaagcggaucagcaauugcguggccgacuacuccgugcuguacaacuccgccagcuucagcaccuucaagugcuacggcguguccccuaccaagcugaacgaccugugcuucacaaacguguacgccgacagcuucgugauccggggagaugaagugcggcagauugccccuggacagacaggcaagaucgccgacuacaacuacaagcugcccgacgacuucaccggcugugugauugccuggaacagcaacaaccuggacuccaaagucggcggcaacuacaauuaccuguaccggcuguuccggaaguccaaucugaagcccuucgagcgggacaucagcaccgaaaucuaucaggccggcagcaccccuugcaacggcguggaaggcuucaacugcuacuucccacugcaguccuacggcuuucagcccacaaauggcgugggcuaucagcccuacagagugguggugcugagcuucgaacugcugcaugcuccugccacagugugcggcccuaagaaaagcaccaaucucgugaagaacaaaugcgugaacuucaacuucaacggccugaccggcaccggcgugcugacagagagcaacaagaaguuccugccauuccagcaguuuggccgggauaucgccgauaccacagacgccguuagagauccccagacacuggaaauccuggacaucaccccaugcagcuucggcggagugucugugaucaccccuggcaccaacaccagcaaucagguggcagugcuguaccagggcgugaacuguaccgaagugcccguggccauucacgccgaucagcugacaccuacauggcggguguacuccaccggcagcaauguguuucagaccagagccggcugucugaucggagccgagcacgugaacaauagcuacgagugcgacauccccaucggcgcuggcaucugugccagcuaccagacacagacaaacagccccagacgggcuagaagcguggccagccagagcaucauugccuacacaaugucucugggcgccgagaacagcguggccuacuccaacaacucuaucgcuauccccaccaacuucaccaucagcgugaccaccgagauccugccuguguccaugaccaagaccagcguggacugcaccauguacaucugcggcgauuccaccgagugcuccaaccugcugcugcaguacggcagcuucugcacccagcugaauagagcccugacagggaucgccguggaacaggacaagaacacccaagagguguucgcccaagugaagcaaaucuacaagaccccuccuaucaaggacuucggcggcuucaauuucagccagauucugcccgauccuagcaagcccagcaagcggagcuucaucgaggaccugcuguucaacaaagugacacuggccgacgccggcuucaucaagcaguauggcgauugucugggcgacauugccgccagggaucugauuugcgcccagaaguuuaacggacugacagugcugccuccucugcugaccgaugagaugaucgcccaguacacaucugcccugcuggccggcacaaucacaagcggcuggacauuuggagcuggcgccgcucugcagauccccuuugcuaugcagauggccuaccgguucaacggcaucggagugacccagaaugugcuguacgagaaccagaagcugaucgccaaccaguucaacagcgccaucggcaagauccaggacagccugagcagcacagcaagcgcccugggaaagcugcaggacguggucaaccagaaugcccaggcacugaacacccuggucaagcagcuguccuccaacuucggcgccaucagcucugugcugaacgauauccugagcagacuggacaaggucgaggccgaggugcagaucgacagacugaucacaggcagacugcagagccuccagacauacgugacccagcagcugaucagagccgccgagauuagagccucugccaaucuggccgccaccaagaugucugagugugugcugggccagagcaagagaguggacuuuugcggcaagggcuaccaccugaugagcuucccucagucugccccucacggcgugguguuucugcacgugacauaugugcccgcucaagagaagaauuucaccaccgcuccagccaucugccacgacggcaaagcccacuuuccuagagaaggcguguucguguccaacggcacccauugguucgugacacagcggaacuucuacgagccccagaucaucaccaccgacaacaccuucgugucuggcaacugcgacguugugaucggcauugugaacaauaccguguacgacccucugcagcccgagcuggacagcuucaaagaggaacuggacaaguacuuuaagaaccacacaagccccgacguggaccugggcgauaucagcggaaucaaugccagcgucgugaacauccagaaagagaucgaccggcugaacgagguggccaagaaucugaacgagagccugaucgaccugcaagaacuggggaaguacgagcaguacaucaaguggcccugguacaucuggcugggcuuuaucgccggacugauugccaucgugauggucacaaucaugcuguguugcaugaccagcugcuguagcugccugaagggcuguuguagcuguggcagcugcugcaaguucgacgaggacgauucugagcccgugcugaagggcgugaaacugcacuacaccugaggacuaguguccaccugucccuccugggcugcuggauugucucguuuuccugccaaauaaacaggaucagcgcuuuacagaucuaaaaaaaaaaaaaaaaaaaaaaaaaaaaaaaaaaaaaaaaaaaaaaaaaaaaaaaaaaaaaaaaaaaaaaaaaaaaaaaaaaaaaaaaaaaaaaaaaaaa

SEQ ID NO: 25248 - RNA, 4105 nt, Artificial Sequence
  SARS-CoV-2/Wuhan/WIV05/2019__EPI_ISL_402128 spike protein mRNA gc mod (1-1273)(Y453F_D614G)
aggagacccgugacccggaaguuguacggcuacgcgacuuucccucccacaaacccucgcgcccuuccuuuccuacuugggcccggcagaaagcuuaccauguucguguuucuggugcugcugccccugguguccagccagugugugaaccugaccaccagaacacagcugccuccagccuacaccaacagcuucaccagaggcguguacuaccccgacaagguguucagauccagcgugcugcacucuacccaggaccuguuccugccuuucuucagcaacgugaccugguuccacgccauccacguguccggcaccaauggcaccaagagauucgacaaccccgugcugcccuucaacgacgggguguacuuugccagcaccgagaaguccaacaucaucagaggcuggaucuucggcaccacacuggacagcaagacccagagccugcugaucgugaacaacgccaccaacguggucaucaaagugugcgaguuccaguucugcaacgaccccuuccugggcgucuacuaccacaagaacaacaagagcuggauggaaagcgaguuccggguguacagcagcgccaacaacugcaccuucgaguacgugucccagccuuuccugauggaccuggaaggcaagcagggcaacuucaagaaccugcgcgaguucguguucaagaacaucgacggcuacuucaaaaucuacagcaagcacaccccuaucaaccucgugcgggaucugccucagggcuucucugcucuggaaccccugguggaucugcccaucggcaucaacaucacccgguuucagacacugcuggcccugcacagaagcuaccugacaccuggcgauagcagcagcggauggacagcuggugccgccgcuuacuaugugggcuaccugcagccuagaaccuuccugcugaaguacaacgagaacggcaccaucaccgacgccguggauugugcucuggauccucugagcgagacaaagugcacccugaaguccuucaccguggaaaagggcaucuaccagaccagcaacuuccgggugcagcccaccgaauccaucgugcgguuccccaauaucaccaaucugugccccuucggcgagguguucaaugccaccagauucgccucuguguacgccuggaaccggaagcggaucagcaauugcguggccgacuacuccgugcuguacaacuccgccagcuucagcaccuucaagugcuacggcguguccccuaccaagcugaacgaccugugcuucacaaacguguacgccgacagcuucgugauccggggagaugaagugcggcagauugccccuggacagacaggcaagaucgccgacuacaacuacaagcugcccgacgacuucaccggcugugugauugccuggaacagcaacaaccuggacuccaaagucggcggcaacuacaauuaccuguuccggcuguuccggaaguccaaucugaagcccuucgagcgggacaucagcaccgaaaucuaucaggccggcagcaccccuugcaacggcguggaaggcuucaacugcuacuucccacugcaguccuacggcuuucagcccacaaauggcgugggcuaucagcccuacagagugguggugcugagcuucgaacugcugcaugcuccugccacagugugcggcccuaagaaaagcaccaaucucgugaagaacaaaugcgugaacuucaacuucaacggccugaccggcaccggcgugcugacagagagcaacaagaaguuccugccauuccagcaguuuggccgggauaucgccgauaccacagacgccguuagagauccccagacacuggaaauccuggacaucaccccaugcagcuucggcggagugucugugaucaccccuggcaccaacaccagcaaucagguggcagugcuguaccagggcgugaacuguaccgaagugcccguggccauucacgccgaucagcugacaccuacauggcggguguacuccaccggcagcaauguguuucagaccagagccggcugucugaucggagccgagcacgugaacaauagcuacgagugcgacauccccaucggcgcuggcaucugugccagcuaccagacacagacaaacagccccagacgggcuagaagcguggccagccagagcaucauugccuacacaaugucucugggcgccgagaacagcguggccuacuccaacaacucuaucgcuauccccaccaacuucaccaucagcgugaccaccgagauccugccuguguccaugaccaagaccagcguggacugcaccauguacaucugcggcgauuccaccgagugcuccaaccugcugcugcaguacggcagcuucugcacccagcugaauagagcccugacagggaucgccguggaacaggacaagaacacccaagagguguucgcccaagugaagcaaaucuacaagaccccuccuaucaaggacuucggcggcuucaauuucagccagauucugcccgauccuagcaagcccagcaagcggagcuucaucgaggaccugcuguucaacaaagugacacuggccgacgccggcuucaucaagcaguauggcgauugucugggcgacauugccgccagggaucugauuugcgcccagaaguuuaacggacugacagugcugccuccucugcugaccgaugagaugaucgcccaguacacaucugcccugcuggccggcacaaucacaagcggcuggacauuuggagcuggcgccgcucugcagauccccuuugcuaugcagauggccuaccgguucaacggcaucggagugacccagaaugugcuguacgagaaccagaagcugaucgccaaccaguucaacagcgccaucggcaagauccaggacagccugagcagcacagcaagcgcccugggaaagcugcaggacguggucaaccagaaugcccaggcacugaacacccuggucaagcagcuguccuccaacuucggcgccaucagcucugugcugaacgauauccugagcagacuggacaaggucgaggccgaggugcagaucgacagacugaucacaggcagacugcagagccuccagacauacgugacccagcagcugaucagagccgccgagauuagagccucugccaaucuggccgccaccaagaugucugagugugugcugggccagagcaagagaguggacuuuugcggcaagggcuaccaccugaugagcuucccucagucugccccucacggcgugguguuucugcacgugacauaugugcccgcucaagagaagaauuucaccaccgcuccagccaucugccacgacggcaaagcccacuuuccuagagaaggcguguucguguccaacggcacccauugguucgugacacagcggaacuucuacgagccccagaucaucaccaccgacaacaccuucgugucuggcaacugcgacguugugaucggcauugugaacaauaccguguacgacccucugcagcccgagcuggacagcuucaaagaggaacuggacaaguacuuuaagaaccacacaagccccgacguggaccugggcgauaucagcggaaucaaugccagcgucgugaacauccagaaagagaucgaccggcugaacgagguggccaagaaucugaacgagagccugaucgaccugcaagaacuggggaaguacgagcaguacaucaaguggcccugguacaucuggcugggcuuuaucgccggacugauugccaucgugauggucacaaucaugcuguguugcaugaccagcugcuguagcugccugaagggcuguuguagcuguggcagcugcugcaaguucgacgaggacgauucugagcccgugcugaagggcgugaaacugcacuacaccugaggacuaguguccaccugucccuccugggcugcuggauugucucguuuuccugccaaauaaacaggaucagcgcuuuacagaucuaaaaaaaaaaaaaaaaaaaaaaaaaaaaaaaaaaaaaaaaaaaaaaaaaaaaaaaaaaaaaaaaaaaaaaaaaaaaaaaaaaaaaaaaaaaaaaaaaaaa

SEQ ID NO: 25249 - RNA, 4105 nt, Artificial Sequence
  SARS-CoV-2/Wuhan/WIV05/2019__EPI_ISL_402128 spike protein mRNA gc mod (1-1273)(D614G_I692V)
aggagacccgugacccggaaguuguacggcuacgcgacuuucccucccacaaacccucgcgcccuuccuuuccuacuugggcccggcagaaagcuuaccauguucguguuucuggugcugcugccccugguguccagccagugugugaaccugaccaccagaacacagcugccuccagccuacaccaacagcuucaccagaggcguguacuaccccgacaagguguucagauccagcgugcugcacucuacccaggaccuguuccugccuuucuucagcaacgugaccugguuccacgccauccacguguccggcaccaauggcaccaagagauucgacaaccccgugcugcccuucaacgacgggguguacuuugccagcaccgagaaguccaacaucaucagaggcuggaucuucggcaccacacuggacagcaagacccagagccugcugaucgugaacaacgccaccaacguggucaucaaagugugcgaguuccaguucugcaacgaccccuuccugggcgucuacuaccacaagaacaacaagagcuggauggaaagcgaguuccggguguacagcagcgccaacaacugcaccuucgaguacgugucccagccuuuccugauggaccuggaaggcaagcagggcaacuucaagaaccugcgcgaguucguguucaagaacaucgacggcuacuucaaaaucuacagcaagcacaccccuaucaaccucgugcgggaucugccucagggcuucucugcucuggaaccccugguggaucugcccaucggcaucaacaucacccgguuucagacacugcuggcccugcacagaagcuaccugacaccuggcgauagcagcagcggauggacagcuggugccgccgcuuacuaugugggcuaccugcagccuagaaccuuccugcugaaguacaacgagaacggcaccaucaccgacgccguggauugugcucuggauccucugagcgagacaaagugcacccugaaguccuucaccguggaaaagggcaucuaccagaccagcaacuuccgggugcagcccaccgaauccaucgugcgguuccccaauaucaccaaucugugccccuucggcgagguguucaaugccaccagauucgccucuguguacgccuggaaccggaagcggaucagcaauugcguggccgacuacuccgugcuguacaacuccgccagcuucagcaccuucaagugcuacggcguguccccuaccaagcugaacgaccugugcuucacaaacguguacgccgacagcuucgugauccggggagaugaagugcggcagauugccccuggacagacaggcaagaucgccgacuacaacuacaagcugcccgacgacuucaccggcugugugauugccuggaacagcaacaaccuggacuccaaagucggcggcaacuacaauuaccuguaccggcuguuccggaaguccaaucugaagcccuucgagcgggacaucagcaccgaaaucuaucaggccggcagcaccccuugcaacggcguggaaggcuucaacugcuacuucccacugcaguccuacggcuuucagcccacaaauggcgugggcuaucagcccuacagagugguggugcugagcuucgaacugcugcaugcuccugccacagugugcggcccuaagaaaagcaccaaucucgugaagaacaaaugcgugaacuucaacuucaacggccugaccggcaccggcgugcugacagagagcaacaagaaguuccugccauuccagcaguuuggccgggauaucgccgauaccacagacgccguuagagauccccagacacuggaaauccuggacaucaccccaugcagcuucggcggagugucugugaucaccccuggcaccaacaccagcaaucagguggcagugcuguaccagggcgugaacuguaccgaagugcccguggccauucacgccgaucagcugacaccuacauggcggguguacuccaccggcagcaauguguuucagaccagagccggcugucugaucggagccgagcacgugaacaauagcuacgagugcgacauccccaucggcgcuggcaucugugccagcuaccagacacagacaaacagccccagacgggcuagaagcguggccagccagagcgugauugccuacacaaugucucugggcgccgagaacagcguggccuacuccaacaacucuaucgcuauccccaccaacuucaccaucagcgugaccaccgagauccugccuguguccaugaccaagaccagcguggacugcaccauguacaucugcggcgauuccaccgagugcuccaaccugcugcugcaguacggcagcuucugcacccagcugaauagagcccugacagggaucgccguggaacaggacaagaacacccaagagguguucgcccaagugaagcaaaucuacaagaccccuccuaucaaggacuucggcggcuucaauuucagccagauucugcccgauccuagcaagcccagcaagcggagcuucaucgaggaccugcuguucaacaaagugacacuggccgacgccggcuucaucaagcaguauggcgauugucugggcgacauugccgccagggaucugauuugcgcccagaaguuuaacggacugacagugcugccuccucugcugaccgaugagaugaucgcccaguacacaucugcccugcuggccggcacaaucacaagcggcuggacauuuggagcuggcgccgcucugcagauccccuuugcuaugcagauggccuaccgguucaacggcaucggagugacccagaaugugcuguacgagaaccagaagcugaucgccaaccaguucaacagcgccaucggcaagauccaggacagccugagcagcacagcaagcgcccugggaaagcugcaggacguggucaaccagaaugcccaggcacugaacacccuggucaagcagcuguccuccaacuucggcgccaucagcucugugcugaacgauauccugagcagacuggacaaggucgaggccgaggugcagaucgacagacugaucacaggcagacugcagagccuccagacauacgugacccagcagcugaucagagccgccgagauuagagccucugccaaucuggccgccaccaagaugucugagugugugcugggccagagcaagagaguggacuuuugcggcaagggcuaccaccugaugagcuucccucagucugccccucacggcgugguguuucugcacgugacauaugugcccgcucaagagaagaauuucaccaccgcuccagccaucugccacgacggcaaagcccacuuuccuagagaaggcguguucguguccaacggcacccauugguucgugacacagcggaacuucuacgagccccagaucaucaccaccgacaacaccuucgugucuggcaacugcgacguugugaucggcauugugaacaauaccguguacgacccucugcagcccgagcuggacagcuucaaagaggaacuggacaaguacuuuaagaaccacacaagccccgacguggaccugggcgauaucagcggaaucaaugccagcgucgugaacauccagaaagagaucgaccggcugaacgagguggccaagaaucugaacgagagccugaucgaccugcaagaacuggggaaguacgagcaguacaucaaguggcccugguacaucuggcugggcuuuaucgccggacugauugccaucgugauggucacaaucaugcuguguugcaugaccagcugcuguagcugccugaagggcuguuguagcuguggcagcugcugcaaguucgacgaggacgauucugagcccgugcugaagggcgugaaacugcacuacaccugaggacuaguguccaccugucccuccugggcugcuggauugucucguuuuccugccaaauaaacaggaucagcgcuuuacagaucuaaaaaaaaaaaaaaaaaaaaaaaaaaaaaaaaaaaaaaaaaaaaaaaaaaaaaaaaaaaaaaaaaaaaaaaaaaaaaaaaaaaaaaaaaaaaaaaaaaaa

SEQ ID NO: 25250 - RNA, 4105 nt, Artificial Sequence
  SARS-CoV-2/Wuhan/WIV05/2019__EPI_ISL_402128 spike protein mRNA gc mod (1-1273)(D614G_M1229I)
aggagacccgugacccggaaguuguacggcuacgcgacuuucccucccacaaacccucgcgcccuuccuuuccuacuugggcccggcagaaagcuuaccauguucguguuucuggugcugcugccccugguguccagccagugugugaaccugaccaccagaacacagcugccuccagccuacaccaacagcuucaccagaggcguguacuaccccgacaagguguucagauccagcgugcugcacucuacccaggaccuguuccugccuuucuucagcaacgugaccugguuccacgccauccacguguccggcaccaauggcaccaagagauucgacaaccccgugcugcccuucaacgacgggguguacuuugccagcaccgagaaguccaacaucaucagaggcuggaucuucggcaccacacuggacagcaagacccagagccugcugaucgugaacaacgccaccaacguggucaucaaagugugcgaguuccaguucugcaacgaccccuuccugggcgucuacuaccacaagaacaacaagagcuggauggaaagcgaguuccggguguacagcagcgccaacaacugcaccuucgaguacgugucccagccuuuccugauggaccuggaaggcaagcagggcaacuucaagaaccugcgcgaguucguguucaagaacaucgacggcuacuucaaaaucuacagcaagcacaccccuaucaaccucgugcgggaucugccucagggcuucucugcucuggaaccccugguggaucugcccaucggcaucaacaucacccgguuucagacacugcuggcccugcacagaagcuaccugacaccuggcgauagcagcagcggauggacagcuggugccgccgcuuacuaugugggcuaccugcagccuagaaccuuccugcugaaguacaacgagaacggcaccaucaccgacgccguggauugugcucuggauccucugagcgagacaaagugcacccugaaguccuucaccguggaaaagggcaucuaccagaccagcaacuuccgggugcagcccaccgaauccaucgugcgguuccccaauaucaccaaucugugccccuucggcgagguguucaaugccaccagauucgccucuguguacgccuggaaccggaagcggaucagcaauugcguggccgacuacuccgugcuguacaacuccgccagcuucagcaccuucaagugcuacggcguguccccuaccaagcugaacgaccugugcuucacaaacguguacgccgacagcuucgugauccggggagaugaagugcggcagauugccccuggacagacaggcaagaucgccgacuacaacuacaagcugcccgacgacuucaccggcugugugauugccuggaacagcaacaaccuggacuccaaagucggcggcaacuacaauuaccuguaccggcuguuccggaaguccaaucugaagcccuucgagcgggacaucagcaccgaaaucuaucaggccggcagcaccccuugcaacggcguggaaggcuucaacugcuacuucccacugcaguccuacggcuuucagcccacaaauggcgugggcuaucagcccuacagagugguggugcugagcuucgaacugcugcaugcuccugccacagugugcggcccuaagaaaagcaccaaucucgugaagaacaaaugcgugaacuucaacuucaacggccugaccggcaccggcgugcugacagagagcaacaagaaguuccugccauuccagcaguuuggccgggauaucgccgauaccacagacgccguuagagauccccagacacuggaaauccuggacaucaccccaugcagcuucggcggagugucugugaucaccccuggcaccaacaccagcaaucagguggcagugcuguaccagggcgugaacuguaccgaagugcccguggccauucacgccgaucagcugacaccuacauggcggguguacuccaccggcagcaauguguuucagaccagagccggcugucugaucggagccgagcacgugaacaauagcuacgagugcgacauccccaucggcgcuggcaucugugccagcuaccagacacagacaaacagccccagacgggcuagaagcguggccagccagagcaucauugccuacacaaugucucugggcgccgagaacagcguggccuacuccaacaacucuaucgcuauccccaccaacuucaccaucagcgugaccaccgagauccugccuguguccaugaccaagaccagcguggacugcaccauguacaucugcggcgauuccaccgagugcuccaaccugcugcugcaguacggcagcuucugcacccagcugaauagagcccugacagggaucgccguggaacaggacaagaacacccaagagguguucgcccaagugaagcaaaucuacaagaccccuccuaucaaggacuucggcggcuucaauuucagccagauucugcccgauccuagcaagcccagcaagcggagcuucaucgaggaccugcuguucaacaaagugacacuggccgacgccggcuucaucaagcaguauggcgauugucugggcgacauugccgccagggaucugauuugcgcccagaaguuuaacggacugacagugcugccuccucugcugaccgaugagaugaucgcccaguacacaucugcccugcuggccggcacaaucacaagcggcuggacauuuggagcuggcgccgcucugcagauccccuuugcuaugcagauggccuaccgguucaacggcaucggagugacccagaaugugcuguacgagaaccagaagcugaucgccaaccaguucaacagcgccaucggcaagauccaggacagccugagcagcacagcaagcgcccugggaaagcugcaggacguggucaaccagaaugcccaggcacugaacacccuggucaagcagcuguccuccaacuucggcgccaucagcucugugcugaacgauauccugagcagacuggacaaggucgaggccgaggugcagaucgacagacugaucacaggcagacugcagagccuccagacauacgugacccagcagcugaucagagccgccgagauuagagccucugccaaucuggccgccaccaagaugucugagugugugcugggccagagcaagagaguggacuuuugcggcaagggcuaccaccugaugagcuucccucagucugccccucacggcgugguguuucugcacgugacauaugugcccgcucaagagaagaauuucaccaccgcuccagccaucugccacgacggcaaagcccacuuuccuagagaaggcguguucguguccaacggcacccauugguucgugacacagcggaacuucuacgagccccagaucaucaccaccgacaacaccuucgugucuggcaacugcgacguugugaucggcauugugaacaauaccguguacgacccucugcagcccgagcuggacagcuucaaagaggaacuggacaaguacuuuaagaaccacacaagccccgacguggaccugggcgauaucagcggaaucaaugccagcgucgugaacauccagaaagagaucgaccggcugaacgagguggccaagaaucugaacgagagccugaucgaccugcaagaacuggggaaguacgagcaguacaucaaguggcccugguacaucuggcugggcuuuaucgccggacugauugccaucgugaucgucacaaucaugcuguguugcaugaccagcugcuguagcugccugaagggcuguuguagcuguggcagcugcugcaaguucgacgaggacgauucugagcccgugcugaagggcgugaaacugcacuacaccugaggacuaguguccaccugucccuccugggcugcuggauugucucguuuuccugccaaauaaacaggaucagcgcuuuacagaucuaaaaaaaaaaaaaaaaaaaaaaaaaaaaaaaaaaaaaaaaaaaaaaaaaaaaaaaaaaaaaaaaaaaaaaaaaaaaaaaaaaaaaaaaaaaaaaaaaaaa

SEQ ID NO: 25251 - RNA, 4099 nt, Artificial Sequence
  SARS-CoV-2/Wuhan/WIV05/2019__EPI_ISL_402128 spike protein mRNA gc mod (1-1273)(H69del_V70del_A222V_Y453F_S477N_D614G_I692V)
aggagacccgugacccggaaguuguacggcuacgcgacuuucccucccacaaacccucgcgcccuuccuuuccuacuugggcccggcagaaagcuuaccauguucguguuucuggugcugcugccccugguguccagccagugugugaaccugaccaccagaacacagcugccuccagccuacaccaacagcuucaccagaggcguguacuaccccgacaagguguucagauccagcgugcugcacucuacccaggaccuguuccugccuuucuucagcaacgugaccugguuccacgccaucuccggcaccaauggcaccaagagauucgacaaccccgugcugcccuucaacgacgggguguacuuugccagcaccgagaaguccaacaucaucagaggcuggaucuucggcaccacacuggacagcaagacccagagccugcugaucgugaacaacgccaccaacguggucaucaaagugugcgaguuccaguucugcaacgaccccuuccugggcgucuacuaccacaagaacaacaagagcuggauggaaagcgaguuccggguguacagcagcgccaacaacugcaccuucgaguacgugucccagccuuuccugauggaccuggaaggcaagcagggcaacuucaagaaccugcgcgaguucguguucaagaacaucgacggcuacuucaaaaucuacagcaagcacaccccuaucaaccucgugcgggaucugccucagggcuucucugugcuggaaccccugguggaucugcccaucggcaucaacaucacccgguuucagacacugcuggcccugcacagaagcuaccugacaccuggcgauagcagcagcggauggacagcuggugccgccgcuuacuaugugggcuaccugcagccuagaaccuuccugcugaaguacaacgagaacggcaccaucaccgacgccguggauugugcucuggauccucugagcgagacaaagugcacccugaaguccuucaccguggaaaagggcaucuaccagaccagcaacuuccgggugcagcccaccgaauccaucgugcgguuccccaauaucaccaaucugugccccuucggcgagguguucaaugccaccagauucgccucuguguacgccuggaaccggaagcggaucagcaauugcguggccgacuacuccgugcuguacaacuccgccagcuucagcaccuucaagugcuacggcguguccccuaccaagcugaacgaccugugcuucacaaacguguacgccgacagcuucgugauccggggagaugaagugcggcagauugccccuggacagacaggcaagaucgccgacuacaacuacaagcugcccgacgacuucaccggcugugugauugccuggaacagcaacaaccuggacuccaaagucggcggcaacuacaauuaccuguuccggcuguuccggaaguccaaucugaagcccuucgagcgggacaucagcaccgaaaucuaucaggccggcaacaccccuugcaacggcguggaaggcuucaacugcuacuucccacugcaguccuacggcuuucagcccacaaauggcgugggcuaucagcccuacagagugguggugcugagcuucgaacugcugcaugcuccugccacagugugcggcccuaagaaaagcaccaaucucgugaagaacaaaugcgugaacuucaacuucaacggccugaccggcaccggcgugcugacagagagcaacaagaaguuccugccauuccagcaguuuggccgggauaucgccgauaccacagacgccguuagagauccccagacacuggaaauccuggacaucaccccaugcagcuucggcggagugucugugaucaccccuggcaccaacaccagcaaucagguggcagugcuguaccagggcgugaacuguaccgaagugcccguggccauucacgccgaucagcugacaccuacauggcggguguacuccaccggcagcaauguguuucagaccagagccggcugucugaucggagccgagcacgugaacaauagcuacgagugcgacauccccaucggcgcuggcaucugugccagcuaccagacacagacaaacagccccagacgggcuagaagcguggccagccagagcgugauugccuacacaaugucucugggcgccgagaacagcguggccuacuccaacaacucuaucgcuauccccaccaacuucaccaucagcgugaccaccgagauccugccuguguccaugaccaagaccagcguggacugcaccauguacaucugcggcgauuccaccgagugcuccaaccugcugcugcaguacggcagcuucugcacccagcugaauagagcccugacagggaucgccguggaacaggacaagaacacccaagagguguucgcccaagugaagcaaaucuacaagaccccuccuaucaaggacuucggcggcuucaauuucagccagauucugcccgauccuagcaagcccagcaagcggagcuucaucgaggaccugcuguucaacaaagugacacuggccgacgccggcuucaucaagcaguauggcgauugucugggcgacauugccgccagggaucugauuugcgcccagaaguuuaacggacugacagugcugccuccucugcugaccgaugagaugaucgcccaguacacaucugcccugcuggccggcacaaucacaagcggcuggacauuuggagcuggcgccgcucugcagauccccuuugcuaugcagauggccuaccgguucaacggcaucggagugacccagaaugugcuguacgagaaccagaagcugaucgccaaccaguucaacagcgccaucggcaagauccaggacagccugagcagcacagcaagcgcccugggaaagcugcaggacguggucaaccagaaugcccaggcacugaacacccuggucaagcagcuguccuccaacuucggcgccaucagcucugugcugaacgauauccugagcagacuggacaaggucgaggccgaggugcagaucgacagacugaucacaggcagacugcagagccuccagacauacgugacccagcagcugaucagagccgccgagauuagagccucugccaaucuggccgccaccaagaugucugagugugugcugggccagagcaagagaguggacuuuugcggcaagggcuaccaccugaugagcuucccucagucugccccucacggcgugguguuucugcacgugacauaugugcccgcucaagagaagaauuucaccaccgcuccagccaucugccacgacggcaaagcccacuuuccuagagaaggcguguucguguccaacggcacccauugguucgugacacagcggaacuucuacgagccccagaucaucaccaccgacaacaccuucgugucuggcaacugcgacguugugaucggcauugugaacaauaccguguacgacccucugcagcccgagcuggacagcuucaaagaggaacuggacaaguacuuuaagaaccacacaagccccgacguggaccugggcgauaucagcggaaucaaugccagcgucgugaacauccagaaagagaucgaccggcugaacgagguggccaagaaucugaacgagagccugaucgaccugcaagaacuggggaaguacgagcaguacaucaaguggcccugguacaucuggcugggcuuuaucgccggacugauugccaucgugauggucacaaucaugcuguguugcaugaccagcugcuguagcugccugaagggcuguuguagcuguggcagcugcugcaaguucgacgaggacgauucugagcccgugcugaagggcgugaaacugcacuacaccugaggacuaguguccaccugucccuccugggcugcuggauugucucguuuuccugccaaauaaacaggaucagcgcuuuacagaucuaaaaaaaaaaaaaaaaaaaaaaaaaaaaaaaaaaaaaaaaaaaaaaaaaaaaaaaaaaaaaaaaaaaaaaaaaaaaaaaaaaaaaaaaaaaaaaaaaaaa

SEQ ID NO: 25252 - RNA, 4099 nt, Artificial Sequence
  SARS-CoV-2/Wuhan/WIV05/2019__EPI_ISL_402128 spike protein mRNA gc mod (1-1273)(H69del_V70del_Y453F_D614G_I692V_M1229I)
aggagacccgugacccggaaguuguacggcuacgcgacuuucccucccacaaacccucgcgcccuuccuuuccuacuugggcccggcagaaagcuuaccauguucguguuucuggugcugcugccccugguguccagccagugugugaaccugaccaccagaacacagcugccuccagccuacaccaacagcuucaccagaggcguguacuaccccgacaagguguucagauccagcgugcugcacucuacccaggaccuguuccugccuuucuucagcaacgugaccugguuccacgccaucuccggcaccaauggcaccaagagauucgacaaccccgugcugcccuucaacgacgggguguacuuugccagcaccgagaaguccaacaucaucagaggcuggaucuucggcaccacacuggacagcaagacccagagccugcugaucgugaacaacgccaccaacguggucaucaaagugugcgaguuccaguucugcaacgaccccuuccugggcgucuacuaccacaagaacaacaagagcuggauggaaagcgaguuccggguguacagcagcgccaacaacugcaccuucgaguacgugucccagccuuuccugauggaccuggaaggcaagcagggcaacuucaagaaccugcgcgaguucguguucaagaacaucgacggcuacuucaaaaucuacagcaagcacaccccuaucaaccucgugcgggaucugccucagggcuucucugcucuggaaccccugguggaucugcccaucggcaucaacaucacccgguuucagacacugcuggcccugcacagaagcuaccugacaccuggcgauagcagcagcggauggacagcuggugccgccgcuuacuaugugggcuaccugcagccuagaaccuuccugcugaaguacaacgagaacggcaccaucaccgacgccguggauugugcucuggauccucugagcgagacaaagugcacccugaaguccuucaccguggaaaagggcaucuaccagaccagcaacuuccgggugcagcccaccgaauccaucgugcgguuccccaauaucaccaaucugugccccuucggcgagguguucaaugccaccagauucgccucuguguacgccuggaaccggaagcggaucagcaauugcguggccgacuacuccgugcuguacaacuccgccagcuucagcaccuucaagugcuacggcguguccccuaccaagcugaacgaccugugcuucacaaacguguacgccgacagcuucgugauccggggagaugaagugcggcagauugccccuggacagacaggcaagaucgccgacuacaacuacaagcugcccgacgacuucaccggcugugugauugccuggaacagcaacaaccuggacuccaaagucggcggcaacuacaauuaccuguuccggcuguuccggaaguccaaucugaagcccuucgagcgggacaucagcaccgaaaucuaucaggccggcagcaccccuugcaacggcguggaaggcuucaacugcuacuucccacugcaguccuacggcuuucagcccacaaauggcgugggcuaucagcccuacagagugguggugcugagcuucgaacugcugcaugcuccugccacagugugcggcccuaagaaaagcaccaaucucgugaagaacaaaugcgugaacuucaacuucaacggccugaccggcaccggcgugcugacagagagcaacaagaaguuccugccauuccagcaguuuggccgggauaucgccgauaccacagacgccguuagagauccccagacacuggaaauccuggacaucaccccaugcagcuucggcggagugucugugaucaccccuggcaccaacaccagcaaucagguggcagugcuguaccagggcgugaacuguaccgaagugcccguggccauucacgccgaucagcugacaccuacauggcggguguacuccaccggcagcaauguguuucagaccagagccggcugucugaucggagccgagcacgugaacaauagcuacgagugcgacauccccaucggcgcuggcaucugugccagcuaccagacacagacaaacagccccagacgggcuagaagcguggccagccagagcgugauugccuacacaaugucucugggcgccgagaacagcguggccuacuccaacaacucuaucgcuauccccaccaacuucaccaucagcgugaccaccgagauccugccuguguccaugaccaagaccagcguggacugcaccauguacaucugcggcgauuccaccgagugcuccaaccugcugcugcaguacggcagcuucugcacccagcugaauagagcccugacagggaucgccguggaacaggacaagaacacccaagagguguucgcccaagugaagcaaaucuacaagaccccuccuaucaaggacuucggcggcuucaauuucagccagauucugcccgauccuagcaagcccagcaagcggagcuucaucgaggaccugcuguucaacaaagugacacuggccgacgccggcuucaucaagcaguauggcgauugucugggcgacauugccgccagggaucugauuugcgcccagaaguuuaacggacugacagugcugccuccucugcugaccgaugagaugaucgcccaguacacaucugcccugcuggccggcacaaucacaagcggcuggacauuuggagcuggcgccgcucugcagauccccuuugcuaugcagauggccuaccgguucaacggcaucggagugacccagaaugugcuguacgagaaccagaagcugaucgccaaccaguucaacagcgccaucggcaagauccaggacagccugagcagcacagcaagcgcccugggaaagcugcaggacguggucaaccagaaugcccaggcacugaacacccuggucaagcagcuguccuccaacuucggcgccaucagcucugugcugaacgauauccugagcagacuggacaaggucgaggccgaggugcagaucgacagacugaucacaggcagacugcagagccuccagacauacgugacccagcagcugaucagagccgccgagauuagagccucugccaaucuggccgccaccaagaugucugagugugugcugggccagagcaagagaguggacuuuugcggcaagggcuaccaccugaugagcuucccucagucugccccucacggcgugguguuucugcacgugacauaugugcccgcucaagagaagaauuucaccaccgcuccagccaucugccacgacggcaaagcccacuuuccuagagaaggcguguucguguccaacggcacccauugguucgugacacagcggaacuucuacgagccccagaucaucaccaccgacaacaccuucgugucuggcaacugcgacguugugaucggcauugugaacaauaccguguacgacccucugcagcccgagcuggacagcuucaaagaggaacuggacaaguacuuuaagaaccacacaagccccgacguggaccugggcgauaucagcggaaucaaugccagcgucgugaacauccagaaagagaucgaccggcugaacgagguggccaagaaucugaacgagagccugaucgaccugcaagaacuggggaaguacgagcaguacaucaaguggcccugguacaucuggcugggcuuuaucgccggacugauugccaucgugaucgucacaaucaugcuguguugcaugaccagcugcuguagcugccugaagggcuguuguagcuguggcagcugcugcaaguucgacgaggacgauucugagcccgugcugaagggcgugaaacugcacuacaccugaggacuaguguccaccugucccuccugggcugcuggauugucucguuuuccugccaaauaaacaggaucagcgcuuuacagaucuaaaaaaaaaaaaaaaaaaaaaaaaaaaaaaaaaaaaaaaaaaaaaaaaaaaaaaaaaaaaaaaaaaaaaaaaaaaaaaaaaaaaaaaaaaaaaaaaaaaa

SEQ ID NO: 25253 - RNA, 4096 nt, Artificial Sequence
  SARS-CoV-2/Wuhan/WIV05/2019__EPI_ISL_402128 spike protein mRNA gc mod (1-1273)(H69del_V70del_Y144del_N501Y_A570D_D614G_P681H_T716I_S982 A_D1118H)
aggagacccgugacccggaaguuguacggcuacgcgacuuucccucccacaaacccucgcgcccuuccuuuccuacuugggcccggcagaaagcuuaccauguucguguuucuggugcugcugccccugguguccagccagugugugaaccugaccaccagaacacagcugccuccagccuacaccaacagcuucaccagaggcguguacuaccccgacaagguguucagauccagcgugcugcacucuacccaggaccuguuccugccuuucuucagcaacgugaccugguuccacgccaucuccggcaccaauggcaccaagagauucgacaaccccgugcugcccuucaacgacgggguguacuuugccagcaccgagaaguccaacaucaucagaggcuggaucuucggcaccacacuggacagcaagacccagagccugcugaucgugaacaacgccaccaacguggucaucaaagugugcgaguuccaguucugcaacgaccccuuccugggcgucuaccacaagaacaacaagagcuggauggaaagcgaguuccggguguacagcagcgccaacaacugcaccuucgaguacgugucccagccuuuccugauggaccuggaaggcaagcagggcaacuucaagaaccugcgcgaguucguguucaagaacaucgacggcuacuucaaaaucuacagcaagcacaccccuaucaaccucgugcgggaucugccucagggcuucucugcucuggaaccccugguggaucugcccaucggcaucaacaucacccgguuucagacacugcuggcccugcacagaagcuaccugacaccuggcgauagcagcagcggauggacagcuggugccgccgcuuacuaugugggcuaccugcagccuagaaccuuccugcugaaguacaacgagaacggcaccaucaccgacgccguggauugugcucuggauccucugagcgagacaaagugcacccugaaguccuucaccguggaaaagggcaucuaccagaccagcaacuuccgggugcagcccaccgaauccaucgugcgguuccccaauaucaccaaucugugccccuucggcgagguguucaaugccaccagauucgccucuguguacgccuggaaccggaagcggaucagcaauugcguggccgacuacuccgugcuguacaacuccgccagcuucagcaccuucaagugcuacggcguguccccuaccaagcugaacgaccugugcuucacaaacguguacgccgacagcuucgugauccggggagaugaagugcggcagauugccccuggacagacaggcaagaucgccgacuacaacuacaagcugcccgacgacuucaccggcugugugauugccuggaacagcaacaaccuggacuccaaagucggcggcaacuacaauuaccuguaccggcuguuccggaaguccaaucugaagcccuucgagcgggacaucagcaccgaaaucuaucaggccggcagcaccccuugcaacggcguggaaggcuucaacugcuacuucccacugcaguccuacggcuuucagcccacauacggcgugggcuaucagcccuacagagugguggugcugagcuucgaacugcugcaugcuccugccacagugugcggcccuaagaaaagcaccaaucucgugaagaacaaaugcgugaacuucaacuucaacggccugaccggcaccggcgugcugacagagagcaacaagaaguuccugccauuccagcaguuuggccgggauaucgacgauaccacagacgccguuagagauccccagacacuggaaauccuggacaucaccccaugcagcuucggcggagugucugugaucaccccuggcaccaacaccagcaaucagguggcagugcuguaccagggcgugaacuguaccgaagugcccguggccauucacgccgaucagcugacaccuacauggcggguguacuccaccggcagcaauguguuucagaccagagccggcugucugaucggagccgagcacgugaacaauagcuacgagugcgacauccccaucggcgcuggcaucugugccagcuaccagacacagacaaacagccacagacgggcuagaagcguggccagccagagcaucauugccuacacaaugucucugggcgccgagaacagcguggccuacuccaacaacucuaucgcuauccccaucaacuucaccaucagcgugaccaccgagauccugccuguguccaugaccaagaccagcguggacugcaccauguacaucugcggcgauuccaccgagugcuccaaccugcugcugcaguacggcagcuucugcacccagcugaauagagcccugacagggaucgccguggaacaggacaagaacacccaagagguguucgcccaagugaagcaaaucuacaagaccccuccuaucaaggacuucggcggcuucaauuucagccagauucugcccgauccuagcaagcccagcaagcggagcuucaucgaggaccugcuguucaacaaagugacacuggccgacgccggcuucaucaagcaguauggcgauugucugggcgacauugccgccagggaucugauuugcgcccagaaguuuaacggacugacagugcugccuccucugcugaccgaugagaugaucgcccaguacacaucugcccugcuggccggcacaaucacaagcggcuggacauuuggagcuggcgccgcucugcagauccccuuugcuaugcagauggccuaccgguucaacggcaucggagugacccagaaugugcuguacgagaaccagaagcugaucgccaaccaguucaacagcgccaucggcaagauccaggacagccugagcagcacagcaagcgcccugggaaagcugcaggacguggucaaccagaaugcccaggcacugaacacccuggucaagcagcuguccuccaacuucggcgccaucagcucugugcugaacgauauccuggccagacuggacaaggucgaggccgaggugcagaucgacagacugaucacaggcagacugcagagccuccagacauacgugacccagcagcugaucagagccgccgagauuagagccucugccaaucuggccgccaccaagaugucugagugugugcugggccagagcaagagaguggacuuuugcggcaagggcuaccaccugaugagcuucccucagucugccccucacggcgugguguuucugcacgugacauaugugcccgcucaagagaagaauuucaccaccgcuccagccaucugccacgacggcaaagcccacuuuccuagagaaggcguguucguguccaacggcacccauugguucgugacacagcggaacuucuacgagccccagaucaucaccacccacaacaccuucgugucuggcaacugcgacguugugaucggcauugugaacaauaccguguacgacccucugcagcccgagcuggacagcuucaaagaggaacuggacaaguacuuuaagaaccacacaagccccgacguggaccugggcgauaucagcggaaucaaugccagcgucgugaacauccagaaagagaucgaccggcugaacgagguggccaagaaucugaacgagagccugaucgaccugcaagaacuggggaaguacgagcaguacaucaaguggcccugguacaucuggcugggcuuuaucgccggacugauugccaucgugauggucacaaucaugcuguguugcaugaccagcugcuguagcugccugaagggcuguuguagcuguggcagcugcugcaaguucgacgaggacgauucugagcccgugcugaagggcgugaaacugcacuacaccugaggacuaguguccaccugucccuccugggcugcuggauugucucguuuuccugccaaauaaacaggaucagcgcuuuacagaucuaaaaaaaaaaaaaaaaaaaaaaaaaaaaaaaaaaaaaaaaaaaaaaaaaaaaaaaaaaaaaaaaaaaaaaaaaaaaaaaaaaaaaaaaaaaaaaaaaaaa

SEQ ID NO: 25254 - RNA, 4105 nt, Artificial Sequence
  SARS-CoV-2/Wuhan/WIV05/2019__EPI_ISL_402128 spike protein mRNA gc mod (1-1273)(K417N_E484K_N501Y_D614G)
aggagacccgugacccggaaguuguacggcuacgcgacuuucccucccacaaacccucgcgcccuuccuuuccuacuugggcccggcagaaagcuuaccauguucguguuucuggugcugcugccccugguguccagccagugugugaaccugaccaccagaacacagcugccuccagccuacaccaacagcuucaccagaggcguguacuaccccgacaagguguucagauccagcgugcugcacucuacccaggaccuguuccugccuuucuucagcaacgugaccugguuccacgccauccacguguccggcaccaauggcaccaagagauucgacaaccccgugcugcccuucaacgacgggguguacuuugccagcaccgagaaguccaacaucaucagaggcuggaucuucggcaccacacuggacagcaagacccagagccugcugaucgugaacaacgccaccaacguggucaucaaagugugcgaguuccaguucugcaacgaccccuuccugggcgucuacuaccacaagaacaacaagagcuggauggaaagcgaguuccggguguacagcagcgccaacaacugcaccuucgaguacgugucccagccuuuccugauggaccuggaaggcaagcagggcaacuucaagaaccugcgcgaguucguguucaagaacaucgacggcuacuucaaaaucuacagcaagcacaccccuaucaaccucgugcgggaucugccucagggcuucucugcucuggaaccccugguggaucugcccaucggcaucaacaucacccgguuucagacacugcuggcccugcacagaagcuaccugacaccuggcgauagcagcagcggauggacagcuggugccgccgcuuacuaugugggcuaccugcagccuagaaccuuccugcugaaguacaacgagaacggcaccaucaccgacgccguggauugugcucuggauccucugagcgagacaaagugcacccugaaguccuucaccguggaaaagggcaucuaccagaccagcaacuuccgggugcagcccaccgaauccaucgugcgguuccccaauaucaccaaucugugccccuucggcgagguguucaaugccaccagauucgccucuguguacgccuggaaccggaagcggaucagcaauugcguggccgacuacuccgugcuguacaacuccgccagcuucagcaccuucaagugcuacggcguguccccuaccaagcugaacgaccugugcuucacaaacguguacgccgacagcuucgugauccggggagaugaagugcggcagauugccccuggacagacaggcaacaucgccgacuacaacuacaagcugcccgacgacuucaccggcugugugauugccuggaacagcaacaaccuggacuccaaagucggcggcaacuacaauuaccuguaccggcuguuccggaaguccaaucugaagcccuucgagcgggacaucagcaccgaaaucuaucaggccggcagcaccccuugcaacggcgugaagggcuucaacugcuacuucccacugcaguccuacggcuuucagcccacauacggcgugggcuaucagcccuacagagugguggugcugagcuucgaacugcugcaugcuccugccacagugugcggcccuaagaaaagcaccaaucucgugaagaacaaaugcgugaacuucaacuucaacggccugaccggcaccggcgugcugacagagagcaacaagaaguuccugccauuccagcaguuuggccgggauaucgccgauaccacagacgccguuagagauccccagacacuggaaauccuggacaucaccccaugcagcuucggcggagugucugugaucaccccuggcaccaacaccagcaaucagguggcagugcuguaccagggcgugaacuguaccgaagugcccguggccauucacgccgaucagcugacaccuacauggcggguguacuccaccggcagcaauguguuucagaccagagccggcugucugaucggagccgagcacgugaacaauagcuacgagugcgacauccccaucggcgcuggcaucugugccagcuaccagacacagacaaacagccccagacgggcuagaagcguggccagccagagcaucauugccuacacaaugucucugggcgccgagaacagcguggccuacuccaacaacucuaucgcuauccccaccaacuucaccaucagcgugaccaccgagauccugccuguguccaugaccaagaccagcguggacugcaccauguacaucugcggcgauuccaccgagugcuccaaccugcugcugcaguacggcagcuucugcacccagcugaauagagcccugacagggaucgccguggaacaggacaagaacacccaagagguguucgcccaagugaagcaaaucuacaagaccccuccuaucaaggacuucggcggcuucaauuucagccagauucugcccgauccuagcaagcccagcaagcggagcuucaucgaggaccugcuguucaacaaagugacacuggccgacgccggcuucaucaagcaguauggcgauugucugggcgacauugccgccagggaucugauuugcgcccagaaguuuaacggacugacagugcugccuccucugcugaccgaugagaugaucgcccaguacacaucugcccugcuggccggcacaaucacaagcggcuggacauuuggagcuggcgccgcucugcagauccccuuugcuaugcagauggccuaccgguucaacggcaucggagugacccagaaugugcuguacgagaaccagaagcugaucgccaaccaguucaacagcgccaucggcaagauccaggacagccugagcagcacagcaagcgcccugggaaagcugcaggacguggucaaccagaaugcccaggcacugaacacccuggucaagcagcuguccuccaacuucggcgccaucagcucugugcugaacgauauccugagcagacuggacaaggucgaggccgaggugcagaucgacagacugaucacaggcagacugcagagccuccagacauacgugacccagcagcugaucagagccgccgagauuagagccucugccaaucuggccgccaccaagaugucugagugugugcugggccagagcaagagaguggacuuuugcggcaagggcuaccaccugaugagcuucccucagucugccccucacggcgugguguuucugcacgugacauaugugcccgcucaagagaagaauuucaccaccgcuccagccaucugccacgacggcaaagcccacuuuccuagagaaggcguguucguguccaacggcacccauugguucgugacacagcggaacuucuacgagccccagaucaucaccaccgacaacaccuucgugucuggcaacugcgacguugugaucggcauugugaacaauaccguguacgacccucugcagcccgagcuggacagcuucaaagaggaacuggacaaguacuuuaagaaccacacaagccccgacguggaccugggcgauaucagcggaaucaaugccagcgucgugaacauccagaaagagaucgaccggcugaacgagguggccaagaaucugaacgagagccugaucgaccugcaagaacuggggaaguacgagcaguacaucaaguggcccugguacaucuggcugggcuuuaucgccggacugauugccaucgugauggucacaaucaugcuguguugcaugaccagcugcuguagcugccugaagggcuguuguagcuguggcagcugcugcaaguucgacgaggacgauucugagcccgugcugaagggcgugaaacugcacuacaccugaggacuaguguccaccugucccuccugggcugcuggauugucucguuuuccugccaaauaaacaggaucagcgcuuuacagaucuaaaaaaaaaaaaaaaaaaaaaaaaaaaaaaaaaaaaaaaaaaaaaaaaaaaaaaaaaaaaaaaaaaaaaaaaaaaaaaaaaaaaaaaaaaaaaaaaaaaa

SEQ ID NO: 25255 - RNA, 4096 nt, Artificial Sequence
  SARS-CoV-2/Wuhan/WIV05/2019__EPI_ISL_402128 spike protein mRNA gc mod (1-1273)(L18F_D80A_D215G_L242del_A243del_L244del_R246I_K417N_E484 K_N501Y_D614G_A701V)
aggagacccgugacccggaaguuguacggcuacgcgacuuucccucccacaaacccucgcgcccuuccuuuccuacuugggcccggcagaaagcuuaccauguucguguuucuggugcugcugccccugguguccagccagugugugaacuucaccaccagaacacagcugccuccagccuacaccaacagcuucaccagaggcguguacuaccccgacaagguguucagauccagcgugcugcacucuacccaggaccuguuccugccuuucuucagcaacgugaccugguuccacgccauccacguguccggcaccaauggcaccaagagauucgccaaccccgugcugcccuucaacgacgggguguacuuugccagcaccgagaaguccaacaucaucagaggcuggaucuucggcaccacacuggacagcaagacccagagccugcugaucgugaacaacgccaccaacguggucaucaaagugugcgaguuccaguucugcaacgaccccuuccugggcgucuacuaccacaagaacaacaagagcuggauggaaagcgaguuccggguguacagcagcgccaacaacugcaccuucgaguacgugucccagccuuuccugauggaccuggaaggcaagcagggcaacuucaagaaccugcgcgaguucguguucaagaacaucgacggcuacuucaaaaucuacagcaagcacaccccuaucaaccucgugcggggccugccucagggcuucucugcucuggaaccccugguggaucugcccaucggcaucaacaucacccgguuucagacacugcacaucagcuaccugacaccuggcgauagcagcagcggauggacagcuggugccgccgcuuacuaugugggcuaccugcagccuagaaccuuccugcugaaguacaacgagaacggcaccaucaccgacgccguggauugugcucuggauccucugagcgagacaaagugcacccugaaguccuucaccguggaaaagggcaucuaccagaccagcaacuuccgggugcagcccaccgaauccaucgugcgguuccccaauaucaccaaucugugccccuucggcgagguguucaaugccaccagauucgccucuguguacgccuggaaccggaagcggaucagcaauugcguggccgacuacuccgugcuguacaacuccgccagcuucagcaccuucaagugcuacggcguguccccuaccaagcugaacgaccugugcuucacaaacguguacgccgacagcuucgugauccggggagaugaagugcggcagauugccccuggacagacaggcaacaucgccgacuacaacuacaagcugcccgacgacuucaccggcugugugauugccuggaacagcaacaaccuggacuccaaagucggcggcaacuacaauuaccuguaccggcuguuccggaaguccaaucugaagcccuucgagcgggacaucagcaccgaaaucuaucaggccggcagcaccccuugcaacggcgugaagggcuucaacugcuacuucccacugcaguccuacggcuuucagcccacauacggcgugggcuaucagcccuacagagugguggugcugagcuucgaacugcugcaugcuccugccacagugugcggcccuaagaaaagcaccaaucucgugaagaacaaaugcgugaacuucaacuucaacggccugaccggcaccggcgugcugacagagagcaacaagaaguuccugccauuccagcaguuuggccgggauaucgccgauaccacagacgccguuagagauccccagacacuggaaauccuggacaucaccccaugcagcuucggcggagugucugugaucaccccuggcaccaacaccagcaaucagguggcagugcuguaccagggcgugaacuguaccgaagugcccguggccauucacgccgaucagcugacaccuacauggcggguguacuccaccggcagcaauguguuucagaccagagccggcugucugaucggagccgagcacgugaacaauagcuacgagugcgacauccccaucggcgcuggcaucugugccagcuaccagacacagacaaacagccccagacgggcuagaagcguggccagccagagcaucauugccuacacaaugucucugggcguggagaacagcguggccuacuccaacaacucuaucgcuauccccaccaacuucaccaucagcgugaccaccgagauccugccuguguccaugaccaagaccagcguggacugcaccauguacaucugcggcgauuccaccgagugcuccaaccugcugcugcaguacggcagcuucugcacccagcugaauagagcccugacagggaucgccguggaacaggacaagaacacccaagagguguucgcccaagugaagcaaaucuacaagaccccuccuaucaaggacuucggcggcuucaauuucagccagauucugcccgauccuagcaagcccagcaagcggagcuucaucgaggaccugcuguucaacaaagugacacuggccgacgccggcuucaucaagcaguauggcgauugucugggcgacauugccgccagggaucugauuugcgcccagaaguuuaacggacugacagugcugccuccucugcugaccgaugagaugaucgcccaguacacaucugcccugcuggccggcacaaucacaagcggcuggacauuuggagcuggcgccgcucugcagauccccuuugcuaugcagauggccuaccgguucaacggcaucggagugacccagaaugugcuguacgagaaccagaagcugaucgccaaccaguucaacagcgccaucggcaagauccaggacagccugagcagcacagcaagcgcccugggaaagcugcaggacguggucaaccagaaugcccaggcacugaacacccuggucaagcagcuguccuccaacuucggcgccaucagcucugugcugaacgauauccugagcagacuggacaaggucgaggccgaggugcagaucgacagacugaucacaggcagacugcagagccuccagacauacgugacccagcagcugaucagagccgccgagauuagagccucugccaaucuggccgccaccaagaugucugagugugugcugggccagagcaagagaguggacuuuugcggcaagggcuaccaccugaugagcuucccucagucugccccucacggcgugguguuucugcacgugacauaugugcccgcucaagagaagaauuucaccaccgcuccagccaucugccacgacggcaaagcccacuuuccuagagaaggcguguucguguccaacggcacccauugguucgugacacagcggaacuucuacgagccccagaucaucaccaccgacaacaccuucgugucuggcaacugcgacguugugaucggcauugugaacaauaccguguacgacccucugcagcccgagcuggacagcuucaaagaggaacuggacaaguacuuuaagaaccacacaagccccgacguggaccugggcgauaucagcggaaucaaugccagcgucgugaacauccagaaagagaucgaccggcugaacgagguggccaagaaucugaacgagagccugaucgaccugcaagaacuggggaaguacgagcaguacaucaaguggcccugguacaucuggcugggcuuuaucgccggacugauugccaucgugauggucacaaucaugcuguguugcaugaccagcugcuguagcugccugaagggcuguuguagcuguggcagcugcugcaaguucgacgaggacgauucugagcccgugcugaagggcgugaaacugcacuacaccugaggacuaguguccaccugucccuccugggcugcuggauugucucguuuuccugccaaauaaacaggaucagcgcuuuacagaucuaaaaaaaaaaaaaaaaaaaaaaaaaaaaaaaaaaaaaaaaaaaaaaaaaaaaaaaaaaaaaaaaaaaaaaaaaaaaaaaaaaaaaaaaaaaaaaaaaaaa

SEQ ID NO: 25256 - RNA, 4105 nt, Artificial Sequence
  SARS-CoV-2/Wuhan/WIV05/2019__EPI_ISL_402128 spike protein mRNA gc mod (1-1273)(E484K_D614G)
aggagacccgugacccggaaguuguacggcuacgcgacuuucccucccacaaacccucgcgcccuuccuuuccuacuugggcccggcagaaagcuuaccauguucguguuucuggugcugcugccccugguguccagccagugugugaaccugaccaccagaacacagcugccuccagccuacaccaacagcuucaccagaggcguguacuaccccgacaagguguucagauccagcgugcugcacucuacccaggaccuguuccugccuuucuucagcaacgugaccugguuccacgccauccacguguccggcaccaauggcaccaagagauucgacaaccccgugcugcccuucaacgacgggguguacuuugccagcaccgagaaguccaacaucaucagaggcuggaucuucggcaccacacuggacagcaagacccagagccugcugaucgugaacaacgccaccaacguggucaucaaagugugcgaguuccaguucugcaacgaccccuuccugggcgucuacuaccacaagaacaacaagagcuggauggaaagcgaguuccggguguacagcagcgccaacaacugcaccuucgaguacgugucccagccuuuccugauggaccuggaaggcaagcagggcaacuucaagaaccugcgcgaguucguguucaagaacaucgacggcuacuucaaaaucuacagcaagcacaccccuaucaaccucgugcgggaucugccucagggcuucucugcucuggaaccccugguggaucugcccaucggcaucaacaucacccgguuucagacacugcuggcccugcacagaagcuaccugacaccuggcgauagcagcagcggauggacagcuggugccgccgcuuacuaugugggcuaccugcagccuagaaccuuccugcugaaguacaacgagaacggcaccaucaccgacgccguggauugugcucuggauccucugagcgagacaaagugcacccugaaguccuucaccguggaaaagggcaucuaccagaccagcaacuuccgggugcagcccaccgaauccaucgugcgguuccccaauaucaccaaucugugccccuucggcgagguguucaaugccaccagauucgccucuguguacgccuggaaccggaagcggaucagcaauugcguggccgacuacuccgugcuguacaacuccgccagcuucagcaccuucaagugcuacggcguguccccuaccaagcugaacgaccugugcuucacaaacguguacgccgacagcuucgugauccggggagaugaagugcggcagauugccccuggacagacaggcaagaucgccgacuacaacuacaagcugcccgacgacuucaccggcugugugauugccuggaacagcaacaaccuggacuccaaagucggcggcaacuacaauuaccuguaccggcuguuccggaaguccaaucugaagcccuucgagcgggacaucagcaccgaaaucuaucaggccggcagcaccccuugcaacggcgugaagggcuucaacugcuacuucccacugcaguccuacggcuuucagcccacaaauggcgugggcuaucagcccuacagagugguggugcugagcuucgaacugcugcaugcuccugccacagugugcggcccuaagaaaagcaccaaucucgugaagaacaaaugcgugaacuucaacuucaacggccugaccggcaccggcgugcugacagagagcaacaagaaguuccugccauuccagcaguuuggccgggauaucgccgauaccacagacgccguuagagauccccagacacuggaaauccuggacaucaccccaugcagcuucggcggagugucugugaucaccccuggcaccaacaccagcaaucagguggcagugcuguaccagggcgugaacuguaccgaagugcccguggccauucacgccgaucagcugacaccuacauggcggguguacuccaccggcagcaauguguuucagaccagagccggcugucugaucggagccgagcacgugaacaauagcuacgagugcgacauccccaucggcgcuggcaucugugccagcuaccagacacagacaaacagccccagacgggcuagaagcguggccagccagagcaucauugccuacacaaugucucugggcgccgagaacagcguggccuacuccaacaacucuaucgcuauccccaccaacuucaccaucagcgugaccaccgagauccugccuguguccaugaccaagaccagcguggacugcaccauguacaucugcggcgauuccaccgagugcuccaaccugcugcugcaguacggcagcuucugcacccagcugaauagagcccugacagggaucgccguggaacaggacaagaacacccaagagguguucgcccaagugaagcaaaucuacaagaccccuccuaucaaggacuucggcggcuucaauuucagccagauucugcccgauccuagcaagcccagcaagcggagcuucaucgaggaccugcuguucaacaaagugacacuggccgacgccggcuucaucaagcaguauggcgauugucugggcgacauugccgccagggaucugauuugcgcccagaaguuuaacggacugacagugcugccuccucugcugaccgaugagaugaucgcccaguacacaucugcccugcuggccggcacaaucacaagcggcuggacauuuggagcuggcgccgcucugcagauccccuuugcuaugcagauggccuaccgguucaacggcaucggagugacccagaaugugcuguacgagaaccagaagcugaucgccaaccaguucaacagcgccaucggcaagauccaggacagccugagcagcacagcaagcgcccugggaaagcugcaggacguggucaaccagaaugcccaggcacugaacacccuggucaagcagcuguccuccaacuucggcgccaucagcucugugcugaacgauauccugagcagacuggacaaggucgaggccgaggugcagaucgacagacugaucacaggcagacugcagagccuccagacauacgugacccagcagcugaucagagccgccgagauuagagccucugccaaucuggccgccaccaagaugucugagugugugcugggccagagcaagagaguggacuuuugcggcaagggcuaccaccugaugagcuucccucagucugccccucacggcgugguguuucugcacgugacauaugugcccgcucaagagaagaauuucaccaccgcuccagccaucugccacgacggcaaagcccacuuuccuagagaaggcguguucguguccaacggcacccauugguucgugacacagcggaacuucuacgagccccagaucaucaccaccgacaacaccuucgugucuggcaacugcgacguugugaucggcauugugaacaauaccguguacgacccucugcagcccgagcuggacagcuucaaagaggaacuggacaaguacuuuaagaaccacacaagccccgacguggaccugggcgauaucagcggaaucaaugccagcgucgugaacauccagaaagagaucgaccggcugaacgagguggccaagaaucugaacgagagccugaucgaccugcaagaacuggggaaguacgagcaguacaucaaguggcccugguacaucuggcugggcuuuaucgccggacugauugccaucgugauggucacaaucaugcuguguugcaugaccagcugcuguagcugccugaagggcuguuguagcuguggcagcugcugcaaguucgacgaggacgauucugagcccgugcugaagggcgugaaacugcacuacaccugaggacuaguguccaccugucccuccugggcugcuggauugucucguuuuccugccaaauaaacaggaucagcgcuuuacagaucuaaaaaaaaaaaaaaaaaaaaaaaaaaaaaaaaaaaaaaaaaaaaaaaaaaaaaaaaaaaaaaaaaaaaaaaaaaaaaaaaaaaaaaaaaaaaaaaaaaaa

SEQ ID NO: 25257 - RNA, 4105 nt, Artificial Sequence
  SARS-CoV-2/Wuhan/WIV05/2019__EPI_ISL_402128 spike protein mRNA gc mod (1-1273)(L18F_T20N_P26S_D138Y_R190S_K417T_E484K_N501Y_D614G_H655Y _T1027I)
aggagacccgugacccggaaguuguacggcuacgcgacuuucccucccacaaacccucgcgcccuuccuuuccuacuugggcccggcagaaagcuuaccauguucguguuucuggugcugcugccccugguguccagccagugugugaacuucaccaacagaacacagcugccuagcgccuacaccaacagcuucaccagaggcguguacuaccccgacaagguguucagauccagcgugcugcacucuacccaggaccuguuccugccuuucuucagcaacgugaccugguuccacgccauccacguguccggcaccaauggcaccaagagauucgacaaccccgugcugcccuucaacgacgggguguacuuugccagcaccgagaaguccaacaucaucagaggcuggaucuucggcaccacacuggacagcaagacccagagccugcugaucgugaacaacgccaccaacguggucaucaaagugugcgaguuccaguucugcaacuaccccuuccugggcgucuacuaccacaagaacaacaagagcuggauggaaagcgaguuccggguguacagcagcgccaacaacugcaccuucgaguacgugucccagccuuuccugauggaccuggaaggcaagcagggcaacuucaagaaccugagcgaguucguguucaagaacaucgacggcuacuucaaaaucuacagcaagcacaccccuaucaaccucgugcgggaucugccucagggcuucucugcucuggaaccccugguggaucugcccaucggcaucaacaucacccgguuucagacacugcuggcccugcacagaagcuaccugacaccuggcgauagcagcagcggauggacagcuggugccgccgcuuacuaugugggcuaccugcagccuagaaccuuccugcugaaguacaacgagaacggcaccaucaccgacgccguggauugugcucuggauccucugagcgagacaaagugcacccugaaguccuucaccguggaaaagggcaucuaccagaccagcaacuuccgggugcagcccaccgaauccaucgugcgguuccccaauaucaccaaucugugccccuucggcgagguguucaaugccaccagauucgccucuguguacgccuggaaccggaagcggaucagcaauugcguggccgacuacuccgugcuguacaacuccgccagcuucagcaccuucaagugcuacggcguguccccuaccaagcugaacgaccugugcuucacaaacguguacgccgacagcuucgugauccggggagaugaagugcggcagauugccccuggacagacaggcaccaucgccgacuacaacuacaagcugcccgacgacuucaccggcugugugauugccuggaacagcaacaaccuggacuccaaagucggcggcaacuacaauuaccuguaccggcuguuccggaaguccaaucugaagcccuucgagcgggacaucagcaccgaaaucuaucaggccggcagcaccccuugcaacggcgugaagggcuucaacugcuacuucccacugcaguccuacggcuuucagcccacauacggcgugggcuaucagcccuacagagugguggugcugagcuucgaacugcugcaugcuccugccacagugugcggcccuaagaaaagcaccaaucucgugaagaacaaaugcgugaacuucaacuucaacggccugaccggcaccggcgugcugacagagagcaacaagaaguuccugccauuccagcaguuuggccgggauaucgccgauaccacagacgccguuagagauccccagacacuggaaauccuggacaucaccccaugcagcuucggcggagugucugugaucaccccuggcaccaacaccagcaaucagguggcagugcuguaccagggcgugaacuguaccgaagugcccguggccauucacgccgaucagcugacaccuacauggcggguguacuccaccggcagcaauguguuucagaccagagccggcugucugaucggagccgaguacgugaacaauagcuacgagugcgacauccccaucggcgcuggcaucugugccagcuaccagacacagacaaacagccccagacgggcuagaagcguggccagccagagcaucauugccuacacaaugucucugggcgccgagaacagcguggccuacuccaacaacucuaucgcuauccccaccaacuucaccaucagcgugaccaccgagauccugccuguguccaugaccaagaccagcguggacugcaccauguacaucugcggcgauuccaccgagugcuccaaccugcugcugcaguacggcagcuucugcacccagcugaauagagcccugacagggaucgccguggaacaggacaagaacacccaagagguguucgcccaagugaagcaaaucuacaagaccccuccuaucaaggacuucggcggcuucaauuucagccagauucugcccgauccuagcaagcccagcaagcggagcuucaucgaggaccugcuguucaacaaagugacacuggccgacgccggcuucaucaagcaguauggcgauugucugggcgacauugccgccagggaucugauuugcgcccagaaguuuaacggacugacagugcugccuccucugcugaccgaugagaugaucgcccaguacacaucugcccugcuggccggcacaaucacaagcggcuggacauuuggagcuggcgccgcucugcagauccccuuugcuaugcagauggccuaccgguucaacggcaucggagugacccagaaugugcuguacgagaaccagaagcugaucgccaaccaguucaacagcgccaucggcaagauccaggacagccugagcagcacagcaagcgcccugggaaagcugcaggacguggucaaccagaaugcccaggcacugaacacccuggucaagcagcuguccuccaacuucggcgccaucagcucugugcugaacgauauccugagcagacuggacaaggucgaggccgaggugcagaucgacagacugaucacaggcagacugcagagccuccagacauacgugacccagcagcugaucagagccgccgagauuagagccucugccaaucuggccgccaucaagaugucugagugugugcugggccagagcaagagaguggacuuuugcggcaagggcuaccaccugaugagcuucccucagucugccccucacggcgugguguuucugcacgugacauaugugcccgcucaagagaagaauuucaccaccgcuccagccaucugccacgacggcaaagcccacuuuccuagagaaggcguguucguguccaacggcacccauugguucgugacacagcggaacuucuacgagccccagaucaucaccaccgacaacaccuucgugucuggcaacugcgacguugugaucggcauugugaacaauaccguguacgacccucugcagcccgagcuggacagcuucaaagaggaacuggacaaguacuuuaagaaccacacaagccccgacguggaccugggcgauaucagcggaaucaaugccagcgucgugaacauccagaaagagaucgaccggcugaacgagguggccaagaaucugaacgagagccugaucgaccugcaagaacuggggaaguacgagcaguacaucaaguggcccugguacaucuggcugggcuuuaucgccggacugauugccaucgugauggucacaaucaugcuguguugcaugaccagcugcuguagcugccugaagggcuguuguagcuguggcagcugcugcaaguucgacgaggacgauucugagcccgugcugaagggcgugaaacugcacuacaccugaggacuaguguccaccugucccuccugggcugcuggauugucucguuuuccugccaaauaaacaggaucagcgcuuuacagaucuaaaaaaaaaaaaaaaaaaaaaaaaaaaaaaaaaaaaaaaaaaaaaaaaaaaaaaaaaaaaaaaaaaaaaaaaaaaaaaaaaaaaaaaaaaaaaaaaaaaa

SEQ ID NO: 25258 - RNA, 4105 nt, Artificial Sequence
  SARS-CoV-2/Wuhan/WIV05/2019__EPI_ISL_402128 spike protein mRNA gc mod (1-1273)(S13I_W152C_L452R_D614G)
aggagacccgugacccggaaguuguacggcuacgcgacuuucccucccacaaacccucgcgcccuuccuuuccuacuugggcccggcagaaagcuuaccauguucguguuucuggugcugcugccccugguguccauccagugugugaaccugaccaccagaacacagcugccuccagccuacaccaacagcuucaccagaggcguguacuaccccgacaagguguucagauccagcgugcugcacucuacccaggaccuguuccugccuuucuucagcaacgugaccugguuccacgccauccacguguccggcaccaauggcaccaagagauucgacaaccccgugcugcccuucaacgacgggguguacuuugccagcaccgagaaguccaacaucaucagaggcuggaucuucggcaccacacuggacagcaagacccagagccugcugaucgugaacaacgccaccaacguggucaucaaagugugcgaguuccaguucugcaacgaccccuuccugggcgucuacuaccacaagaacaacaagagcugcauggaaagcgaguuccggguguacagcagcgccaacaacugcaccuucgaguacgugucccagccuuuccugauggaccuggaaggcaagcagggcaacuucaagaaccugcgcgaguucguguucaagaacaucgacggcuacuucaaaaucuacagcaagcacaccccuaucaaccucgugcgggaucugccucagggcuucucugcucuggaaccccugguggaucugcccaucggcaucaacaucacccgguuucagacacugcuggcccugcacagaagcuaccugacaccuggcgauagcagcagcggauggacagcuggugccgccgcuuacuaugugggcuaccugcagccuagaaccuuccugcugaaguacaacgagaacggcaccaucaccgacgccguggauugugcucuggauccucugagcgagacaaagugcacccugaaguccuucaccguggaaaagggcaucuaccagaccagcaacuuccgggugcagcccaccgaauccaucgugcgguuccccaauaucaccaaucugugccccuucggcgagguguucaaugccaccagauucgccucuguguacgccuggaaccggaagcggaucagcaauugcguggccgacuacuccgugcuguacaacuccgccagcuucagcaccuucaagugcuacggcguguccccuaccaagcugaacgaccugugcuucacaaacguguacgccgacagcuucgugauccggggagaugaagugcggcagauugccccuggacagacaggcaagaucgccgacuacaacuacaagcugcccgacgacuucaccggcugugugauugccuggaacagcaacaaccuggacuccaaagucggcggcaacuacaauuaccgcuaccggcuguuccggaaguccaaucugaagcccuucgagcgggacaucagcaccgaaaucuaucaggccggcagcaccccuugcaacggcguggaaggcuucaacugcuacuucccacugcaguccuacggcuuucagcccacaaauggcgugggcuaucagcccuacagagugguggugcugagcuucgaacugcugcaugcuccugccacagugugcggcccuaagaaaagcaccaaucucgugaagaacaaaugcgugaacuucaacuucaacggccugaccggcaccggcgugcugacagagagcaacaagaaguuccugccauuccagcaguuuggccgggauaucgccgauaccacagacgccguuagagauccccagacacuggaaauccuggacaucaccccaugcagcuucggcggagugucugugaucaccccuggcaccaacaccagcaaucagguggcagugcuguaccagggcgugaacuguaccgaagugcccguggccauucacgccgaucagcugacaccuacauggcggguguacuccaccggcagcaauguguuucagaccagagccggcugucugaucggagccgagcacgugaacaauagcuacgagugcgacauccccaucggcgcuggcaucugugccagcuaccagacacagacaaacagccccagacgggcuagaagcguggccagccagagcaucauugccuacacaaugucucugggcgccgagaacagcguggccuacuccaacaacucuaucgcuauccccaccaacuucaccaucagcgugaccaccgagauccugccuguguccaugaccaagaccagcguggacugcaccauguacaucugcggcgauuccaccgagugcuccaaccugcugcugcaguacggcagcuucugcacccagcugaauagagcccugacagggaucgccguggaacaggacaagaacacccaagagguguucgcccaagugaagcaaaucuacaagaccccuccuaucaaggacuucggcggcuucaauuucagccagauucugcccgauccuagcaagcccagcaagcggagcuucaucgaggaccugcuguucaacaaagugacacuggccgacgccggcuucaucaagcaguauggcgauugucugggcgacauugccgccagggaucugauuugcgcccagaaguuuaacggacugacagugcugccuccucugcugaccgaugagaugaucgcccaguacacaucugcccugcuggccggcacaaucacaagcggcuggacauuuggagcuggcgccgcucugcagauccccuuugcuaugcagauggccuaccgguucaacggcaucggagugacccagaaugugcuguacgagaaccagaagcugaucgccaaccaguucaacagcgccaucggcaagauccaggacagccugagcagcacagcaagcgcccugggaaagcugcaggacguggucaaccagaaugcccaggcacugaacacccuggucaagcagcuguccuccaacuucggcgccaucagcucugugcugaacgauauccugagcagacuggacaaggucgaggccgaggugcagaucgacagacugaucacaggcagacugcagagccuccagacauacgugacccagcagcugaucagagccgccgagauuagagccucugccaaucuggccgccaccaagaugucugagugugugcugggccagagcaagagaguggacuuuugcggcaagggcuaccaccugaugagcuucccucagucugccccucacggcgugguguuucugcacgugacauaugugcccgcucaagagaagaauuucaccaccgcuccagccaucugccacgacggcaaagcccacuuuccuagagaaggcguguucguguccaacggcacccauugguucgugacacagcggaacuucuacgagccccagaucaucaccaccgacaacaccuucgugucuggcaacugcgacguugugaucggcauugugaacaauaccguguacgacccucugcagcccgagcuggacagcuucaaagaggaacuggacaaguacuuuaagaaccacacaagccccgacguggaccugggcgauaucagcggaaucaaugccagcgucgugaacauccagaaagagaucgaccggcugaacgagguggccaagaaucugaacgagagccugaucgaccugcaagaacuggggaaguacgagcaguacaucaaguggcccugguacaucuggcugggcuuuaucgccggacugauugccaucgugauggucacaaucaugcuguguugcaugaccagcugcuguagcugccugaagggcuguuguagcuguggcagcugcugcaaguucgacgaggacgauucugagcccgugcugaagggcgugaaacugcacuacaccugaggacuaguguccaccugucccuccugggcugcuggauugucucguuuuccugccaaauaaacaggaucagcgcuuuacagaucuaaaaaaaaaaaaaaaaaaaaaaaaaaaaaaaaaaaaaaaaaaaaaaaaaaaaaaaaaaaaaaaaaaaaaaaaaaaaaaaaaaaaaaaaaaaaaaaaaaaa

SEQ ID NO: 25259 - RNA, 4105 nt, Artificial Sequence
  SARS-CoV-2/Wuhan/WIV05/2019__EPI_ISL_402128 spike protein mRNA gc mod (1-1273)
aggagacccgugacccggaaguuguacggcuacgcgacuuucccucccacaaacccucgcgcccuuccuuuccuacuugggcccggcagaaagcuuaccauguucguguuccuggugcugcugccucugguguccagccagugugugaaccugaccaccagaacacagcugccuccagccuacaccaacagcuuuaccagaggcguguacuaccccgacaagguguucagauccagcgugcugcacucuacccaggaccuguuccugccuuucuucagcaacgugaccugguuccacgccauccacguguccggcaccaauggcaccaagagauucgacaaccccgugcugcccuucaacgacgggguguacuuugccagcaccgagaaguccaacaucaucagaggcuggaucuucggcaccacacuggacagcaagacccagagccugcugaucgugaacaacgccaccaacguggucaucaaagugugcgaguuccaguucugcaacgaccccuuccugggcgucuacuaccacaagaacaacaagagcuggauggaaagcgaguuccggguguacagcagcgccaacaacugcaccuucgaguacgugucccagccuuuccugauggaccuggaaggcaagcagggcaacuucaagaaccugcgcgaguucguguuuaagaacaucgacggcuacuucaagaucuacagcaagcacaccccuaucaaccucgugcgggaucugccucagggcuucucugcucuggaaccccugguggaucugcccaucggcaucaacaucacccgguuucagacacugcuggcccugcacagaagcuaccugacaccuggcgauagcagcagcggauggacagcuggugccgccgcuuacuaugugggcuaccugcagccuagaaccuuccugcugaaguacaacgagaacggcaccaucaccgacgccguggauugugcucuggauccucugagcgagacaaagugcacccugaaguccuucaccguggaaaagggcaucuaccagaccagcaacuuccgggugcagcccaccgaauccaucgugcgguuccccaauaucaccaaucugugccccuucggcgagguguucaaugccaccagauucgccucuguguacgccuggaaccggaagcggaucagcaauugcguggccgacuacuccgugcuguacaacuccgccagcuucagcaccuucaagugcuacggcguguccccuaccaagcugaacgaccugugcuucacaaacguguacgccgacagcuucgugauccggggagaugaagugcggcagauugccccuggacagacaggcaagaucgccgacuacaacuacaagcugcccgacgacuucaccggcugugugauugccuggaacagcaacaaccuggacuccaaagucggcggcaacuacaauuaccuguaccggcuguuccggaaguccaaucugaagcccuucgagcgggacaucuccaccgagaucuaucaggccggcagcaccccuuguaacggcguggaaggcuucaacugcuacuucccacugcaguccuacggcuuucagcccacaaauggcgugggcuaucagcccuacagagugguggugcugagcuucgaacugcugcaugccccugccacagugugcggcccuaagaaaagcaccaaucucgugaagaacaaaugcgugaacuucaacuucaacggccugaccggcaccggcgugcugacagagagcaacaagaaguuccugccauuccagcaguuuggccgggauaucgccgauaccacagacgccguuagagauccccagacacuggaaauccuggacaucaccccuugcagcuucggcggagugucugugaucaccccuggcaccaacaccagcaaucagguggcagugcuguaccaggacgugaacuguaccgaagugcccguggccauucacgccgaucagcugacaccuacauggcggguguacuccaccggcagcaauguguuucagaccagagccggcugucugaucggagccgagcacgugaacaauagcuacgagugcgacauccccaucggcgcuggaaucugcgccagcuaccagacacagacaaacagcccucggagagccagaagcguggccagccagagcaucauugccuacacaaugucucugggcgccgagaacagcguggccuacuccaacaacucuaucgcuauccccaccaacuucaccaucagcgugaccacagagauccugccuguguccaugaccaagaccagcguggacugcaccauguacaucugcggcgauuccaccgagugcuccaaccugcugcugcaguacggcagcuucugcacccagcugaauagagcccugacagggaucgccguggaacaggacaagaacacccaagagguguucgcccaagugaagcagaucuacaagaccccuccuaucaaggacuucggcggcuucaauuucagccagauucugcccgauccuagcaagcccagcaagcggagcuucaucgaggaccugcuguucaacaaagugacacuggccgacgccggcuucaucaagcaguauggcgauugucugggcgacauugccgccagggaucugauuugcgcccagaaguuuaacggacugacagugcugccuccucugcugaccgaugagaugaucgcccaguacacaucugcccugcuggccggcacaaucacaagcggcuggacauuuggagcaggcgccgcucugcagauccccuuugcuaugcagauggccuaccgguucaacggcaucggagugacccagaaugugcuguacgagaaccagaagcugaucgccaaccaguucaacagcgccaucggcaagauccaggacagccugagcagcacagcaagcgcccugggaaagcugcaggacguggucaaccagaaugcccaggcacugaacacccuggucaagcagcuguccuccaacuucggcgccaucagcucugugcugaacgauauccugagcagacuggacaaggucgaggccgaggugcagaucgacagacugaucacaggcagacugcagagccuccagacauacgugacccagcagcugaucagagccgccgagauuagagccucugccaaucuggccgccaccaagaugucugagugugugcugggccagagcaagagaguggacuuuugcggcaagggcuaccaccugaugagcuucccucagucugccccucacggcgugguguuucugcacgugacauaugugcccgcucaagagaagaauuucaccaccgcuccagccaucugccacgacggcaaagcccacuuuccuagagaaggcguguucguguccaacggcacccauugguucgugacacagcggaacuucuacgagccccagaucaucaccaccgacaacaccuucgugucuggcaacugcgacgucgugaucggcauugugaacaauaccguguacgacccucugcagcccgagcuggacagcuucaaagaggaacuggacaaguacuuuaagaaccacacaagccccgacguggaccugggcgauaucagcggaaucaaugccagcgucgugaacauccagaaagagaucgaccggcugaacgagguggccaagaaucugaacgagagccugaucgaccugcaagaacuggggaaguacgagcaguacaucaaguggcccugguacaucuggcugggcuuuaucgccggacugauugccaucgugauggucacaaucaugcuguguugcaugaccagcugcuguagcugccugaagggcuguuguagcuguggcagcugcugcaaguucgacgaggacgauucugagcccgugcugaagggcgugaaacugcacuacacaugaggacuaguguccaccugucccuccugggcugcuggauugucucguuuuccugccaaauaaacaggaucagcgcuuuacagaucuaaaaaaaaaaaaaaaaaaaaaaaaaaaaaaaaaaaaaaaaaaaaaaaaaaaaaaaaaaaaaaaaaaaaaaaaaaaaaaaaaaaaaaaaaaaaaaaaaaaa

SEQ ID NO: 25260 - RNA, 4105 nt, Artificial Sequence
  SARS-CoV-2/Wuhan/WIV05/2019__EPI_ISL_402128 spike protein mRNA gc mod (1-1273)(D614G)
aggagacccgugacccggaaguuguacggcuacgcgacuuucccucccacaaacccucgcgcccuuccuuuccuacuugggcccggcagaaagcuuaccauguucguguuccuggugcugcugccucugguguccagccagugugugaaccugaccaccagaacacagcugccuccagccuacaccaacagcuuuaccagaggcguguacuaccccgacaagguguucagauccagcgugcugcacucuacccaggaccuguuccugccuuucuucagcaacgugaccugguuccacgccauccacguguccggcaccaauggcaccaagagauucgacaaccccgugcugcccuucaacgacgggguguacuuugccagcaccgagaaguccaacaucaucagaggcuggaucuucggcaccacacuggacagcaagacccagagccugcugaucgugaacaacgccaccaacguggucaucaaagugugcgaguuccaguucugcaacgaccccuuccugggcgucuacuaccacaagaacaacaagagcuggauggaaagcgaguuccggguguacagcagcgccaacaacugcaccuucgaguacgugucccagccuuuccugauggaccuggaaggcaagcagggcaacuucaagaaccugcgcgaguucguguuuaagaacaucgacggcuacuucaagaucuacagcaagcacaccccuaucaaccucgugcgggaucugccucagggcuucucugcucuggaaccccugguggaucugcccaucggcaucaacaucacccgguuucagacacugcuggcccugcacagaagcuaccugacaccuggcgauagcagcagcggauggacagcuggugccgccgcuuacuaugugggcuaccugcagccuagaaccuuccugcugaaguacaacgagaacggcaccaucaccgacgccguggauugugcucuggauccucugagcgagacaaagugcacccugaaguccuucaccguggaaaagggcaucuaccagaccagcaacuuccgggugcagcccaccgaauccaucgugcgguuccccaauaucaccaaucugugccccuucggcgagguguucaaugccaccagauucgccucuguguacgccuggaaccggaagcggaucagcaauugcguggccgacuacuccgugcuguacaacuccgccagcuucagcaccuucaagugcuacggcguguccccuaccaagcugaacgaccugugcuucacaaacguguacgccgacagcuucgugauccggggagaugaagugcggcagauugccccuggacagacaggcaagaucgccgacuacaacuacaagcugcccgacgacuucaccggcugugugauugccuggaacagcaacaaccuggacuccaaagucggcggcaacuacaauuaccuguaccggcuguuccggaaguccaaucugaagcccuucgagcgggacaucuccaccgagaucuaucaggccggcagcaccccuuguaacggcguggaaggcuucaacugcuacuucccacugcaguccuacggcuuucagcccacaaauggcgugggcuaucagcccuacagagugguggugcugagcuucgaacugcugcaugccccugccacagugugcggcccuaagaaaagcaccaaucucgugaagaacaaaugcgugaacuucaacuucaacggccugaccggcaccggcgugcugacagagagcaacaagaaguuccugccauuccagcaguuuggccgggauaucgccgauaccacagacgccguuagagauccccagacacuggaaauccuggacaucaccccuugcagcuucggcggagugucugugaucaccccuggcaccaacaccagcaaucagguggcagugcuguaccagggcgugaacuguaccgaagugcccguggccauucacgccgaucagcugacaccuacauggcggguguacuccaccggcagcaauguguuucagaccagagccggcugucugaucggagccgagcacgugaacaauagcuacgagugcgacauccccaucggcgcuggaaucugcgccagcuaccagacacagacaaacagcccucggagagccagaagcguggccagccagagcaucauugccuacacaaugucucugggcgccgagaacagcguggccuacuccaacaacucuaucgcuauccccaccaacuucaccaucagcgugaccacagagauccugccuguguccaugaccaagaccagcguggacugcaccauguacaucugcggcgauuccaccgagugcuccaaccugcugcugcaguacggcagcuucugcacccagcugaauagagcccugacagggaucgccguggaacaggacaagaacacccaagagguguucgcccaagugaagcagaucuacaagaccccuccuaucaaggacuucggcggcuucaauuucagccagauucugcccgauccuagcaagcccagcaagcggagcuucaucgaggaccugcuguucaacaaagugacacuggccgacgccggcuucaucaagcaguauggcgauugucugggcgacauugccgccagggaucugauuugcgcccagaaguuuaacggacugacagugcugccuccucugcugaccgaugagaugaucgcccaguacacaucugcccugcuggccggcacaaucacaagcggcuggacauuuggagcaggcgccgcucugcagauccccuuugcuaugcagauggccuaccgguucaacggcaucggagugacccagaaugugcuguacgagaaccagaagcugaucgccaaccaguucaacagcgccaucggcaagauccaggacagccugagcagcacagcaagcgcccugggaaagcugcaggacguggucaaccagaaugcccaggcacugaacacccuggucaagcagcuguccuccaacuucggcgccaucagcucugugcugaacgauauccugagcagacuggacaaggucgaggccgaggugcagaucgacagacugaucacaggcagacugcagagccuccagacauacgugacccagcagcugaucagagccgccgagauuagagccucugccaaucuggccgccaccaagaugucugagugugugcugggccagagcaagagaguggacuuuugcggcaagggcuaccaccugaugagcuucccucagucugccccucacggcgugguguuucugcacgugacauaugugcccgcucaagagaagaauuucaccaccgcuccagccaucugccacgacggcaaagcccacuuuccuagagaaggcguguucguguccaacggcacccauugguucgugacacagcggaacuucuacgagccccagaucaucaccaccgacaacaccuucgugucuggcaacugcgacgucgugaucggcauugugaacaauaccguguacgacccucugcagcccgagcuggacagcuucaaagaggaacuggacaaguacuuuaagaaccacacaagccccgacguggaccugggcgauaucagcggaaucaaugccagcgucgugaacauccagaaagagaucgaccggcugaacgagguggccaagaaucugaacgagagccugaucgaccugcaagaacuggggaaguacgagcaguacaucaaguggcccugguacaucuggcugggcuuuaucgccggacugauugccaucgugauggucacaaucaugcuguguugcaugaccagcugcuguagcugccugaagggcuguuguagcuguggcagcugcugcaaguucgacgaggacgauucugagcccgugcugaagggcgugaaacugcacuacacaugaggacuaguguccaccugucccuccugggcugcuggauugucucguuuuccugccaaauaaacaggaucagcgcuuuacagaucuaaaaaaaaaaaaaaaaaaaaaaaaaaaaaaaaaaaaaaaaaaaaaaaaaaaaaaaaaaaaaaaaaaaaaaaaaaaaaaaaaaaaaaaaaaaaaaaaaaaa

SEQ ID NO: 25261 - RNA, 4105 nt, Artificial Sequence
  SARS-CoV-2/Wuhan/WIV05/2019__EPI_ISL_402128 spike protein mRNA gc mod (1-1273)(A222V_D614G)
aggagacccgugacccggaaguuguacggcuacgcgacuuucccucccacaaacccucgcgcccuuccuuuccuacuugggcccggcagaaagcuuaccauguucguguuccuggugcugcugccucugguguccagccagugugugaaccugaccaccagaacacagcugccuccagccuacaccaacagcuuuaccagaggcguguacuaccccgacaagguguucagauccagcgugcugcacucuacccaggaccuguuccugccuuucuucagcaacgugaccugguuccacgccauccacguguccggcaccaauggcaccaagagauucgacaaccccgugcugcccuucaacgacgggguguacuuugccagcaccgagaaguccaacaucaucagaggcuggaucuucggcaccacacuggacagcaagacccagagccugcugaucgugaacaacgccaccaacguggucaucaaagugugcgaguuccaguucugcaacgaccccuuccugggcgucuacuaccacaagaacaacaagagcuggauggaaagcgaguuccggguguacagcagcgccaacaacugcaccuucgaguacgugucccagccuuuccugauggaccuggaaggcaagcagggcaacuucaagaaccugcgcgaguucguguuuaagaacaucgacggcuacuucaagaucuacagcaagcacaccccuaucaaccucgugcgggaucugccucagggcuucucugugcuggaaccccugguggaucugcccaucggcaucaacaucacccgguuucagacacugcuggcccugcacagaagcuaccugacaccuggcgauagcagcagcggauggacagcuggugccgccgcuuacuaugugggcuaccugcagccuagaaccuuccugcugaaguacaacgagaacggcaccaucaccgacgccguggauugugcucuggauccucugagcgagacaaagugcacccugaaguccuucaccguggaaaagggcaucuaccagaccagcaacuuccgggugcagcccaccgaauccaucgugcgguuccccaauaucaccaaucugugccccuucggcgagguguucaaugccaccagauucgccucuguguacgccuggaaccggaagcggaucagcaauugcguggccgacuacuccgugcuguacaacuccgccagcuucagcaccuucaagugcuacggcguguccccuaccaagcugaacgaccugugcuucacaaacguguacgccgacagcuucgugauccggggagaugaagugcggcagauugccccuggacagacaggcaagaucgccgacuacaacuacaagcugcccgacgacuucaccggcugugugauugccuggaacagcaacaaccuggacuccaaagucggcggcaacuacaauuaccuguaccggcuguuccggaaguccaaucugaagcccuucgagcgggacaucuccaccgagaucuaucaggccggcagcaccccuuguaacggcguggaaggcuucaacugcuacuucccacugcaguccuacggcuuucagcccacaaauggcgugggcuaucagcccuacagagugguggugcugagcuucgaacugcugcaugccccugccacagugugcggcccuaagaaaagcaccaaucucgugaagaacaaaugcgugaacuucaacuucaacggccugaccggcaccggcgugcugacagagagcaacaagaaguuccugccauuccagcaguuuggccgggauaucgccgauaccacagacgccguuagagauccccagacacuggaaauccuggacaucaccccuugcagcuucggcggagugucugugaucaccccuggcaccaacaccagcaaucagguggcagugcuguaccagggcgugaacuguaccgaagugcccguggccauucacgccgaucagcugacaccuacauggcggguguacuccaccggcagcaauguguuucagaccagagccggcugucugaucggagccgagcacgugaacaauagcuacgagugcgacauccccaucggcgcuggaaucugcgccagcuaccagacacagacaaacagcccucggagagccagaagcguggccagccagagcaucauugccuacacaaugucucugggcgccgagaacagcguggccuacuccaacaacucuaucgcuauccccaccaacuucaccaucagcgugaccacagagauccugccuguguccaugaccaagaccagcguggacugcaccauguacaucugcggcgauuccaccgagugcuccaaccugcugcugcaguacggcagcuucugcacccagcugaauagagcccugacagggaucgccguggaacaggacaagaacacccaagagguguucgcccaagugaagcagaucuacaagaccccuccuaucaaggacuucggcggcuucaauuucagccagauucugcccgauccuagcaagcccagcaagcggagcuucaucgaggaccugcuguucaacaaagugacacuggccgacgccggcuucaucaagcaguauggcgauugucugggcgacauugccgccagggaucugauuugcgcccagaaguuuaacggacugacagugcugccuccucugcugaccgaugagaugaucgcccaguacacaucugcccugcuggccggcacaaucacaagcggcuggacauuuggagcaggcgccgcucugcagauccccuuugcuaugcagauggccuaccgguucaacggcaucggagugacccagaaugugcuguacgagaaccagaagcugaucgccaaccaguucaacagcgccaucggcaagauccaggacagccugagcagcacagcaagcgcccugggaaagcugcaggacguggucaaccagaaugcccaggcacugaacacccuggucaagcagcuguccuccaacuucggcgccaucagcucugugcugaacgauauccugagcagacuggacaaggucgaggccgaggugcagaucgacagacugaucacaggcagacugcagagccuccagacauacgugacccagcagcugaucagagccgccgagauuagagccucugccaaucuggccgccaccaagaugucugagugugugcugggccagagcaagagaguggacuuuugcggcaagggcuaccaccugaugagcuucccucagucugccccucacggcgugguguuucugcacgugacauaugugcccgcucaagagaagaauuucaccaccgcuccagccaucugccacgacggcaaagcccacuuuccuagagaaggcguguucguguccaacggcacccauugguucgugacacagcggaacuucuacgagccccagaucaucaccaccgacaacaccuucgugucuggcaacugcgacgucgugaucggcauugugaacaauaccguguacgacccucugcagcccgagcuggacagcuucaaagaggaacuggacaaguacuuuaagaaccacacaagccccgacguggaccugggcgauaucagcggaaucaaugccagcgucgugaacauccagaaagagaucgaccggcugaacgagguggccaagaaucugaacgagagccugaucgaccugcaagaacuggggaaguacgagcaguacaucaaguggcccugguacaucuggcugggcuuuaucgccggacugauugccaucgugauggucacaaucaugcuguguugcaugaccagcugcuguagcugccugaagggcuguuguagcuguggcagcugcugcaaguucgacgaggacgauucugagcccgugcugaagggcgugaaacugcacuacacaugaggacuaguguccaccugucccuccugggcugcuggauugucucguuuuccugccaaauaaacaggaucagcgcuuuacagaucuaaaaaaaaaaaaaaaaaaaaaaaaaaaaaaaaaaaaaaaaaaaaaaaaaaaaaaaaaaaaaaaaaaaaaaaaaaaaaaaaaaaaaaaaaaaaaaaaaaaa

SEQ ID NO: 25262 - RNA, 4105 nt, Artificial Sequence
  SARS-CoV-2/Wuhan/WIV05/2019__EPI_ISL_402128 spike protein mRNA gc mod (1-1273)(N439K_D614G)
aggagacccgugacccggaaguuguacggcuacgcgacuuucccucccacaaacccucgcgcccuuccuuuccuacuugggcccggcagaaagcuuaccauguucguguuccuggugcugcugccucugguguccagccagugugugaaccugaccaccagaacacagcugccuccagccuacaccaacagcuuuaccagaggcguguacuaccccgacaagguguucagauccagcgugcugcacucuacccaggaccuguuccugccuuucuucagcaacgugaccugguuccacgccauccacguguccggcaccaauggcaccaagagauucgacaaccccgugcugcccuucaacgacgggguguacuuugccagcaccgagaaguccaacaucaucagaggcuggaucuucggcaccacacuggacagcaagacccagagccugcugaucgugaacaacgccaccaacguggucaucaaagugugcgaguuccaguucugcaacgaccccuuccugggcgucuacuaccacaagaacaacaagagcuggauggaaagcgaguuccggguguacagcagcgccaacaacugcaccuucgaguacgugucccagccuuuccugauggaccuggaaggcaagcagggcaacuucaagaaccugcgcgaguucguguuuaagaacaucgacggcuacuucaagaucuacagcaagcacaccccuaucaaccucgugcgggaucugccucagggcuucucugcucuggaaccccugguggaucugcccaucggcaucaacaucacccgguuucagacacugcuggcccugcacagaagcuaccugacaccuggcgauagcagcagcggauggacagcuggugccgccgcuuacuaugugggcuaccugcagccuagaaccuuccugcugaaguacaacgagaacggcaccaucaccgacgccguggauugugcucuggauccucugagcgagacaaagugcacccugaaguccuucaccguggaaaagggcaucuaccagaccagcaacuuccgggugcagcccaccgaauccaucgugcgguuccccaauaucaccaaucugugccccuucggcgagguguucaaugccaccagauucgccucuguguacgccuggaaccggaagcggaucagcaauugcguggccgacuacuccgugcuguacaacuccgccagcuucagcaccuucaagugcuacggcguguccccuaccaagcugaacgaccugugcuucacaaacguguacgccgacagcuucgugauccggggagaugaagugcggcagauugccccuggacagacaggcaagaucgccgacuacaacuacaagcugcccgacgacuucaccggcugugugauugccuggaacagcaagaaccuggacuccaaagucggcggcaacuacaauuaccuguaccggcuguuccggaaguccaaucugaagcccuucgagcgggacaucuccaccgagaucuaucaggccggcagcaccccuuguaacggcguggaaggcuucaacugcuacuucccacugcaguccuacggcuuucagcccacaaauggcgugggcuaucagcccuacagagugguggugcugagcuucgaacugcugcaugccccugccacagugugcggcccuaagaaaagcaccaaucucgugaagaacaaaugcgugaacuucaacuucaacggccugaccggcaccggcgugcugacagagagcaacaagaaguuccugccauuccagcaguuuggccgggauaucgccgauaccacagacgccguuagagauccccagacacuggaaauccuggacaucaccccuugcagcuucggcggagugucugugaucaccccuggcaccaacaccagcaaucagguggcagugcuguaccagggcgugaacuguaccgaagugcccguggccauucacgccgaucagcugacaccuacauggcggguguacuccaccggcagcaauguguuucagaccagagccggcugucugaucggagccgagcacgugaacaauagcuacgagugcgacauccccaucggcgcuggaaucugcgccagcuaccagacacagacaaacagcccucggagagccagaagcguggccagccagagcaucauugccuacacaaugucucugggcgccgagaacagcguggccuacuccaacaacucuaucgcuauccccaccaacuucaccaucagcgugaccacagagauccugccuguguccaugaccaagaccagcguggacugcaccauguacaucugcggcgauuccaccgagugcuccaaccugcugcugcaguacggcagcuucugcacccagcugaauagagcccugacagggaucgccguggaacaggacaagaacacccaagagguguucgcccaagugaagcagaucuacaagaccccuccuaucaaggacuucggcggcuucaauuucagccagauucugcccgauccuagcaagcccagcaagcggagcuucaucgaggaccugcuguucaacaaagugacacuggccgacgccggcuucaucaagcaguauggcgauugucugggcgacauugccgccagggaucugauuugcgcccagaaguuuaacggacugacagugcugccuccucugcugaccgaugagaugaucgcccaguacacaucugcccugcuggccggcacaaucacaagcggcuggacauuuggagcaggcgccgcucugcagauccccuuugcuaugcagauggccuaccgguucaacggcaucggagugacccagaaugugcuguacgagaaccagaagcugaucgccaaccaguucaacagcgccaucggcaagauccaggacagccugagcagcacagcaagcgcccugggaaagcugcaggacguggucaaccagaaugcccaggcacugaacacccuggucaagcagcuguccuccaacuucggcgccaucagcucugugcugaacgauauccugagcagacuggacaaggucgaggccgaggugcagaucgacagacugaucacaggcagacugcagagccuccagacauacgugacccagcagcugaucagagccgccgagauuagagccucugccaaucuggccgccaccaagaugucugagugugugcugggccagagcaagagaguggacuuuugcggcaagggcuaccaccugaugagcuucccucagucugccccucacggcgugguguuucugcacgugacauaugugcccgcucaagagaagaauuucaccaccgcuccagccaucugccacgacggcaaagcccacuuuccuagagaaggcguguucguguccaacggcacccauugguucgugacacagcggaacuucuacgagccccagaucaucaccaccgacaacaccuucgugucuggcaacugcgacgucgugaucggcauugugaacaauaccguguacgacccucugcagcccgagcuggacagcuucaaagaggaacuggacaaguacuuuaagaaccacacaagccccgacguggaccugggcgauaucagcggaaucaaugccagcgucgugaacauccagaaagagaucgaccggcugaacgagguggccaagaaucugaacgagagccugaucgaccugcaagaacuggggaaguacgagcaguacaucaaguggcccugguacaucuggcugggcuuuaucgccggacugauugccaucgugauggucacaaucaugcuguguugcaugaccagcugcuguagcugccugaagggcuguuguagcuguggcagcugcugcaaguucgacgaggacgauucugagcccgugcugaagggcgugaaacugcacuacacaugaggacuaguguccaccugucccuccugggcugcuggauugucucguuuuccugccaaauaaacaggaucagcgcuuuacagaucuaaaaaaaaaaaaaaaaaaaaaaaaaaaaaaaaaaaaaaaaaaaaaaaaaaaaaaaaaaaaaaaaaaaaaaaaaaaaaaaaaaaaaaaaaaaaaaaaaaaa

SEQ ID NO: 25263 - RNA, 4105 nt, Artificial Sequence
  SARS-CoV-2/Wuhan/WIV05/2019__EPI_ISL_402128 spike protein mRNA gc mod (1-1273)(S477N_D614G)
aggagacccgugacccggaaguuguacggcuacgcgacuuucccucccacaaacccucgcgcccuuccuuuccuacuugggcccggcagaaagcuuaccauguucguguuccuggugcugcugccucugguguccagccagugugugaaccugaccaccagaacacagcugccuccagccuacaccaacagcuuuaccagaggcguguacuaccccgacaagguguucagauccagcgugcugcacucuacccaggaccuguuccugccuuucuucagcaacgugaccugguuccacgccauccacguguccggcaccaauggcaccaagagauucgacaaccccgugcugcccuucaacgacgggguguacuuugccagcaccgagaaguccaacaucaucagaggcuggaucuucggcaccacacuggacagcaagacccagagccugcugaucgugaacaacgccaccaacguggucaucaaagugugcgaguuccaguucugcaacgaccccuuccugggcgucuacuaccacaagaacaacaagagcuggauggaaagcgaguuccggguguacagcagcgccaacaacugcaccuucgaguacgugucccagccuuuccugauggaccuggaaggcaagcagggcaacuucaagaaccugcgcgaguucguguuuaagaacaucgacggcuacuucaagaucuacagcaagcacaccccuaucaaccucgugcgggaucugccucagggcuucucugcucuggaaccccugguggaucugcccaucggcaucaacaucacccgguuucagacacugcuggcccugcacagaagcuaccugacaccuggcgauagcagcagcggauggacagcuggugccgccgcuuacuaugugggcuaccugcagccuagaaccuuccugcugaaguacaacgagaacggcaccaucaccgacgccguggauugugcucuggauccucugagcgagacaaagugcacccugaaguccuucaccguggaaaagggcaucuaccagaccagcaacuuccgggugcagcccaccgaauccaucgugcgguuccccaauaucaccaaucugugccccuucggcgagguguucaaugccaccagauucgccucuguguacgccuggaaccggaagcggaucagcaauugcguggccgacuacuccgugcuguacaacuccgccagcuucagcaccuucaagugcuacggcguguccccuaccaagcugaacgaccugugcuucacaaacguguacgccgacagcuucgugauccggggagaugaagugcggcagauugccccuggacagacaggcaagaucgccgacuacaacuacaagcugcccgacgacuucaccggcugugugauugccuggaacagcaacaaccuggacuccaaagucggcggcaacuacaauuaccuguaccggcuguuccggaaguccaaucugaagcccuucgagcgggacaucuccaccgagaucuaucaggccggcaacaccccuuguaacggcguggaaggcuucaacugcuacuucccacugcaguccuacggcuuucagcccacaaauggcgugggcuaucagcccuacagagugguggugcugagcuucgaacugcugcaugccccugccacagugugcggcccuaagaaaagcaccaaucucgugaagaacaaaugcgugaacuucaacuucaacggccugaccggcaccggcgugcugacagagagcaacaagaaguuccugccauuccagcaguuuggccgggauaucgccgauaccacagacgccguuagagauccccagacacuggaaauccuggacaucaccccuugcagcuucggcggagugucugugaucaccccuggcaccaacaccagcaaucagguggcagugcuguaccagggcgugaacuguaccgaagugcccguggccauucacgccgaucagcugacaccuacauggcggguguacuccaccggcagcaauguguuucagaccagagccggcugucugaucggagccgagcacgugaacaauagcuacgagugcgacauccccaucggcgcuggaaucugcgccagcuaccagacacagacaaacagcccucggagagccagaagcguggccagccagagcaucauugccuacacaaugucucugggcgccgagaacagcguggccuacuccaacaacucuaucgcuauccccaccaacuucaccaucagcgugaccacagagauccugccuguguccaugaccaagaccagcguggacugcaccauguacaucugcggcgauuccaccgagugcuccaaccugcugcugcaguacggcagcuucugcacccagcugaauagagcccugacagggaucgccguggaacaggacaagaacacccaagagguguucgcccaagugaagcagaucuacaagaccccuccuaucaaggacuucggcggcuucaauuucagccagauucugcccgauccuagcaagcccagcaagcggagcuucaucgaggaccugcuguucaacaaagugacacuggccgacgccggcuucaucaagcaguauggcgauugucugggcgacauugccgccagggaucugauuugcgcccagaaguuuaacggacugacagugcugccuccucugcugaccgaugagaugaucgcccaguacacaucugcccugcuggccggcacaaucacaagcggcuggacauuuggagcaggcgccgcucugcagauccccuuugcuaugcagauggccuaccgguucaacggcaucggagugacccagaaugugcuguacgagaaccagaagcugaucgccaaccaguucaacagcgccaucggcaagauccaggacagccugagcagcacagcaagcgcccugggaaagcugcaggacguggucaaccagaaugcccaggcacugaacacccuggucaagcagcuguccuccaacuucggcgccaucagcucugugcugaacgauauccugagcagacuggacaaggucgaggccgaggugcagaucgacagacugaucacaggcagacugcagagccuccagacauacgugacccagcagcugaucagagccgccgagauuagagccucugccaaucuggccgccaccaagaugucugagugugugcugggccagagcaagagaguggacuuuugcggcaagggcuaccaccugaugagcuucccucagucugccccucacggcgugguguuucugcacgugacauaugugcccgcucaagagaagaauuucaccaccgcuccagccaucugccacgacggcaaagcccacuuuccuagagaaggcguguucguguccaacggcacccauugguucgugacacagcggaacuucuacgagccccagaucaucaccaccgacaacaccuucgugucuggcaacugcgacgucgugaucggcauugugaacaauaccguguacgacccucugcagcccgagcuggacagcuucaaagaggaacuggacaaguacuuuaagaaccacacaagccccgacguggaccugggcgauaucagcggaaucaaugccagcgucgugaacauccagaaagagaucgaccggcugaacgagguggccaagaaucugaacgagagccugaucgaccugcaagaacuggggaaguacgagcaguacaucaaguggcccugguacaucuggcugggcuuuaucgccggacugauugccaucgugauggucacaaucaugcuguguugcaugaccagcugcuguagcugccugaagggcuguuguagcuguggcagcugcugcaaguucgacgaggacgauucugagcccgugcugaagggcgugaaacugcacuacacaugaggacuaguguccaccugucccuccugggcugcuggauugucucguuuuccugccaaauaaacaggaucagcgcuuuacagaucuaaaaaaaaaaaaaaaaaaaaaaaaaaaaaaaaaaaaaaaaaaaaaaaaaaaaaaaaaaaaaaaaaaaaaaaaaaaaaaaaaaaaaaaaaaaaaaaaaaaa

SEQ ID NO: 25264 - RNA, 4105 nt, Artificial Sequence
  SARS-CoV-2/Wuhan/WIV05/2019__EPI_ISL_402128 spike protein mRNA gc mod (1-1273)(N501Y_D614G)
aggagacccgugacccggaaguuguacggcuacgcgacuuucccucccacaaacccucgcgcccuuccuuuccuacuugggcccggcagaaagcuuaccauguucguguuccuggugcugcugccucugguguccagccagugugugaaccugaccaccagaacacagcugccuccagccuacaccaacagcuuuaccagaggcguguacuaccccgacaagguguucagauccagcgugcugcacucuacccaggaccuguuccugccuuucuucagcaacgugaccugguuccacgccauccacguguccggcaccaauggcaccaagagauucgacaaccccgugcugcccuucaacgacgggguguacuuugccagcaccgagaaguccaacaucaucagaggcuggaucuucggcaccacacuggacagcaagacccagagccugcugaucgugaacaacgccaccaacguggucaucaaagugugcgaguuccaguucugcaacgaccccuuccugggcgucuacuaccacaagaacaacaagagcuggauggaaagcgaguuccggguguacagcagcgccaacaacugcaccuucgaguacgugucccagccuuuccugauggaccuggaaggcaagcagggcaacuucaagaaccugcgcgaguucguguuuaagaacaucgacggcuacuucaagaucuacagcaagcacaccccuaucaaccucgugcgggaucugccucagggcuucucugcucuggaaccccugguggaucugcccaucggcaucaacaucacccgguuucagacacugcuggcccugcacagaagcuaccugacaccuggcgauagcagcagcggauggacagcuggugccgccgcuuacuaugugggcuaccugcagccuagaaccuuccugcugaaguacaacgagaacggcaccaucaccgacgccguggauugugcucuggauccucugagcgagacaaagugcacccugaaguccuucaccguggaaaagggcaucuaccagaccagcaacuuccgggugcagcccaccgaauccaucgugcgguuccccaauaucaccaaucugugccccuucggcgagguguucaaugccaccagauucgccucuguguacgccuggaaccggaagcggaucagcaauugcguggccgacuacuccgugcuguacaacuccgccagcuucagcaccuucaagugcuacggcguguccccuaccaagcugaacgaccugugcuucacaaacguguacgccgacagcuucgugauccggggagaugaagugcggcagauugccccuggacagacaggcaagaucgccgacuacaacuacaagcugcccgacgacuucaccggcugugugauugccuggaacagcaacaaccuggacuccaaagucggcggcaacuacaauuaccuguaccggcuguuccggaaguccaaucugaagcccuucgagcgggacaucuccaccgagaucuaucaggccggcagcaccccuuguaacggcguggaaggcuucaacugcuacuucccacugcaguccuacggcuuucagcccacauacggcgugggcuaucagcccuacagagugguggugcugagcuucgaacugcugcaugccccugccacagugugcggcccuaagaaaagcaccaaucucgugaagaacaaaugcgugaacuucaacuucaacggccugaccggcaccggcgugcugacagagagcaacaagaaguuccugccauuccagcaguuuggccgggauaucgccgauaccacagacgccguuagagauccccagacacuggaaauccuggacaucaccccuugcagcuucggcggagugucugugaucaccccuggcaccaacaccagcaaucagguggcagugcuguaccagggcgugaacuguaccgaagugcccguggccauucacgccgaucagcugacaccuacauggcggguguacuccaccggcagcaauguguuucagaccagagccggcugucugaucggagccgagcacgugaacaauagcuacgagugcgacauccccaucggcgcuggaaucugcgccagcuaccagacacagacaaacagcccucggagagccagaagcguggccagccagagcaucauugccuacacaaugucucugggcgccgagaacagcguggccuacuccaacaacucuaucgcuauccccaccaacuucaccaucagcgugaccacagagauccugccuguguccaugaccaagaccagcguggacugcaccauguacaucugcggcgauuccaccgagugcuccaaccugcugcugcaguacggcagcuucugcacccagcugaauagagcccugacagggaucgccguggaacaggacaagaacacccaagagguguucgcccaagugaagcagaucuacaagaccccuccuaucaaggacuucggcggcuucaauuucagccagauucugcccgauccuagcaagcccagcaagcggagcuucaucgaggaccugcuguucaacaaagugacacuggccgacgccggcuucaucaagcaguauggcgauugucugggcgacauugccgccagggaucugauuugcgcccagaaguuuaacggacugacagugcugccuccucugcugaccgaugagaugaucgcccaguacacaucugcccugcuggccggcacaaucacaagcggcuggacauuuggagcaggcgccgcucugcagauccccuuugcuaugcagauggccuaccgguucaacggcaucggagugacccagaaugugcuguacgagaaccagaagcugaucgccaaccaguucaacagcgccaucggcaagauccaggacagccugagcagcacagcaagcgcccugggaaagcugcaggacguggucaaccagaaugcccaggcacugaacacccuggucaagcagcuguccuccaacuucggcgccaucagcucugugcugaacgauauccugagcagacuggacaaggucgaggccgaggugcagaucgacagacugaucacaggcagacugcagagccuccagacauacgugacccagcagcugaucagagccgccgagauuagagccucugccaaucuggccgccaccaagaugucugagugugugcugggccagagcaagagaguggacuuuugcggcaagggcuaccaccugaugagcuucccucagucugccccucacggcgugguguuucugcacgugacauaugugcccgcucaagagaagaauuucaccaccgcuccagccaucugccacgacggcaaagcccacuuuccuagagaaggcguguucguguccaacggcacccauugguucgugacacagcggaacuucuacgagccccagaucaucaccaccgacaacaccuucgugucuggcaacugcgacgucgugaucggcauugugaacaauaccguguacgacccucugcagcccgagcuggacagcuucaaagaggaacuggacaaguacuuuaagaaccacacaagccccgacguggaccugggcgauaucagcggaaucaaugccagcgucgugaacauccagaaagagaucgaccggcugaacgagguggccaagaaucugaacgagagccugaucgaccugcaagaacuggggaaguacgagcaguacaucaaguggcccugguacaucuggcugggcuuuaucgccggacugauugccaucgugauggucacaaucaugcuguguugcaugaccagcugcuguagcugccugaagggcuguuguagcuguggcagcugcugcaaguucgacgaggacgauucugagcccgugcugaagggcgugaaacugcacuacacaugaggacuaguguccaccugucccuccugggcugcuggauugucucguuuuccugccaaauaaacaggaucagcgcuuuacagaucuaaaaaaaaaaaaaaaaaaaaaaaaaaaaaaaaaaaaaaaaaaaaaaaaaaaaaaaaaaaaaaaaaaaaaaaaaaaaaaaaaaaaaaaaaaaaaaaaaaaa

SEQ ID NO: 25265 - RNA, 4099 nt, Artificial Sequence
  SARS-CoV-2/Wuhan/WIV05/2019__EPI_ISL_402128 spike protein mRNA gc mod (1-1273)(H69del_V70del_D614G)
aggagacccgugacccggaaguuguacggcuacgcgacuuucccucccacaaacccucgcgcccuuccuuuccuacuugggcccggcagaaagcuuaccauguucguguuccuggugcugcugccucugguguccagccagugugugaaccugaccaccagaacacagcugccuccagccuacaccaacagcuuuaccagaggcguguacuaccccgacaagguguucagauccagcgugcugcacucuacccaggaccuguuccugccuuucuucagcaacgugaccugguuccacgccaucuccggcaccaauggcaccaagagauucgacaaccccgugcugcccuucaacgacgggguguacuuugccagcaccgagaaguccaacaucaucagaggcuggaucuucggcaccacacuggacagcaagacccagagccugcugaucgugaacaacgccaccaacguggucaucaaagugugcgaguuccaguucugcaacgaccccuuccugggcgucuacuaccacaagaacaacaagagcuggauggaaagcgaguuccggguguacagcagcgccaacaacugcaccuucgaguacgugucccagccuuuccugauggaccuggaaggcaagcagggcaacuucaagaaccugcgcgaguucguguuuaagaacaucgacggcuacuucaagaucuacagcaagcacaccccuaucaaccucgugcgggaucugccucagggcuucucugcucuggaaccccugguggaucugcccaucggcaucaacaucacccgguuucagacacugcuggcccugcacagaagcuaccugacaccuggcgauagcagcagcggauggacagcuggugccgccgcuuacuaugugggcuaccugcagccuagaaccuuccugcugaaguacaacgagaacggcaccaucaccgacgccguggauugugcucuggauccucugagcgagacaaagugcacccugaaguccuucaccguggaaaagggcaucuaccagaccagcaacuuccgggugcagcccaccgaauccaucgugcgguuccccaauaucaccaaucugugccccuucggcgagguguucaaugccaccagauucgccucuguguacgccuggaaccggaagcggaucagcaauugcguggccgacuacuccgugcuguacaacuccgccagcuucagcaccuucaagugcuacggcguguccccuaccaagcugaacgaccugugcuucacaaacguguacgccgacagcuucgugauccggggagaugaagugcggcagauugccccuggacagacaggcaagaucgccgacuacaacuacaagcugcccgacgacuucaccggcugugugauugccuggaacagcaacaaccuggacuccaaagucggcggcaacuacaauuaccuguaccggcuguuccggaaguccaaucugaagcccuucgagcgggacaucuccaccgagaucuaucaggccggcagcaccccuuguaacggcguggaaggcuucaacugcuacuucccacugcaguccuacggcuuucagcccacaaauggcgugggcuaucagcccuacagagugguggugcugagcuucgaacugcugcaugccccugccacagugugcggcccuaagaaaagcaccaaucucgugaagaacaaaugcgugaacuucaacuucaacggccugaccggcaccggcgugcugacagagagcaacaagaaguuccugccauuccagcaguuuggccgggauaucgccgauaccacagacgccguuagagauccccagacacuggaaauccuggacaucaccccuugcagcuucggcggagugucugugaucaccccuggcaccaacaccagcaaucagguggcagugcuguaccagggcgugaacuguaccgaagugcccguggccauucacgccgaucagcugacaccuacauggcggguguacuccaccggcagcaauguguuucagaccagagccggcugucugaucggagccgagcacgugaacaauagcuacgagugcgacauccccaucggcgcuggaaucugcgccagcuaccagacacagacaaacagcccucggagagccagaagcguggccagccagagcaucauugccuacacaaugucucugggcgccgagaacagcguggccuacuccaacaacucuaucgcuauccccaccaacuucaccaucagcgugaccacagagauccugccuguguccaugaccaagaccagcguggacugcaccauguacaucugcggcgauuccaccgagugcuccaaccugcugcugcaguacggcagcuucugcacccagcugaauagagcccugacagggaucgccguggaacaggacaagaacacccaagagguguucgcccaagugaagcagaucuacaagaccccuccuaucaaggacuucggcggcuucaauuucagccagauucugcccgauccuagcaagcccagcaagcggagcuucaucgaggaccugcuguucaacaaagugacacuggccgacgccggcuucaucaagcaguauggcgauugucugggcgacauugccgccagggaucugauuugcgcccagaaguuuaacggacugacagugcugccuccucugcugaccgaugagaugaucgcccaguacacaucugcccugcuggccggcacaaucacaagcggcuggacauuuggagcaggcgccgcucugcagauccccuuugcuaugcagauggccuaccgguucaacggcaucggagugacccagaaugugcuguacgagaaccagaagcugaucgccaaccaguucaacagcgccaucggcaagauccaggacagccugagcagcacagcaagcgcccugggaaagcugcaggacguggucaaccagaaugcccaggcacugaacacccuggucaagcagcuguccuccaacuucggcgccaucagcucugugcugaacgauauccugagcagacuggacaaggucgaggccgaggugcagaucgacagacugaucacaggcagacugcagagccuccagacauacgugacccagcagcugaucagagccgccgagauuagagccucugccaaucuggccgccaccaagaugucugagugugugcugggccagagcaagagaguggacuuuugcggcaagggcuaccaccugaugagcuucccucagucugccccucacggcgugguguuucugcacgugacauaugugcccgcucaagagaagaauuucaccaccgcuccagccaucugccacgacggcaaagcccacuuuccuagagaaggcguguucguguccaacggcacccauugguucgugacacagcggaacuucuacgagccccagaucaucaccaccgacaacaccuucgugucuggcaacugcgacgucgugaucggcauugugaacaauaccguguacgacccucugcagcccgagcuggacagcuucaaagaggaacuggacaaguacuuuaagaaccacacaagccccgacguggaccugggcgauaucagcggaaucaaugccagcgucgugaacauccagaaagagaucgaccggcugaacgagguggccaagaaucugaacgagagccugaucgaccugcaagaacuggggaaguacgagcaguacaucaaguggcccugguacaucuggcugggcuuuaucgccggacugauugccaucgugauggucacaaucaugcuguguugcaugaccagcugcuguagcugccugaagggcuguuguagcuguggcagcugcugcaaguucgacgaggacgauucugagcccgugcugaagggcgugaaacugcacuacacaugaggacuaguguccaccugucccuccugggcugcuggauugucucguuuuccugccaaauaaacaggaucagcgcuuuacagaucuaaaaaaaaaaaaaaaaaaaaaaaaaaaaaaaaaaaaaaaaaaaaaaaaaaaaaaaaaaaaaaaaaaaaaaaaaaaaaaaaaaaaaaaaaaaaaaaaaaaa

SEQ ID NO: 25266 - RNA, 4105 nt, Artificial Sequence
  SARS-CoV-2/Wuhan/WIV05/2019__EPI_ISL_402128 spike protein mRNA gc mod (1-1273)(Y453F_D614G)
aggagacccgugacccggaaguuguacggcuacgcgacuuucccucccacaaacccucgcgcccuuccuuuccuacuugggcccggcagaaagcuuaccauguucguguuccuggugcugcugccucugguguccagccagugugugaaccugaccaccagaacacagcugccuccagccuacaccaacagcuuuaccagaggcguguacuaccccgacaagguguucagauccagcgugcugcacucuacccaggaccuguuccugccuuucuucagcaacgugaccugguuccacgccauccacguguccggcaccaauggcaccaagagauucgacaaccccgugcugcccuucaacgacgggguguacuuugccagcaccgagaaguccaacaucaucagaggcuggaucuucggcaccacacuggacagcaagacccagagccugcugaucgugaacaacgccaccaacguggucaucaaagugugcgaguuccaguucugcaacgaccccuuccugggcgucuacuaccacaagaacaacaagagcuggauggaaagcgaguuccggguguacagcagcgccaacaacugcaccuucgaguacgugucccagccuuuccugauggaccuggaaggcaagcagggcaacuucaagaaccugcgcgaguucguguuuaagaacaucgacggcuacuucaagaucuacagcaagcacaccccuaucaaccucgugcgggaucugccucagggcuucucugcucuggaaccccugguggaucugcccaucggcaucaacaucacccgguuucagacacugcuggcccugcacagaagcuaccugacaccuggcgauagcagcagcggauggacagcuggugccgccgcuuacuaugugggcuaccugcagccuagaaccuuccugcugaaguacaacgagaacggcaccaucaccgacgccguggauugugcucuggauccucugagcgagacaaagugcacccugaaguccuucaccguggaaaagggcaucuaccagaccagcaacuuccgggugcagcccaccgaauccaucgugcgguuccccaauaucaccaaucugugccccuucggcgagguguucaaugccaccagauucgccucuguguacgccuggaaccggaagcggaucagcaauugcguggccgacuacuccgugcuguacaacuccgccagcuucagcaccuucaagugcuacggcguguccccuaccaagcugaacgaccugugcuucacaaacguguacgccgacagcuucgugauccggggagaugaagugcggcagauugccccuggacagacaggcaagaucgccgacuacaacuacaagcugcccgacgacuucaccggcugugugauugccuggaacagcaacaaccuggacuccaaagucggcggcaacuacaauuaccuguuccggcuguuccggaaguccaaucugaagcccuucgagcgggacaucuccaccgagaucuaucaggccggcagcaccccuuguaacggcguggaaggcuucaacugcuacuucccacugcaguccuacggcuuucagcccacaaauggcgugggcuaucagcccuacagagugguggugcugagcuucgaacugcugcaugccccugccacagugugcggcccuaagaaaagcaccaaucucgugaagaacaaaugcgugaacuucaacuucaacggccugaccggcaccggcgugcugacagagagcaacaagaaguuccugccauuccagcaguuuggccgggauaucgccgauaccacagacgccguuagagauccccagacacuggaaauccuggacaucaccccuugcagcuucggcggagugucugugaucaccccuggcaccaacaccagcaaucagguggcagugcuguaccagggcgugaacuguaccgaagugcccguggccauucacgccgaucagcugacaccuacauggcggguguacuccaccggcagcaauguguuucagaccagagccggcugucugaucggagccgagcacgugaacaauagcuacgagugcgacauccccaucggcgcuggaaucugcgccagcuaccagacacagacaaacagcccucggagagccagaagcguggccagccagagcaucauugccuacacaaugucucugggcgccgagaacagcguggccuacuccaacaacucuaucgcuauccccaccaacuucaccaucagcgugaccacagagauccugccuguguccaugaccaagaccagcguggacugcaccauguacaucugcggcgauuccaccgagugcuccaaccugcugcugcaguacggcagcuucugcacccagcugaauagagcccugacagggaucgccguggaacaggacaagaacacccaagagguguucgcccaagugaagcagaucuacaagaccccuccuaucaaggacuucggcggcuucaauuucagccagauucugcccgauccuagcaagcccagcaagcggagcuucaucgaggaccugcuguucaacaaagugacacuggccgacgccggcuucaucaagcaguauggcgauugucugggcgacauugccgccagggaucugauuugcgcccagaaguuuaacggacugacagugcugccuccucugcugaccgaugagaugaucgcccaguacacaucugcccugcuggccggcacaaucacaagcggcuggacauuuggagcaggcgccgcucugcagauccccuuugcuaugcagauggccuaccgguucaacggcaucggagugacccagaaugugcuguacgagaaccagaagcugaucgccaaccaguucaacagcgccaucggcaagauccaggacagccugagcagcacagcaagcgcccugggaaagcugcaggacguggucaaccagaaugcccaggcacugaacacccuggucaagcagcuguccuccaacuucggcgccaucagcucugugcugaacgauauccugagcagacuggacaaggucgaggccgaggugcagaucgacagacugaucacaggcagacugcagagccuccagacauacgugacccagcagcugaucagagccgccgagauuagagccucugccaaucuggccgccaccaagaugucugagugugugcugggccagagcaagagaguggacuuuugcggcaagggcuaccaccugaugagcuucccucagucugccccucacggcgugguguuucugcacgugacauaugugcccgcucaagagaagaauuucaccaccgcuccagccaucugccacgacggcaaagcccacuuuccuagagaaggcguguucguguccaacggcacccauugguucgugacacagcggaacuucuacgagccccagaucaucaccaccgacaacaccuucgugucuggcaacugcgacgucgugaucggcauugugaacaauaccguguacgacccucugcagcccgagcuggacagcuucaaagaggaacuggacaaguacuuuaagaaccacacaagccccgacguggaccugggcgauaucagcggaaucaaugccagcgucgugaacauccagaaagagaucgaccggcugaacgagguggccaagaaucugaacgagagccugaucgaccugcaagaacuggggaaguacgagcaguacaucaaguggcccugguacaucuggcugggcuuuaucgccggacugauugccaucgugauggucacaaucaugcuguguugcaugaccagcugcuguagcugccugaagggcuguuguagcuguggcagcugcugcaaguucgacgaggacgauucugagcccgugcugaagggcgugaaacugcacuacacaugaggacuaguguccaccugucccuccugggcugcuggauugucucguuuuccugccaaauaaacaggaucagcgcuuuacagaucuaaaaaaaaaaaaaaaaaaaaaaaaaaaaaaaaaaaaaaaaaaaaaaaaaaaaaaaaaaaaaaaaaaaaaaaaaaaaaaaaaaaaaaaaaaaaaaaaaaaa

SEQ ID NO: 25267 - RNA, 4105 nt, Artificial Sequence
  SARS-CoV-2/Wuhan/WIV05/2019__EPI_ISL_402128 spike protein mRNA gc mod (1-1273)(D614G_I692V)
aggagacccgugacccggaaguuguacggcuacgcgacuuucccucccacaaacccucgcgcccuuccuuuccuacuugggcccggcagaaagcuuaccauguucguguuccuggugcugcugccucugguguccagccagugugugaaccugaccaccagaacacagcugccuccagccuacaccaacagcuuuaccagaggcguguacuaccccgacaagguguucagauccagcgugcugcacucuacccaggaccuguuccugccuuucuucagcaacgugaccugguuccacgccauccacguguccggcaccaauggcaccaagagauucgacaaccccgugcugcccuucaacgacgggguguacuuugccagcaccgagaaguccaacaucaucagaggcuggaucuucggcaccacacuggacagcaagacccagagccugcugaucgugaacaacgccaccaacguggucaucaaagugugcgaguuccaguucugcaacgaccccuuccugggcgucuacuaccacaagaacaacaagagcuggauggaaagcgaguuccggguguacagcagcgccaacaacugcaccuucgaguacgugucccagccuuuccugauggaccuggaaggcaagcagggcaacuucaagaaccugcgcgaguucguguuuaagaacaucgacggcuacuucaagaucuacagcaagcacaccccuaucaaccucgugcgggaucugccucagggcuucucugcucuggaaccccugguggaucugcccaucggcaucaacaucacccgguuucagacacugcuggcccugcacagaagcuaccugacaccuggcgauagcagcagcggauggacagcuggugccgccgcuuacuaugugggcuaccugcagccuagaaccuuccugcugaaguacaacgagaacggcaccaucaccgacgccguggauugugcucuggauccucugagcgagacaaagugcacccugaaguccuucaccguggaaaagggcaucuaccagaccagcaacuuccgggugcagcccaccgaauccaucgugcgguuccccaauaucaccaaucugugccccuucggcgagguguucaaugccaccagauucgccucuguguacgccuggaaccggaagcggaucagcaauugcguggccgacuacuccgugcuguacaacuccgccagcuucagcaccuucaagugcuacggcguguccccuaccaagcugaacgaccugugcuucacaaacguguacgccgacagcuucgugauccggggagaugaagugcggcagauugccccuggacagacaggcaagaucgccgacuacaacuacaagcugcccgacgacuucaccggcugugugauugccuggaacagcaacaaccuggacuccaaagucggcggcaacuacaauuaccuguaccggcuguuccggaaguccaaucugaagcccuucgagcgggacaucuccaccgagaucuaucaggccggcagcaccccuuguaacggcguggaaggcuucaacugcuacuucccacugcaguccuacggcuuucagcccacaaauggcgugggcuaucagcccuacagagugguggugcugagcuucgaacugcugcaugccccugccacagugugcggcccuaagaaaagcaccaaucucgugaagaacaaaugcgugaacuucaacuucaacggccugaccggcaccggcgugcugacagagagcaacaagaaguuccugccauuccagcaguuuggccgggauaucgccgauaccacagacgccguuagagauccccagacacuggaaauccuggacaucaccccuugcagcuucggcggagugucugugaucaccccuggcaccaacaccagcaaucagguggcagugcuguaccagggcgugaacuguaccgaagugcccguggccauucacgccgaucagcugacaccuacauggcggguguacuccaccggcagcaauguguuucagaccagagccggcugucugaucggagccgagcacgugaacaauagcuacgagugcgacauccccaucggcgcuggaaucugcgccagcuaccagacacagacaaacagcccucggagagccagaagcguggccagccagagcgugauugccuacacaaugucucugggcgccgagaacagcguggccuacuccaacaacucuaucgcuauccccaccaacuucaccaucagcgugaccacagagauccugccuguguccaugaccaagaccagcguggacugcaccauguacaucugcggcgauuccaccgagugcuccaaccugcugcugcaguacggcagcuucugcacccagcugaauagagcccugacagggaucgccguggaacaggacaagaacacccaagagguguucgcccaagugaagcagaucuacaagaccccuccuaucaaggacuucggcggcuucaauuucagccagauucugcccgauccuagcaagcccagcaagcggagcuucaucgaggaccugcuguucaacaaagugacacuggccgacgccggcuucaucaagcaguauggcgauugucugggcgacauugccgccagggaucugauuugcgcccagaaguuuaacggacugacagugcugccuccucugcugaccgaugagaugaucgcccaguacacaucugcccugcuggccggcacaaucacaagcggcuggacauuuggagcaggcgccgcucugcagauccccuuugcuaugcagauggccuaccgguucaacggcaucggagugacccagaaugugcuguacgagaaccagaagcugaucgccaaccaguucaacagcgccaucggcaagauccaggacagccugagcagcacagcaagcgcccugggaaagcugcaggacguggucaaccagaaugcccaggcacugaacacccuggucaagcagcuguccuccaacuucggcgccaucagcucugugcugaacgauauccugagcagacuggacaaggucgaggccgaggugcagaucgacagacugaucacaggcagacugcagagccuccagacauacgugacccagcagcugaucagagccgccgagauuagagccucugccaaucuggccgccaccaagaugucugagugugugcugggccagagcaagagaguggacuuuugcggcaagggcuaccaccugaugagcuucccucagucugccccucacggcgugguguuucugcacgugacauaugugcccgcucaagagaagaauuucaccaccgcuccagccaucugccacgacggcaaagcccacuuuccuagagaaggcguguucguguccaacggcacccauugguucgugacacagcggaacuucuacgagccccagaucaucaccaccgacaacaccuucgugucuggcaacugcgacgucgugaucggcauugugaacaauaccguguacgacccucugcagcccgagcuggacagcuucaaagaggaacuggacaaguacuuuaagaaccacacaagccccgacguggaccugggcgauaucagcggaaucaaugccagcgucgugaacauccagaaagagaucgaccggcugaacgagguggccaagaaucugaacgagagccugaucgaccugcaagaacuggggaaguacgagcaguacaucaaguggcccugguacaucuggcugggcuuuaucgccggacugauugccaucgugauggucacaaucaugcuguguugcaugaccagcugcuguagcugccugaagggcuguuguagcuguggcagcugcugcaaguucgacgaggacgauucugagcccgugcugaagggcgugaaacugcacuacacaugaggacuaguguccaccugucccuccugggcugcuggauugucucguuuuccugccaaauaaacaggaucagcgcuuuacagaucuaaaaaaaaaaaaaaaaaaaaaaaaaaaaaaaaaaaaaaaaaaaaaaaaaaaaaaaaaaaaaaaaaaaaaaaaaaaaaaaaaaaaaaaaaaaaaaaaaaaa

SEQ ID NO: 25268 - RNA, 4105 nt, Artificial Sequence
  SARS-CoV-2/Wuhan/WIV05/2019__EPI_ISL_402128 spike protein mRNA gc mod (1-1273)(D614G_M1229I)
aggagacccgugacccggaaguuguacggcuacgcgacuuucccucccacaaacccucgcgcccuuccuuuccuacuugggcccggcagaaagcuuaccauguucguguuccuggugcugcugccucugguguccagccagugugugaaccugaccaccagaacacagcugccuccagccuacaccaacagcuuuaccagaggcguguacuaccccgacaagguguucagauccagcgugcugcacucuacccaggaccuguuccugccuuucuucagcaacgugaccugguuccacgccauccacguguccggcaccaauggcaccaagagauucgacaaccccgugcugcccuucaacgacgggguguacuuugccagcaccgagaaguccaacaucaucagaggcuggaucuucggcaccacacuggacagcaagacccagagccugcugaucgugaacaacgccaccaacguggucaucaaagugugcgaguuccaguucugcaacgaccccuuccugggcgucuacuaccacaagaacaacaagagcuggauggaaagcgaguuccggguguacagcagcgccaacaacugcaccuucgaguacgugucccagccuuuccugauggaccuggaaggcaagcagggcaacuucaagaaccugcgcgaguucguguuuaagaacaucgacggcuacuucaagaucuacagcaagcacaccccuaucaaccucgugcgggaucugccucagggcuucucugcucuggaaccccugguggaucugcccaucggcaucaacaucacccgguuucagacacugcuggcccugcacagaagcuaccugacaccuggcgauagcagcagcggauggacagcuggugccgccgcuuacuaugugggcuaccugcagccuagaaccuuccugcugaaguacaacgagaacggcaccaucaccgacgccguggauugugcucuggauccucugagcgagacaaagugcacccugaaguccuucaccguggaaaagggcaucuaccagaccagcaacuuccgggugcagcccaccgaauccaucgugcgguuccccaauaucaccaaucugugccccuucggcgagguguucaaugccaccagauucgccucuguguacgccuggaaccggaagcggaucagcaauugcguggccgacuacuccgugcuguacaacuccgccagcuucagcaccuucaagugcuacggcguguccccuaccaagcugaacgaccugugcuucacaaacguguacgccgacagcuucgugauccggggagaugaagugcggcagauugccccuggacagacaggcaagaucgccgacuacaacuacaagcugcccgacgacuucaccggcugugugauugccuggaacagcaacaaccuggacuccaaagucggcggcaacuacaauuaccuguaccggcuguuccggaaguccaaucugaagcccuucgagcgggacaucuccaccgagaucuaucaggccggcagcaccccuuguaacggcguggaaggcuucaacugcuacuucccacugcaguccuacggcuuucagcccacaaauggcgugggcuaucagcccuacagagugguggugcugagcuucgaacugcugcaugccccugccacagugugcggcccuaagaaaagcaccaaucucgugaagaacaaaugcgugaacuucaacuucaacggccugaccggcaccggcgugcugacagagagcaacaagaaguuccugccauuccagcaguuuggccgggauaucgccgauaccacagacgccguuagagauccccagacacuggaaauccuggacaucaccccuugcagcuucggcggagugucugugaucaccccuggcaccaacaccagcaaucagguggcagugcuguaccagggcgugaacuguaccgaagugcccguggccauucacgccgaucagcugacaccuacauggcggguguacuccaccggcagcaauguguuucagaccagagccggcugucugaucggagccgagcacgugaacaauagcuacgagugcgacauccccaucggcgcuggaaucugcgccagcuaccagacacagacaaacagcccucggagagccagaagcguggccagccagagcaucauugccuacacaaugucucugggcgccgagaacagcguggccuacuccaacaacucuaucgcuauccccaccaacuucaccaucagcgugaccacagagauccugccuguguccaugaccaagaccagcguggacugcaccauguacaucugcggcgauuccaccgagugcuccaaccugcugcugcaguacggcagcuucugcacccagcugaauagagcccugacagggaucgccguggaacaggacaagaacacccaagagguguucgcccaagugaagcagaucuacaagaccccuccuaucaaggacuucggcggcuucaauuucagccagauucugcccgauccuagcaagcccagcaagcggagcuucaucgaggaccugcuguucaacaaagugacacuggccgacgccggcuucaucaagcaguauggcgauugucugggcgacauugccgccagggaucugauuugcgcccagaaguuuaacggacugacagugcugccuccucugcugaccgaugagaugaucgcccaguacacaucugcccugcuggccggcacaaucacaagcggcuggacauuuggagcaggcgccgcucugcagauccccuuugcuaugcagauggccuaccgguucaacggcaucggagugacccagaaugugcuguacgagaaccagaagcugaucgccaaccaguucaacagcgccaucggcaagauccaggacagccugagcagcacagcaagcgcccugggaaagcugcaggacguggucaaccagaaugcccaggcacugaacacccuggucaagcagcuguccuccaacuucggcgccaucagcucugugcugaacgauauccugagcagacuggacaaggucgaggccgaggugcagaucgacagacugaucacaggcagacugcagagccuccagacauacgugacccagcagcugaucagagccgccgagauuagagccucugccaaucuggccgccaccaagaugucugagugugugcugggccagagcaagagaguggacuuuugcggcaagggcuaccaccugaugagcuucccucagucugccccucacggcgugguguuucugcacgugacauaugugcccgcucaagagaagaauuucaccaccgcuccagccaucugccacgacggcaaagcccacuuuccuagagaaggcguguucguguccaacggcacccauugguucgugacacagcggaacuucuacgagccccagaucaucaccaccgacaacaccuucgugucuggcaacugcgacgucgugaucggcauugugaacaauaccguguacgacccucugcagcccgagcuggacagcuucaaagaggaacuggacaaguacuuuaagaaccacacaagccccgacguggaccugggcgauaucagcggaaucaaugccagcgucgugaacauccagaaagagaucgaccggcugaacgagguggccaagaaucugaacgagagccugaucgaccugcaagaacuggggaaguacgagcaguacaucaaguggcccugguacaucuggcugggcuuuaucgccggacugauugccaucgugaucgucacaaucaugcuguguugcaugaccagcugcuguagcugccugaagggcuguuguagcuguggcagcugcugcaaguucgacgaggacgauucugagcccgugcugaagggcgugaaacugcacuacacaugaggacuaguguccaccugucccuccugggcugcuggauugucucguuuuccugccaaauaaacaggaucagcgcuuuacagaucuaaaaaaaaaaaaaaaaaaaaaaaaaaaaaaaaaaaaaaaaaaaaaaaaaaaaaaaaaaaaaaaaaaaaaaaaaaaaaaaaaaaaaaaaaaaaaaaaaaaa

SEQ ID NO: 25269 - RNA, 4099 nt, Artificial Sequence
  SARS-CoV-2/Wuhan/WIV05/2019__EPI_ISL_402128 spike protein mRNA gc mod (1-1273)(H69del_V70del_A222V_Y453F_S477N_D614G_I692V)
aggagacccgugacccggaaguuguacggcuacgcgacuuucccucccacaaacccucgcgcccuuccuuuccuacuugggcccggcagaaagcuuaccauguucguguuccuggugcugcugccucugguguccagccagugugugaaccugaccaccagaacacagcugccuccagccuacaccaacagcuuuaccagaggcguguacuaccccgacaagguguucagauccagcgugcugcacucuacccaggaccuguuccugccuuucuucagcaacgugaccugguuccacgccaucuccggcaccaauggcaccaagagauucgacaaccccgugcugcccuucaacgacgggguguacuuugccagcaccgagaaguccaacaucaucagaggcuggaucuucggcaccacacuggacagcaagacccagagccugcugaucgugaacaacgccaccaacguggucaucaaagugugcgaguuccaguucugcaacgaccccuuccugggcgucuacuaccacaagaacaacaagagcuggauggaaagcgaguuccggguguacagcagcgccaacaacugcaccuucgaguacgugucccagccuuuccugauggaccuggaaggcaagcagggcaacuucaagaaccugcgcgaguucguguuuaagaacaucgacggcuacuucaagaucuacagcaagcacaccccuaucaaccucgugcgggaucugccucagggcuucucugugcuggaaccccugguggaucugcccaucggcaucaacaucacccgguuucagacacugcuggcccugcacagaagcuaccugacaccuggcgauagcagcagcggauggacagcuggugccgccgcuuacuaugugggcuaccugcagccuagaaccuuccugcugaaguacaacgagaacggcaccaucaccgacgccguggauugugcucuggauccucugagcgagacaaagugcacccugaaguccuucaccguggaaaagggcaucuaccagaccagcaacuuccgggugcagcccaccgaauccaucgugcgguuccccaauaucaccaaucugugccccuucggcgagguguucaaugccaccagauucgccucuguguacgccuggaaccggaagcggaucagcaauugcguggccgacuacuccgugcuguacaacuccgccagcuucagcaccuucaagugcuacggcguguccccuaccaagcugaacgaccugugcuucacaaacguguacgccgacagcuucgugauccggggagaugaagugcggcagauugccccuggacagacaggcaagaucgccgacuacaacuacaagcugcccgacgacuucaccggcugugugauugccuggaacagcaacaaccuggacuccaaagucggcggcaacuacaauuaccuguuccggcuguuccggaaguccaaucugaagcccuucgagcgggacaucuccaccgagaucuaucaggccggcaacaccccuuguaacggcguggaaggcuucaacugcuacuucccacugcaguccuacggcuuucagcccacaaauggcgugggcuaucagcccuacagagugguggugcugagcuucgaacugcugcaugccccugccacagugugcggcccuaagaaaagcaccaaucucgugaagaacaaaugcgugaacuucaacuucaacggccugaccggcaccggcgugcugacagagagcaacaagaaguuccugccauuccagcaguuuggccgggauaucgccgauaccacagacgccguuagagauccccagacacuggaaauccuggacaucaccccuugcagcuucggcggagugucugugaucaccccuggcaccaacaccagcaaucagguggcagugcuguaccagggcgugaacuguaccgaagugcccguggccauucacgccgaucagcugacaccuacauggcggguguacuccaccggcagcaauguguuucagaccagagccggcugucugaucggagccgagcacgugaacaauagcuacgagugcgacauccccaucggcgcuggaaucugcgccagcuaccagacacagacaaacagcccucggagagccagaagcguggccagccagagcgugauugccuacacaaugucucugggcgccgagaacagcguggccuacuccaacaacucuaucgcuauccccaccaacuucaccaucagcgugaccacagagauccugccuguguccaugaccaagaccagcguggacugcaccauguacaucugcggcgauuccaccgagugcuccaaccugcugcugcaguacggcagcuucugcacccagcugaauagagcccugacagggaucgccguggaacaggacaagaacacccaagagguguucgcccaagugaagcagaucuacaagaccccuccuaucaaggacuucggcggcuucaauuucagccagauucugcccgauccuagcaagcccagcaagcggagcuucaucgaggaccugcuguucaacaaagugacacuggccgacgccggcuucaucaagcaguauggcgauugucugggcgacauugccgccagggaucugauuugcgcccagaaguuuaacggacugacagugcugccuccucugcugaccgaugagaugaucgcccaguacacaucugcccugcuggccggcacaaucacaagcggcuggacauuuggagcaggcgccgcucugcagauccccuuugcuaugcagauggccuaccgguucaacggcaucggagugacccagaaugugcuguacgagaaccagaagcugaucgccaaccaguucaacagcgccaucggcaagauccaggacagccugagcagcacagcaagcgcccugggaaagcugcaggacguggucaaccagaaugcccaggcacugaacacccuggucaagcagcuguccuccaacuucggcgccaucagcucugugcugaacgauauccugagcagacuggacaaggucgaggccgaggugcagaucgacagacugaucacaggcagacugcagagccuccagacauacgugacccagcagcugaucagagccgccgagauuagagccucugccaaucuggccgccaccaagaugucugagugugugcugggccagagcaagagaguggacuuuugcggcaagggcuaccaccugaugagcuucccucagucugccccucacggcgugguguuucugcacgugacauaugugcccgcucaagagaagaauuucaccaccgcuccagccaucugccacgacggcaaagcccacuuuccuagagaaggcguguucguguccaacggcacccauugguucgugacacagcggaacuucuacgagccccagaucaucaccaccgacaacaccuucgugucuggcaacugcgacgucgugaucggcauugugaacaauaccguguacgacccucugcagcccgagcuggacagcuucaaagaggaacuggacaaguacuuuaagaaccacacaagccccgacguggaccugggcgauaucagcggaaucaaugccagcgucgugaacauccagaaagagaucgaccggcugaacgagguggccaagaaucugaacgagagccugaucgaccugcaagaacuggggaaguacgagcaguacaucaaguggcccugguacaucuggcugggcuuuaucgccggacugauugccaucgugauggucacaaucaugcuguguugcaugaccagcugcuguagcugccugaagggcuguuguagcuguggcagcugcugcaaguucgacgaggacgauucugagcccgugcugaagggcgugaaacugcacuacacaugaggacuaguguccaccugucccuccugggcugcuggauugucucguuuuccugccaaauaaacaggaucagcgcuuuacagaucuaaaaaaaaaaaaaaaaaaaaaaaaaaaaaaaaaaaaaaaaaaaaaaaaaaaaaaaaaaaaaaaaaaaaaaaaaaaaaaaaaaaaaaaaaaaaaaaaaaaa

SEQ ID NO: 25270 - RNA, 4099 nt, Artificial Sequence
  SARS-CoV-2/Wuhan/WIV05/2019__EPI_ISL_402128 spike protein mRNA gc mod (1-1273)(H69del_V70del_Y453F_D614G_I692V_M1229I)
aggagacccgugacccggaaguuguacggcuacgcgacuuucccucccacaaacccucgcgcccuuccuuuccuacuugggcccggcagaaagcuuaccauguucguguuccuggugcugcugccucugguguccagccagugugugaaccugaccaccagaacacagcugccuccagccuacaccaacagcuuuaccagaggcguguacuaccccgacaagguguucagauccagcgugcugcacucuacccaggaccuguuccugccuuucuucagcaacgugaccugguuccacgccaucuccggcaccaauggcaccaagagauucgacaaccccgugcugcccuucaacgacgggguguacuuugccagcaccgagaaguccaacaucaucagaggcuggaucuucggcaccacacuggacagcaagacccagagccugcugaucgugaacaacgccaccaacguggucaucaaagugugcgaguuccaguucugcaacgaccccuuccugggcgucuacuaccacaagaacaacaagagcuggauggaaagcgaguuccggguguacagcagcgccaacaacugcaccuucgaguacgugucccagccuuuccugauggaccuggaaggcaagcagggcaacuucaagaaccugcgcgaguucguguuuaagaacaucgacggcuacuucaagaucuacagcaagcacaccccuaucaaccucgugcgggaucugccucagggcuucucugcucuggaaccccugguggaucugcccaucggcaucaacaucacccgguuucagacacugcuggcccugcacagaagcuaccugacaccuggcgauagcagcagcggauggacagcuggugccgccgcuuacuaugugggcuaccugcagccuagaaccuuccugcugaaguacaacgagaacggcaccaucaccgacgccguggauugugcucuggauccucugagcgagacaaagugcacccugaaguccuucaccguggaaaagggcaucuaccagaccagcaacuuccgggugcagcccaccgaauccaucgugcgguuccccaauaucaccaaucugugccccuucggcgagguguucaaugccaccagauucgccucuguguacgccuggaaccggaagcggaucagcaauugcguggccgacuacuccgugcuguacaacuccgccagcuucagcaccuucaagugcuacggcguguccccuaccaagcugaacgaccugugcuucacaaacguguacgccgacagcuucgugauccggggagaugaagugcggcagauugccccuggacagacaggcaagaucgccgacuacaacuacaagcugcccgacgacuucaccggcugugugauugccuggaacagcaacaaccuggacuccaaagucggcggcaacuacaauuaccuguuccggcuguuccggaaguccaaucugaagcccuucgagcgggacaucuccaccgagaucuaucaggccggcagcaccccuuguaacggcguggaaggcuucaacugcuacuucccacugcaguccuacggcuuucagcccacaaauggcgugggcuaucagcccuacagagugguggugcugagcuucgaacugcugcaugccccugccacagugugcggcccuaagaaaagcaccaaucucgugaagaacaaaugcgugaacuucaacuucaacggccugaccggcaccggcgugcugacagagagcaacaagaaguuccugccauuccagcaguuuggccgggauaucgccgauaccacagacgccguuagagauccccagacacuggaaauccuggacaucaccccuugcagcuucggcggagugucugugaucaccccuggcaccaacaccagcaaucagguggcagugcuguaccagggcgugaacuguaccgaagugcccguggccauucacgccgaucagcugacaccuacauggcggguguacuccaccggcagcaauguguuucagaccagagccggcugucugaucggagccgagcacgugaacaauagcuacgagugcgacauccccaucggcgcuggaaucugcgccagcuaccagacacagacaaacagcccucggagagccagaagcguggccagccagagcgugauugccuacacaaugucucugggcgccgagaacagcguggccuacuccaacaacucuaucgcuauccccaccaacuucaccaucagcgugaccacagagauccugccuguguccaugaccaagaccagcguggacugcaccauguacaucugcggcgauuccaccgagugcuccaaccugcugcugcaguacggcagcuucugcacccagcugaauagagcccugacagggaucgccguggaacaggacaagaacacccaagagguguucgcccaagugaagcagaucuacaagaccccuccuaucaaggacuucggcggcuucaauuucagccagauucugcccgauccuagcaagcccagcaagcggagcuucaucgaggaccugcuguucaacaaagugacacuggccgacgccggcuucaucaagcaguauggcgauugucugggcgacauugccgccagggaucugauuugcgcccagaaguuuaacggacugacagugcugccuccucugcugaccgaugagaugaucgcccaguacacaucugcccugcuggccggcacaaucacaagcggcuggacauuuggagcaggcgccgcucugcagauccccuuugcuaugcagauggccuaccgguucaacggcaucggagugacccagaaugugcuguacgagaaccagaagcugaucgccaaccaguucaacagcgccaucggcaagauccaggacagccugagcagcacagcaagcgcccugggaaagcugcaggacguggucaaccagaaugcccaggcacugaacacccuggucaagcagcuguccuccaacuucggcgccaucagcucugugcugaacgauauccugagcagacuggacaaggucgaggccgaggugcagaucgacagacugaucacaggcagacugcagagccuccagacauacgugacccagcagcugaucagagccgccgagauuagagccucugccaaucuggccgccaccaagaugucugagugugugcugggccagagcaagagaguggacuuuugcggcaagggcuaccaccugaugagcuucccucagucugccccucacggcgugguguuucugcacgugacauaugugcccgcucaagagaagaauuucaccaccgcuccagccaucugccacgacggcaaagcccacuuuccuagagaaggcguguucguguccaacggcacccauugguucgugacacagcggaacuucuacgagccccagaucaucaccaccgacaacaccuucgugucuggcaacugcgacgucgugaucggcauugugaacaauaccguguacgacccucugcagcccgagcuggacagcuucaaagaggaacuggacaaguacuuuaagaaccacacaagccccgacguggaccugggcgauaucagcggaaucaaugccagcgucgugaacauccagaaagagaucgaccggcugaacgagguggccaagaaucugaacgagagccugaucgaccugcaagaacuggggaaguacgagcaguacaucaaguggcccugguacaucuggcugggcuuuaucgccggacugauugccaucgugaucgucacaaucaugcuguguugcaugaccagcugcuguagcugccugaagggcuguuguagcuguggcagcugcugcaaguucgacgaggacgauucugagcccgugcugaagggcgugaaacugcacuacacaugaggacuaguguccaccugucccuccugggcugcuggauugucucguuuuccugccaaauaaacaggaucagcgcuuuacagaucuaaaaaaaaaaaaaaaaaaaaaaaaaaaaaaaaaaaaaaaaaaaaaaaaaaaaaaaaaaaaaaaaaaaaaaaaaaaaaaaaaaaaaaaaaaaaaaaaaaaa

SEQ ID NO: 25271 - RNA, 4096 nt, Artificial Sequence
  SARS-CoV-2/Wuhan/WIV05/2019__EPI_ISL_402128 spike protein mRNA gc mod (1-1273)(H69del_V70del_Y144del_N501Y_A570D_D614G_P681H_T716I_S982 A_D1118H)
aggagacccgugacccggaaguuguacggcuacgcgacuuucccucccacaaacccucgcgcccuuccuuuccuacuugggcccggcagaaagcuuaccauguucguguuccuggugcugcugccucugguguccagccagugugugaaccugaccaccagaacacagcugccuccagccuacaccaacagcuuuaccagaggcguguacuaccccgacaagguguucagauccagcgugcugcacucuacccaggaccuguuccugccuuucuucagcaacgugaccugguuccacgccaucuccggcaccaauggcaccaagagauucgacaaccccgugcugcccuucaacgacgggguguacuuugccagcaccgagaaguccaacaucaucagaggcuggaucuucggcaccacacuggacagcaagacccagagccugcugaucgugaacaacgccaccaacguggucaucaaagugugcgaguuccaguucugcaacgaccccuuccugggcgucuaccacaagaacaacaagagcuggauggaaagcgaguuccggguguacagcagcgccaacaacugcaccuucgaguacgugucccagccuuuccugauggaccuggaaggcaagcagggcaacuucaagaaccugcgcgaguucguguuuaagaacaucgacggcuacuucaagaucuacagcaagcacaccccuaucaaccucgugcgggaucugccucagggcuucucugcucuggaaccccugguggaucugcccaucggcaucaacaucacccgguuucagacacugcuggcccugcacagaagcuaccugacaccuggcgauagcagcagcggauggacagcuggugccgccgcuuacuaugugggcuaccugcagccuagaaccuuccugcugaaguacaacgagaacggcaccaucaccgacgccguggauugugcucuggauccucugagcgagacaaagugcacccugaaguccuucaccguggaaaagggcaucuaccagaccagcaacuuccgggugcagcccaccgaauccaucgugcgguuccccaauaucaccaaucugugccccuucggcgagguguucaaugccaccagauucgccucuguguacgccuggaaccggaagcggaucagcaauugcguggccgacuacuccgugcuguacaacuccgccagcuucagcaccuucaagugcuacggcguguccccuaccaagcugaacgaccugugcuucacaaacguguacgccgacagcuucgugauccggggagaugaagugcggcagauugccccuggacagacaggcaagaucgccgacuacaacuacaagcugcccgacgacuucaccggcugugugauugccuggaacagcaacaaccuggacuccaaagucggcggcaacuacaauuaccuguaccggcuguuccggaaguccaaucugaagcccuucgagcgggacaucuccaccgagaucuaucaggccggcagcaccccuuguaacggcguggaaggcuucaacugcuacuucccacugcaguccuacggcuuucagcccacauacggcgugggcuaucagcccuacagagugguggugcugagcuucgaacugcugcaugccccugccacagugugcggcccuaagaaaagcaccaaucucgugaagaacaaaugcgugaacuucaacuucaacggccugaccggcaccggcgugcugacagagagcaacaagaaguuccugccauuccagcaguuuggccgggauaucgacgauaccacagacgccguuagagauccccagacacuggaaauccuggacaucaccccuugcagcuucggcggagugucugugaucaccccuggcaccaacaccagcaaucagguggcagugcuguaccagggcgugaacuguaccgaagugcccguggccauucacgccgaucagcugacaccuacauggcggguguacuccaccggcagcaauguguuucagaccagagccggcugucugaucggagccgagcacgugaacaauagcuacgagugcgacauccccaucggcgcuggaaucugcgccagcuaccagacacagacaaacagccaccggagagccagaagcguggccagccagagcaucauugccuacacaaugucucugggcgccgagaacagcguggccuacuccaacaacucuaucgcuauccccaucaacuucaccaucagcgugaccacagagauccugccuguguccaugaccaagaccagcguggacugcaccauguacaucugcggcgauuccaccgagugcuccaaccugcugcugcaguacggcagcuucugcacccagcugaauagagcccugacagggaucgccguggaacaggacaagaacacccaagagguguucgcccaagugaagcagaucuacaagaccccuccuaucaaggacuucggcggcuucaauuucagccagauucugcccgauccuagcaagcccagcaagcggagcuucaucgaggaccugcuguucaacaaagugacacuggccgacgccggcuucaucaagcaguauggcgauugucugggcgacauugccgccagggaucugauuugcgcccagaaguuuaacggacugacagugcugccuccucugcugaccgaugagaugaucgcccaguacacaucugcccugcuggccggcacaaucacaagcggcuggacauuuggagcaggcgccgcucugcagauccccuuugcuaugcagauggccuaccgguucaacggcaucggagugacccagaaugugcuguacgagaaccagaagcugaucgccaaccaguucaacagcgccaucggcaagauccaggacagccugagcagcacagcaagcgcccugggaaagcugcaggacguggucaaccagaaugcccaggcacugaacacccuggucaagcagcuguccuccaacuucggcgccaucagcucugugcugaacgauauccuggccagacuggacaaggucgaggccgaggugcagaucgacagacugaucacaggcagacugcagagccuccagacauacgugacccagcagcugaucagagccgccgagauuagagccucugccaaucuggccgccaccaagaugucugagugugugcugggccagagcaagagaguggacuuuugcggcaagggcuaccaccugaugagcuucccucagucugccccucacggcgugguguuucugcacgugacauaugugcccgcucaagagaagaauuucaccaccgcuccagccaucugccacgacggcaaagcccacuuuccuagagaaggcguguucguguccaacggcacccauugguucgugacacagcggaacuucuacgagccccagaucaucaccacccacaacaccuucgugucuggcaacugcgacgucgugaucggcauugugaacaauaccguguacgacccucugcagcccgagcuggacagcuucaaagaggaacuggacaaguacuuuaagaaccacacaagccccgacguggaccugggcgauaucagcggaaucaaugccagcgucgugaacauccagaaagagaucgaccggcugaacgagguggccaagaaucugaacgagagccugaucgaccugcaagaacuggggaaguacgagcaguacaucaaguggcccugguacaucuggcugggcuuuaucgccggacugauugccaucgugauggucacaaucaugcuguguugcaugaccagcugcuguagcugccugaagggcuguuguagcuguggcagcugcugcaaguucgacgaggacgauucugagcccgugcugaagggcgugaaacugcacuacacaugaggacuaguguccaccugucccuccugggcugcuggauugucucguuuuccugccaaauaaacaggaucagcgcuuuacagaucuaaaaaaaaaaaaaaaaaaaaaaaaaaaaaaaaaaaaaaaaaaaaaaaaaaaaaaaaaaaaaaaaaaaaaaaaaaaaaaaaaaaaaaaaaaaaaaaaaaaa

SEQ ID NO: 25272 - RNA, 4105 nt, Artificial Sequence
  SARS-CoV-2/Wuhan/WIV05/2019__EPI_ISL_402128 spike protein mRNA gc mod (1-1273)(K417N_E484K_N501Y_D614G)
aggagacccgugacccggaaguuguacggcuacgcgacuuucccucccacaaacccucgcgcccuuccuuuccuacuugggcccggcagaaagcuuaccauguucguguuccuggugcugcugccucugguguccagccagugugugaaccugaccaccagaacacagcugccuccagccuacaccaacagcuuuaccagaggcguguacuaccccgacaagguguucagauccagcgugcugcacucuacccaggaccuguuccugccuuucuucagcaacgugaccugguuccacgccauccacguguccggcaccaauggcaccaagagauucgacaaccccgugcugcccuucaacgacgggguguacuuugccagcaccgagaaguccaacaucaucagaggcuggaucuucggcaccacacuggacagcaagacccagagccugcugaucgugaacaacgccaccaacguggucaucaaagugugcgaguuccaguucugcaacgaccccuuccugggcgucuacuaccacaagaacaacaagagcuggauggaaagcgaguuccggguguacagcagcgccaacaacugcaccuucgaguacgugucccagccuuuccugauggaccuggaaggcaagcagggcaacuucaagaaccugcgcgaguucguguuuaagaacaucgacggcuacuucaagaucuacagcaagcacaccccuaucaaccucgugcgggaucugccucagggcuucucugcucuggaaccccugguggaucugcccaucggcaucaacaucacccgguuucagacacugcuggcccugcacagaagcuaccugacaccuggcgauagcagcagcggauggacagcuggugccgccgcuuacuaugugggcuaccugcagccuagaaccuuccugcugaaguacaacgagaacggcaccaucaccgacgccguggauugugcucuggauccucugagcgagacaaagugcacccugaaguccuucaccguggaaaagggcaucuaccagaccagcaacuuccgggugcagcccaccgaauccaucgugcgguuccccaauaucaccaaucugugccccuucggcgagguguucaaugccaccagauucgccucuguguacgccuggaaccggaagcggaucagcaauugcguggccgacuacuccgugcuguacaacuccgccagcuucagcaccuucaagugcuacggcguguccccuaccaagcugaacgaccugugcuucacaaacguguacgccgacagcuucgugauccggggagaugaagugcggcagauugccccuggacagacaggcaacaucgccgacuacaacuacaagcugcccgacgacuucaccggcugugugauugccuggaacagcaacaaccuggacuccaaagucggcggcaacuacaauuaccuguaccggcuguuccggaaguccaaucugaagcccuucgagcgggacaucuccaccgagaucuaucaggccggcagcaccccuuguaacggcgugaagggcuucaacugcuacuucccacugcaguccuacggcuuucagcccacauacggcgugggcuaucagcccuacagagugguggugcugagcuucgaacugcugcaugccccugccacagugugcggcccuaagaaaagcaccaaucucgugaagaacaaaugcgugaacuucaacuucaacggccugaccggcaccggcgugcugacagagagcaacaagaaguuccugccauuccagcaguuuggccgggauaucgccgauaccacagacgccguuagagauccccagacacuggaaauccuggacaucaccccuugcagcuucggcggagugucugugaucaccccuggcaccaacaccagcaaucagguggcagugcuguaccagggcgugaacuguaccgaagugcccguggccauucacgccgaucagcugacaccuacauggcggguguacuccaccggcagcaauguguuucagaccagagccggcugucugaucggagccgagcacgugaacaauagcuacgagugcgacauccccaucggcgcuggaaucugcgccagcuaccagacacagacaaacagcccucggagagccagaagcguggccagccagagcaucauugccuacacaaugucucugggcgccgagaacagcguggccuacuccaacaacucuaucgcuauccccaccaacuucaccaucagcgugaccacagagauccugccuguguccaugaccaagaccagcguggacugcaccauguacaucugcggcgauuccaccgagugcuccaaccugcugcugcaguacggcagcuucugcacccagcugaauagagcccugacagggaucgccguggaacaggacaagaacacccaagagguguucgcccaagugaagcagaucuacaagaccccuccuaucaaggacuucggcggcuucaauuucagccagauucugcccgauccuagcaagcccagcaagcggagcuucaucgaggaccugcuguucaacaaagugacacuggccgacgccggcuucaucaagcaguauggcgauugucugggcgacauugccgccagggaucugauuugcgcccagaaguuuaacggacugacagugcugccuccucugcugaccgaugagaugaucgcccaguacacaucugcccugcuggccggcacaaucacaagcggcuggacauuuggagcaggcgccgcucugcagauccccuuugcuaugcagauggccuaccgguucaacggcaucggagugacccagaaugugcuguacgagaaccagaagcugaucgccaaccaguucaacagcgccaucggcaagauccaggacagccugagcagcacagcaagcgcccugggaaagcugcaggacguggucaaccagaaugcccaggcacugaacacccuggucaagcagcuguccuccaacuucggcgccaucagcucugugcugaacgauauccugagcagacuggacaaggucgaggccgaggugcagaucgacagacugaucacaggcagacugcagagccuccagacauacgugacccagcagcugaucagagccgccgagauuagagccucugccaaucuggccgccaccaagaugucugagugugugcugggccagagcaagagaguggacuuuugcggcaagggcuaccaccugaugagcuucccucagucugccccucacggcgugguguuucugcacgugacauaugugcccgcucaagagaagaauuucaccaccgcuccagccaucugccacgacggcaaagcccacuuuccuagagaaggcguguucguguccaacggcacccauugguucgugacacagcggaacuucuacgagccccagaucaucaccaccgacaacaccuucgugucuggcaacugcgacgucgugaucggcauugugaacaauaccguguacgacccucugcagcccgagcuggacagcuucaaagaggaacuggacaaguacuuuaagaaccacacaagccccgacguggaccugggcgauaucagcggaaucaaugccagcgucgugaacauccagaaagagaucgaccggcugaacgagguggccaagaaucugaacgagagccugaucgaccugcaagaacuggggaaguacgagcaguacaucaaguggcccugguacaucuggcugggcuuuaucgccggacugauugccaucgugauggucacaaucaugcuguguugcaugaccagcugcuguagcugccugaagggcuguuguagcuguggcagcugcugcaaguucgacgaggacgauucugagcccgugcugaagggcgugaaacugcacuacacaugaggacuaguguccaccugucccuccugggcugcuggauugucucguuuuccugccaaauaaacaggaucagcgcuuuacagaucuaaaaaaaaaaaaaaaaaaaaaaaaaaaaaaaaaaaaaaaaaaaaaaaaaaaaaaaaaaaaaaaaaaaaaaaaaaaaaaaaaaaaaaaaaaaaaaaaaaaa

SEQ ID NO: 25273 - RNA, 4096 nt, Artificial Sequence
  SARS-CoV-2/Wuhan/WIV05/2019__EPI_ISL_402128 spike protein mRNA gc mod (1-1273)(L18F_D80A_D215G_L242del_A243del_L244del_R246I_K417N_E484 K_N501Y_D614G_A701V)
aggagacccgugacccggaaguuguacggcuacgcgacuuucccucccacaaacccucgcgcccuuccuuuccuacuugggcccggcagaaagcuuaccauguucguguuccuggugcugcugccucugguguccagccagugugugaacuucaccaccagaacacagcugccuccagccuacaccaacagcuuuaccagaggcguguacuaccccgacaagguguucagauccagcgugcugcacucuacccaggaccuguuccugccuuucuucagcaacgugaccugguuccacgccauccacguguccggcaccaauggcaccaagagauucgccaaccccgugcugcccuucaacgacgggguguacuuugccagcaccgagaaguccaacaucaucagaggcuggaucuucggcaccacacuggacagcaagacccagagccugcugaucgugaacaacgccaccaacguggucaucaaagugugcgaguuccaguucugcaacgaccccuuccugggcgucuacuaccacaagaacaacaagagcuggauggaaagcgaguuccggguguacagcagcgccaacaacugcaccuucgaguacgugucccagccuuuccugauggaccuggaaggcaagcagggcaacuucaagaaccugcgcgaguucguguuuaagaacaucgacggcuacuucaagaucuacagcaagcacaccccuaucaaccucgugcggggccugccucagggcuucucugcucuggaaccccugguggaucugcccaucggcaucaacaucacccgguuucagacacugcacaucagcuaccugacaccuggcgauagcagcagcggauggacagcuggugccgccgcuuacuaugugggcuaccugcagccuagaaccuuccugcugaaguacaacgagaacggcaccaucaccgacgccguggauugugcucuggauccucugagcgagacaaagugcacccugaaguccuucaccguggaaaagggcaucuaccagaccagcaacuuccgggugcagcccaccgaauccaucgugcgguuccccaauaucaccaaucugugccccuucggcgagguguucaaugccaccagauucgccucuguguacgccuggaaccggaagcggaucagcaauugcguggccgacuacuccgugcuguacaacuccgccagcuucagcaccuucaagugcuacggcguguccccuaccaagcugaacgaccugugcuucacaaacguguacgccgacagcuucgugauccggggagaugaagugcggcagauugccccuggacagacaggcaacaucgccgacuacaacuacaagcugcccgacgacuucaccggcugugugauugccuggaacagcaacaaccuggacuccaaagucggcggcaacuacaauuaccuguaccggcuguuccggaaguccaaucugaagcccuucgagcgggacaucuccaccgagaucuaucaggccggcagcaccccuuguaacggcgugaagggcuucaacugcuacuucccacugcaguccuacggcuuucagcccacauacggcgugggcuaucagcccuacagagugguggugcugagcuucgaacugcugcaugccccugccacagugugcggcccuaagaaaagcaccaaucucgugaagaacaaaugcgugaacuucaacuucaacggccugaccggcaccggcgugcugacagagagcaacaagaaguuccugccauuccagcaguuuggccgggauaucgccgauaccacagacgccguuagagauccccagacacuggaaauccuggacaucaccccuugcagcuucggcggagugucugugaucaccccuggcaccaacaccagcaaucagguggcagugcuguaccagggcgugaacuguaccgaagugcccguggccauucacgccgaucagcugacaccuacauggcggguguacuccaccggcagcaauguguuucagaccagagccggcugucugaucggagccgagcacgugaacaauagcuacgagugcgacauccccaucggcgcuggaaucugcgccagcuaccagacacagacaaacagcccucggagagccagaagcguggccagccagagcaucauugccuacacaaugucucugggcguggagaacagcguggccuacuccaacaacucuaucgcuauccccaccaacuucaccaucagcgugaccacagagauccugccuguguccaugaccaagaccagcguggacugcaccauguacaucugcggcgauuccaccgagugcuccaaccugcugcugcaguacggcagcuucugcacccagcugaauagagcccugacagggaucgccguggaacaggacaagaacacccaagagguguucgcccaagugaagcagaucuacaagaccccuccuaucaaggacuucggcggcuucaauuucagccagauucugcccgauccuagcaagcccagcaagcggagcuucaucgaggaccugcuguucaacaaagugacacuggccgacgccggcuucaucaagcaguauggcgauugucugggcgacauugccgccagggaucugauuugcgcccagaaguuuaacggacugacagugcugccuccucugcugaccgaugagaugaucgcccaguacacaucugcccugcuggccggcacaaucacaagcggcuggacauuuggagcaggcgccgcucugcagauccccuuugcuaugcagauggccuaccgguucaacggcaucggagugacccagaaugugcuguacgagaaccagaagcugaucgccaaccaguucaacagcgccaucggcaagauccaggacagccugagcagcacagcaagcgcccugggaaagcugcaggacguggucaaccagaaugcccaggcacugaacacccuggucaagcagcuguccuccaacuucggcgccaucagcucugugcugaacgauauccugagcagacuggacaaggucgaggccgaggugcagaucgacagacugaucacaggcagacugcagagccuccagacauacgugacccagcagcugaucagagccgccgagauuagagccucugccaaucuggccgccaccaagaugucugagugugugcugggccagagcaagagaguggacuuuugcggcaagggcuaccaccugaugagcuucccucagucugccccucacggcgugguguuucugcacgugacauaugugcccgcucaagagaagaauuucaccaccgcuccagccaucugccacgacggcaaagcccacuuuccuagagaaggcguguucguguccaacggcacccauugguucgugacacagcggaacuucuacgagccccagaucaucaccaccgacaacaccuucgugucuggcaacugcgacgucgugaucggcauugugaacaauaccguguacgacccucugcagcccgagcuggacagcuucaaagaggaacuggacaaguacuuuaagaaccacacaagccccgacguggaccugggcgauaucagcggaaucaaugccagcgucgugaacauccagaaagagaucgaccggcugaacgagguggccaagaaucugaacgagagccugaucgaccugcaagaacuggggaaguacgagcaguacaucaaguggcccugguacaucuggcugggcuuuaucgccggacugauugccaucgugauggucacaaucaugcuguguugcaugaccagcugcuguagcugccugaagggcuguuguagcuguggcagcugcugcaaguucgacgaggacgauucugagcccgugcugaagggcgugaaacugcacuacacaugaggacuaguguccaccugucccuccugggcugcuggauugucucguuuuccugccaaauaaacaggaucagcgcuuuacagaucuaaaaaaaaaaaaaaaaaaaaaaaaaaaaaaaaaaaaaaaaaaaaaaaaaaaaaaaaaaaaaaaaaaaaaaaaaaaaaaaaaaaaaaaaaaaaaaaaaaaa

SEQ ID NO: 25274 - RNA, 4105 nt, Artificial Sequence
  SARS-CoV-2/Wuhan/WIV05/2019__EPI_ISL_402128 spike protein mRNA gc mod (1-1273)(E484K_D614G)
aggagacccgugacccggaaguuguacggcuacgcgacuuucccucccacaaacccucgcgcccuuccuuuccuacuugggcccggcagaaagcuuaccauguucguguuccuggugcugcugccucugguguccagccagugugugaaccugaccaccagaacacagcugccuccagccuacaccaacagcuuuaccagaggcguguacuaccccgacaagguguucagauccagcgugcugcacucuacccaggaccuguuccugccuuucuucagcaacgugaccugguuccacgccauccacguguccggcaccaauggcaccaagagauucgacaaccccgugcugcccuucaacgacgggguguacuuugccagcaccgagaaguccaacaucaucagaggcuggaucuucggcaccacacuggacagcaagacccagagccugcugaucgugaacaacgccaccaacguggucaucaaagugugcgaguuccaguucugcaacgaccccuuccugggcgucuacuaccacaagaacaacaagagcuggauggaaagcgaguuccggguguacagcagcgccaacaacugcaccuucgaguacgugucccagccuuuccugauggaccuggaaggcaagcagggcaacuucaagaaccugcgcgaguucguguuuaagaacaucgacggcuacuucaagaucuacagcaagcacaccccuaucaaccucgugcgggaucugccucagggcuucucugcucuggaaccccugguggaucugcccaucggcaucaacaucacccgguuucagacacugcuggcccugcacagaagcuaccugacaccuggcgauagcagcagcggauggacagcuggugccgccgcuuacuaugugggcuaccugcagccuagaaccuuccugcugaaguacaacgagaacggcaccaucaccgacgccguggauugugcucuggauccucugagcgagacaaagugcacccugaaguccuucaccguggaaaagggcaucuaccagaccagcaacuuccgggugcagcccaccgaauccaucgugcgguuccccaauaucaccaaucugugccccuucggcgagguguucaaugccaccagauucgccucuguguacgccuggaaccggaagcggaucagcaauugcguggccgacuacuccgugcuguacaacuccgccagcuucagcaccuucaagugcuacggcguguccccuaccaagcugaacgaccugugcuucacaaacguguacgccgacagcuucgugauccggggagaugaagugcggcagauugccccuggacagacaggcaagaucgccgacuacaacuacaagcugcccgacgacuucaccggcugugugauugccuggaacagcaacaaccuggacuccaaagucggcggcaacuacaauuaccuguaccggcuguuccggaaguccaaucugaagcccuucgagcgggacaucuccaccgagaucuaucaggccggcagcaccccuuguaacggcgugaagggcuucaacugcuacuucccacugcaguccuacggcuuucagcccacaaauggcgugggcuaucagcccuacagagugguggugcugagcuucgaacugcugcaugccccugccacagugugcggcccuaagaaaagcaccaaucucgugaagaacaaaugcgugaacuucaacuucaacggccugaccggcaccggcgugcugacagagagcaacaagaaguuccugccauuccagcaguuuggccgggauaucgccgauaccacagacgccguuagagauccccagacacuggaaauccuggacaucaccccuugcagcuucggcggagugucugugaucaccccuggcaccaacaccagcaaucagguggcagugcuguaccagggcgugaacuguaccgaagugcccguggccauucacgccgaucagcugacaccuacauggcggguguacuccaccggcagcaauguguuucagaccagagccggcugucugaucggagccgagcacgugaacaauagcuacgagugcgacauccccaucggcgcuggaaucugcgccagcuaccagacacagacaaacagcccucggagagccagaagcguggccagccagagcaucauugccuacacaaugucucugggcgccgagaacagcguggccuacuccaacaacucuaucgcuauccccaccaacuucaccaucagcgugaccacagagauccugccuguguccaugaccaagaccagcguggacugcaccauguacaucugcggcgauuccaccgagugcuccaaccugcugcugcaguacggcagcuucugcacccagcugaauagagcccugacagggaucgccguggaacaggacaagaacacccaagagguguucgcccaagugaagcagaucuacaagaccccuccuaucaaggacuucggcggcuucaauuucagccagauucugcccgauccuagcaagcccagcaagcggagcuucaucgaggaccugcuguucaacaaagugacacuggccgacgccggcuucaucaagcaguauggcgauugucugggcgacauugccgccagggaucugauuugcgcccagaaguuuaacggacugacagugcugccuccucugcugaccgaugagaugaucgcccaguacacaucugcccugcuggccggcacaaucacaagcggcuggacauuuggagcaggcgccgcucugcagauccccuuugcuaugcagauggccuaccgguucaacggcaucggagugacccagaaugugcuguacgagaaccagaagcugaucgccaaccaguucaacagcgccaucggcaagauccaggacagccugagcagcacagcaagcgcccugggaaagcugcaggacguggucaaccagaaugcccaggcacugaacacccuggucaagcagcuguccuccaacuucggcgccaucagcucugugcugaacgauauccugagcagacuggacaaggucgaggccgaggugcagaucgacagacugaucacaggcagacugcagagccuccagacauacgugacccagcagcugaucagagccgccgagauuagagccucugccaaucuggccgccaccaagaugucugagugugugcugggccagagcaagagaguggacuuuugcggcaagggcuaccaccugaugagcuucccucagucugccccucacggcgugguguuucugcacgugacauaugugcccgcucaagagaagaauuucaccaccgcuccagccaucugccacgacggcaaagcccacuuuccuagagaaggcguguucguguccaacggcacccauugguucgugacacagcggaacuucuacgagccccagaucaucaccaccgacaacaccuucgugucuggcaacugcgacgucgugaucggcauugugaacaauaccguguacgacccucugcagcccgagcuggacagcuucaaagaggaacuggacaaguacuuuaagaaccacacaagccccgacguggaccugggcgauaucagcggaaucaaugccagcgucgugaacauccagaaagagaucgaccggcugaacgagguggccaagaaucugaacgagagccugaucgaccugcaagaacuggggaaguacgagcaguacaucaaguggcccugguacaucuggcugggcuuuaucgccggacugauugccaucgugauggucacaaucaugcuguguugcaugaccagcugcuguagcugccugaagggcuguuguagcuguggcagcugcugcaaguucgacgaggacgauucugagcccgugcugaagggcgugaaacugcacuacacaugaggacuaguguccaccugucccuccugggcugcuggauugucucguuuuccugccaaauaaacaggaucagcgcuuuacagaucuaaaaaaaaaaaaaaaaaaaaaaaaaaaaaaaaaaaaaaaaaaaaaaaaaaaaaaaaaaaaaaaaaaaaaaaaaaaaaaaaaaaaaaaaaaaaaaaaaaaa

SEQ ID NO: 25275 - RNA, 4105 nt, Artificial Sequence
  SARS-CoV-2/Wuhan/WIV05/2019__EPI_ISL_402128 spike protein mRNA gc mod (1-1273)(L18F_T20N_P26S_D138Y_R190S_K417T_E484K_N501Y_D614G_H655Y _T1027I)
aggagacccgugacccggaaguuguacggcuacgcgacuuucccucccacaaacccucgcgcccuuccuuuccuacuugggcccggcagaaagcuuaccauguucguguuccuggugcugcugccucugguguccagccagugugugaacuucaccaacagaacacagcugccuagcgccuacaccaacagcuuuaccagaggcguguacuaccccgacaagguguucagauccagcgugcugcacucuacccaggaccuguuccugccuuucuucagcaacgugaccugguuccacgccauccacguguccggcaccaauggcaccaagagauucgacaaccccgugcugcccuucaacgacgggguguacuuugccagcaccgagaaguccaacaucaucagaggcuggaucuucggcaccacacuggacagcaagacccagagccugcugaucgugaacaacgccaccaacguggucaucaaagugugcgaguuccaguucugcaacuaccccuuccugggcgucuacuaccacaagaacaacaagagcuggauggaaagcgaguuccggguguacagcagcgccaacaacugcaccuucgaguacgugucccagccuuuccugauggaccuggaaggcaagcagggcaacuucaagaaccugagcgaguucguguuuaagaacaucgacggcuacuucaagaucuacagcaagcacaccccuaucaaccucgugcgggaucugccucagggcuucucugcucuggaaccccugguggaucugcccaucggcaucaacaucacccgguuucagacacugcuggcccugcacagaagcuaccugacaccuggcgauagcagcagcggauggacagcuggugccgccgcuuacuaugugggcuaccugcagccuagaaccuuccugcugaaguacaacgagaacggcaccaucaccgacgccguggauugugcucuggauccucugagcgagacaaagugcacccugaaguccuucaccguggaaaagggcaucuaccagaccagcaacuuccgggugcagcccaccgaauccaucgugcgguuccccaauaucaccaaucugugccccuucggcgagguguucaaugccaccagauucgccucuguguacgccuggaaccggaagcggaucagcaauugcguggccgacuacuccgugcuguacaacuccgccagcuucagcaccuucaagugcuacggcguguccccuaccaagcugaacgaccugugcuucacaaacguguacgccgacagcuucgugauccggggagaugaagugcggcagauugccccuggacagacaggcaccaucgccgacuacaacuacaagcugcccgacgacuucaccggcugugugauugccuggaacagcaacaaccuggacuccaaagucggcggcaacuacaauuaccuguaccggcuguuccggaaguccaaucugaagcccuucgagcgggacaucuccaccgagaucuaucaggccggcagcaccccuuguaacggcgugaagggcuucaacugcuacuucccacugcaguccuacggcuuucagcccacauacggcgugggcuaucagcccuacagagugguggugcugagcuucgaacugcugcaugccccugccacagugugcggcccuaagaaaagcaccaaucucgugaagaacaaaugcgugaacuucaacuucaacggccugaccggcaccggcgugcugacagagagcaacaagaaguuccugccauuccagcaguuuggccgggauaucgccgauaccacagacgccguuagagauccccagacacuggaaauccuggacaucaccccuugcagcuucggcggagugucugugaucaccccuggcaccaacaccagcaaucagguggcagugcuguaccagggcgugaacuguaccgaagugcccguggccauucacgccgaucagcugacaccuacauggcggguguacuccaccggcagcaauguguuucagaccagagccggcugucugaucggagccgaguacgugaacaauagcuacgagugcgacauccccaucggcgcuggaaucugcgccagcuaccagacacagacaaacagcccucggagagccagaagcguggccagccagagcaucauugccuacacaaugucucugggcgccgagaacagcguggccuacuccaacaacucuaucgcuauccccaccaacuucaccaucagcgugaccacagagauccugccuguguccaugaccaagaccagcguggacugcaccauguacaucugcggcgauuccaccgagugcuccaaccugcugcugcaguacggcagcuucugcacccagcugaauagagcccugacagggaucgccguggaacaggacaagaacacccaagagguguucgcccaagugaagcagaucuacaagaccccuccuaucaaggacuucggcggcuucaauuucagccagauucugcccgauccuagcaagcccagcaagcggagcuucaucgaggaccugcuguucaacaaagugacacuggccgacgccggcuucaucaagcaguauggcgauugucugggcgacauugccgccagggaucugauuugcgcccagaaguuuaacggacugacagugcugccuccucugcugaccgaugagaugaucgcccaguacacaucugcccugcuggccggcacaaucacaagcggcuggacauuuggagcaggcgccgcucugcagauccccuuugcuaugcagauggccuaccgguucaacggcaucggagugacccagaaugugcuguacgagaaccagaagcugaucgccaaccaguucaacagcgccaucggcaagauccaggacagccugagcagcacagcaagcgcccugggaaagcugcaggacguggucaaccagaaugcccaggcacugaacacccuggucaagcagcuguccuccaacuucggcgccaucagcucugugcugaacgauauccugagcagacuggacaaggucgaggccgaggugcagaucgacagacugaucacaggcagacugcagagccuccagacauacgugacccagcagcugaucagagccgccgagauuagagccucugccaaucuggccgccaucaagaugucugagugugugcugggccagagcaagagaguggacuuuugcggcaagggcuaccaccugaugagcuucccucagucugccccucacggcgugguguuucugcacgugacauaugugcccgcucaagagaagaauuucaccaccgcuccagccaucugccacgacggcaaagcccacuuuccuagagaaggcguguucguguccaacggcacccauugguucgugacacagcggaacuucuacgagccccagaucaucaccaccgacaacaccuucgugucuggcaacugcgacgucgugaucggcauugugaacaauaccguguacgacccucugcagcccgagcuggacagcuucaaagaggaacuggacaaguacuuuaagaaccacacaagccccgacguggaccugggcgauaucagcggaaucaaugccagcgucgugaacauccagaaagagaucgaccggcugaacgagguggccaagaaucugaacgagagccugaucgaccugcaagaacuggggaaguacgagcaguacaucaaguggcccugguacaucuggcugggcuuuaucgccggacugauugccaucgugauggucacaaucaugcuguguugcaugaccagcugcuguagcugccugaagggcuguuguagcuguggcagcugcugcaaguucgacgaggacgauucugagcccgugcugaagggcgugaaacugcacuacacaugaggacuaguguccaccugucccuccugggcugcuggauugucucguuuuccugccaaauaaacaggaucagcgcuuuacagaucuaaaaaaaaaaaaaaaaaaaaaaaaaaaaaaaaaaaaaaaaaaaaaaaaaaaaaaaaaaaaaaaaaaaaaaaaaaaaaaaaaaaaaaaaaaaaaaaaaaaa

SEQ ID NO: 25276 - RNA, 4105 nt, Artificial Sequence
  SARS-CoV-2/Wuhan/WIV05/2019__EPI_ISL_402128 spike protein mRNA gc mod (1-1273)(S13I_W152C_L452R_D614G)
aggagacccgugacccggaaguuguacggcuacgcgacuuucccucccacaaacccucgcgcccuuccuuuccuacuugggcccggcagaaagcuuaccauguucguguuccuggugcugcugccucugguguccauccagugugugaaccugaccaccagaacacagcugccuccagccuacaccaacagcuuuaccagaggcguguacuaccccgacaagguguucagauccagcgugcugcacucuacccaggaccuguuccugccuuucuucagcaacgugaccugguuccacgccauccacguguccggcaccaauggcaccaagagauucgacaaccccgugcugcccuucaacgacgggguguacuuugccagcaccgagaaguccaacaucaucagaggcuggaucuucggcaccacacuggacagcaagacccagagccugcugaucgugaacaacgccaccaacguggucaucaaagugugcgaguuccaguucugcaacgaccccuuccugggcgucuacuaccacaagaacaacaagagcugcauggaaagcgaguuccggguguacagcagcgccaacaacugcaccuucgaguacgugucccagccuuuccugauggaccuggaaggcaagcagggcaacuucaagaaccugcgcgaguucguguuuaagaacaucgacggcuacuucaagaucuacagcaagcacaccccuaucaaccucgugcgggaucugccucagggcuucucugcucuggaaccccugguggaucugcccaucggcaucaacaucacccgguuucagacacugcuggcccugcacagaagcuaccugacaccuggcgauagcagcagcggauggacagcuggugccgccgcuuacuaugugggcuaccugcagccuagaaccuuccugcugaaguacaacgagaacggcaccaucaccgacgccguggauugugcucuggauccucugagcgagacaaagugcacccugaaguccuucaccguggaaaagggcaucuaccagaccagcaacuuccgggugcagcccaccgaauccaucgugcgguuccccaauaucaccaaucugugccccuucggcgagguguucaaugccaccagauucgccucuguguacgccuggaaccggaagcggaucagcaauugcguggccgacuacuccgugcuguacaacuccgccagcuucagcaccuucaagugcuacggcguguccccuaccaagcugaacgaccugugcuucacaaacguguacgccgacagcuucgugauccggggagaugaagugcggcagauugccccuggacagacaggcaagaucgccgacuacaacuacaagcugcccgacgacuucaccggcugugugauugccuggaacagcaacaaccuggacuccaaagucggcggcaacuacaauuaccgcuaccggcuguuccggaaguccaaucugaagcccuucgagcgggacaucuccaccgagaucuaucaggccggcagcaccccuuguaacggcguggaaggcuucaacugcuacuucccacugcaguccuacggcuuucagcccacaaauggcgugggcuaucagcccuacagagugguggugcugagcuucgaacugcugcaugccccugccacagugugcggcccuaagaaaagcaccaaucucgugaagaacaaaugcgugaacuucaacuucaacggccugaccggcaccggcgugcugacagagagcaacaagaaguuccugccauuccagcaguuuggccgggauaucgccgauaccacagacgccguuagagauccccagacacuggaaauccuggacaucaccccuugcagcuucggcggagugucugugaucaccccuggcaccaacaccagcaaucagguggcagugcuguaccagggcgugaacuguaccgaagugcccguggccauucacgccgaucagcugacaccuacauggcggguguacuccaccggcagcaauguguuucagaccagagccggcugucugaucggagccgagcacgugaacaauagcuacgagugcgacauccccaucggcgcuggaaucugcgccagcuaccagacacagacaaacagcccucggagagccagaagcguggccagccagagcaucauugccuacacaaugucucugggcgccgagaacagcguggccuacuccaacaacucuaucgcuauccccaccaacuucaccaucagcgugaccacagagauccugccuguguccaugaccaagaccagcguggacugcaccauguacaucugcggcgauuccaccgagugcuccaaccugcugcugcaguacggcagcuucugcacccagcugaauagagcccugacagggaucgccguggaacaggacaagaacacccaagagguguucgcccaagugaagcagaucuacaagaccccuccuaucaaggacuucggcggcuucaauuucagccagauucugcccgauccuagcaagcccagcaagcggagcuucaucgaggaccugcuguucaacaaagugacacuggccgacgccggcuucaucaagcaguauggcgauugucugggcgacauugccgccagggaucugauuugcgcccagaaguuuaacggacugacagugcugccuccucugcugaccgaugagaugaucgcccaguacacaucugcccugcuggccggcacaaucacaagcggcuggacauuuggagcaggcgccgcucugcagauccccuuugcuaugcagauggccuaccgguucaacggcaucggagugacccagaaugugcuguacgagaaccagaagcugaucgccaaccaguucaacagcgccaucggcaagauccaggacagccugagcagcacagcaagcgcccugggaaagcugcaggacguggucaaccagaaugcccaggcacugaacacccuggucaagcagcuguccuccaacuucggcgccaucagcucugugcugaacgauauccugagcagacuggacaaggucgaggccgaggugcagaucgacagacugaucacaggcagacugcagagccuccagacauacgugacccagcagcugaucagagccgccgagauuagagccucugccaaucuggccgccaccaagaugucugagugugugcugggccagagcaagagaguggacuuuugcggcaagggcuaccaccugaugagcuucccucagucugccccucacggcgugguguuucugcacgugacauaugugcccgcucaagagaagaauuucaccaccgcuccagccaucugccacgacggcaaagcccacuuuccuagagaaggcguguucguguccaacggcacccauugguucgugacacagcggaacuucuacgagccccagaucaucaccaccgacaacaccuucgugucuggcaacugcgacgucgugaucggcauugugaacaauaccguguacgacccucugcagcccgagcuggacagcuucaaagaggaacuggacaaguacuuuaagaaccacacaagccccgacguggaccugggcgauaucagcggaaucaaugccagcgucgugaacauccagaaagagaucgaccggcugaacgagguggccaagaaucugaacgagagccugaucgaccugcaagaacuggggaaguacgagcaguacaucaaguggcccugguacaucuggcugggcuuuaucgccggacugauugccaucgugauggucacaaucaugcuguguugcaugaccagcugcuguagcugccugaagggcuguuguagcuguggcagcugcugcaaguucgacgaggacgauucugagcccgugcugaagggcgugaaacugcacuacacaugaggacuaguguccaccugucccuccugggcugcuggauugucucguuuuccugccaaauaaacaggaucagcgcuuuacagaucuaaaaaaaaaaaaaaaaaaaaaaaaaaaaaaaaaaaaaaaaaaaaaaaaaaaaaaaaaaaaaaaaaaaaaaaaaaaaaaaaaaaaaaaaaaaaaaaaaaaa

SEQ ID NO: 25277 - RNA, 4105 nt, Artificial Sequence
  SARS-CoV-2/Wuhan/WIV05/2019__EPI_ISL_402128 spike protein mRNA gc (1-1273)(K986P_V987P) R10156
aggagacccgugacccggaaguuguacggcuacgcgacuuucccucccacaaacccucgcgcccuuccuuuccuacuugggcccggcagaaagcuuaccauguucguguuccugguccuccugccccuggugagcucccagugcgugaaccucaccacccgcacgcagcugccgcccgccuacaccaacagcuucacccggggcgucuacuaccccgacaagguguuccgcuccagcgugcugcacuccacccaggaccucuuccugcccuucuucagcaacgucacgugguuccacgccauccacguguccgggaccaacggcaccaagcgguucgacaacccggugcugcccuucaacgacggggucuacuucgcgagcaccgagaaguccaacaucauccgcggcuggaucuucgggacgacccucgacagcaagacccagucccugcugaucgugaacaacgccaccaacguggucaucaaggugugcgaguuccaguucugcaacgaccccuuccucggcguguacuaccacaagaacaacaagagcuggauggaguccgaguuccgggucuacagcuccgccaacaacugcacguucgaguacgugagccagcccuuccugauggaccuggagggcaagcaggggaacuucaagaaccuccgcgaguucguguucaagaacaucgacggcuacuucaagaucuacuccaagcacaccccgaucaaccugguccgggaccugccccagggguucagcgcccucgagccccugguggaccugcccaucggcaucaacaucacccgcuuccagacccuccuggcccugcaccgguccuaccucacgccgggggacagcagcuccggcuggaccgcgggcgccgccgccuacuacgugggguaccugcagccccgcaccuuccugcucaaguacaacgagaacggcaccaucacggacgcggucgacugcgcccuggacccccugagcgagaccaagugcacccucaaguccuucaccguggagaaggggaucuaccagacgagcaacuuccgggugcagcccaccgaguccaucguccgcuucccgaacaucaccaaccugugccccuucggcgagguguucaacgccacccgguucgccagcgucuacgccuggaaccgcaagcggaucuccaacugcguggcggacuacagcgugcuguacaacuccgccagcuucuccacguucaagugcuacggcgucagccccaccaagcucaacgaccugugcuucaccaacguguacgccgacuccuucgugauccgcggggacgagguccggcagaucgcccccggccagaccgggaagaucgccgacuacaacuacaagcugccggacgacuucacgggcugcgugaucgcguggaacagcaacaaccucgacuccaaggucgggggcaacuacaacuaccuguaccgccuguuccgcaagagcaaccucaagcccuucgagcgggacaucuccaccgagaucuaccaggccggcagcacccccugcaacgggguggagggcuucaacugcuacuucccccugcaguccuacggguuccagccgaccaacggcgugggguaccagcccuaccggguggucgugcugagcuucgagcuccugcacgcccccgccacggugugcggccccaagaaguccaccaaccuggucaagaacaagugcgugaacuucaacuucaacggccucaccgggaccggcgugcugaccgagagcaacaagaaguuccugccguuccagcaguucgggcgcgacaucgccgacacgaccgacgcgguccgcgacccccagacccuggagauccucgacaucacccccugcagcuucggcgggguguccgugaucacgccgggcaccaacaccagcaaccaggucgccgugcuguaccaggacgugaacugcaccgagguccccguggccauccacgccgaccagcugacgcccaccuggcggguguacuccaccggcagcaacgucuuccagacccgcgccgggugccucaucggcgcggagcacgugaacaacuccuacgagugcgacauccccaucggggccggcaucugcgccagcuaccagacgcagaccaacuccccgcggcgcgcccggagcguggcgucccagagcaucaucgccuacaccaugucccugggcgccgagaacagcgucgccuacuccaacaacagcaucgccauccccaccaacuucacgaucuccgugaccaccgagauccugcccgugagcaugaccaagacgagcgucgacugcaccauguacaucugcggggacuccaccgagugcagcaaccuccugcugcaguacggcuccuucugcacccagcucaaccgcgcgcugacggggaucgccguggagcaggacaagaacacccaggagguguucgcccaggucaagcagaucuacaagacgcccccgaucaaggacuucggcggguucaacuucagccagauccugcccgaccccuccaagcccagcaagcgguccuucaucgaggaccuccuguucaacaaggugacccuggccgacgccggcuucaucaagcaguacggcgacugccucggggacaucgcggcccgcgaccugaucugcgcccagaaguucaacggccugaccgugcucccgccccugcugaccgacgagaugaucgcccaguacaccagcgcccuccuggcggggaccaucacguccggcuggaccuucggggccggcgccgcccugcagauccccuucgcgaugcagauggccuaccgguucaacggcaucggggucacccagaacgugcucuacgagaaccagaagcugaucgccaaccaguucaacagcgccaucggcaagauccaggacucccugagcuccaccgccagcgcgcucgggaagcugcaggacguggucaaccagaacgcccaggcccugaacacgcucgugaagcagcuguccagcaacuucggcgccaucuccagcgugcugaacgacauccucucccgccuggacccgcccgaggccgaggugcagaucgaccggcugaucaccgggcgccuccagagccugcagaccuacgugacccagcagcugauccgggcggccgagauccgcgccagcgccaaccucgccgcgaccaagauguccgagugcguccugggccagagcaagcggguggacuucugcggcaagggguaccaccugauguccuucccccagagcgccccgcacggcguggucuuccuccacgugacguacguccccgcccaggagaagaacuucaccaccgcccccgcgaucugccacgacgggaaggcccacuucccccgcgagggcguguucguguccaacgggacccacugguucgucacgcagcggaacuucuacgagccgcagaucaucaccaccgacaacaccuucgugagcggcaacugcgacguggucaucggcaucgugaacaacacgguguacgacccccugcagcccgagcuggacuccuucaaggaggagcucgacaaguacuucaagaaccacaccagccccgacgucgaccugggggacaucuccggcaucaacgccagcguggugaacauccagaaggagaucgaccgccugaacgaggucgccaagaaccucaacgagucccugaucgaccugcaggagcucgggaaguacgagcaguacaucaaguggccgugguacaucuggcugggcuucaucgccggccugaucgcgaucgugauggugaccaucaugcucugcugcaugaccagcugcugcuccugccugaaggggugcugcagcugcggcuccugcugcaaguucgacgaggacgacagcgagcccguccugaagggggugaagcuccacuacacgugaggacuaguguccaccugucccuccugggcugcuggauugucucguuuuccugccaaauaaacaggaucagcgcuuuacagaucuaaaaaaaaaaaaaaaaaaaaaaaaaaaaaaaaaaaaaaaaaaaaaaaaaaaaaaaaaaaaaaaaaaaaaaaaaaaaaaaaaaaaaaaaaaaaaaaaaaaa

SEQ ID NO: 25278 - RNA, 4105 nt, Artificial Sequence
  SARS-CoV-2/Wuhan/WIV05/2019__EPI_ISL_402128 spike protein mRNA gc (1-1273)(K986P_V987P_ D614G)
aggagacccgugacccggaaguuguacggcuacgcgacuuucccucccacaaacccucgcgcccuuccuuuccuacuugggcccggcagaaagcuuaccauguucguguuccugguccuccugccccuggugagcucccagugcgugaaccucaccacccgcacgcagcugccgcccgccuacaccaacagcuucacccggggcgucuacuaccccgacaagguguuccgcuccagcgugcugcacuccacccaggaccucuuccugcccuucuucagcaacgucacgugguuccacgccauccacguguccgggaccaacggcaccaagcgguucgacaacccggugcugcccuucaacgacggggucuacuucgcgagcaccgagaaguccaacaucauccgcggcuggaucuucgggacgacccucgacagcaagacccagucccugcugaucgugaacaacgccaccaacguggucaucaaggugugcgaguuccaguucugcaacgaccccuuccucggcguguacuaccacaagaacaacaagagcuggauggaguccgaguuccgggucuacagcuccgccaacaacugcacguucgaguacgugagccagcccuuccugauggaccuggagggcaagcaggggaacuucaagaaccuccgcgaguucguguucaagaacaucgacggcuacuucaagaucuacuccaagcacaccccgaucaaccugguccgggaccugccccagggguucagcgcccucgagccccugguggaccugcccaucggcaucaacaucacccgcuuccagacccuccuggcccugcaccgguccuaccucacgccgggggacagcagcuccggcuggaccgcgggcgccgccgccuacuacgugggguaccugcagccccgcaccuuccugcucaaguacaacgagaacggcaccaucacggacgcggucgacugcgcccuggacccccugagcgagaccaagugcacccucaaguccuucaccguggagaaggggaucuaccagacgagcaacuuccgggugcagcccaccgaguccaucguccgcuucccgaacaucaccaaccugugccccuucggcgagguguucaacgccacccgguucgccagcgucuacgccuggaaccgcaagcggaucuccaacugcguggcggacuacagcgugcuguacaacuccgccagcuucuccacguucaagugcuacggcgucagccccaccaagcucaacgaccugugcuucaccaacguguacgccgacuccuucgugauccgcggggacgagguccggcagaucgcccccggccagaccgggaagaucgccgacuacaacuacaagcugccggacgacuucacgggcugcgugaucgcguggaacagcaacaaccucgacuccaaggucgggggcaacuacaacuaccuguaccgccuguuccgcaagagcaaccucaagcccuucgagcgggacaucuccaccgagaucuaccaggccggcagcacccccugcaacgggguggagggcuucaacugcuacuucccccugcaguccuacggguuccagccgaccaacggcgugggguaccagcccuaccggguggucgugcugagcuucgagcuccugcacgcccccgccacggugugcggccccaagaaguccaccaaccuggucaagaacaagugcgugaacuucaacuucaacggccucaccgggaccggcgugcugaccgagagcaacaagaaguuccugccguuccagcaguucgggcgcgacaucgccgacacgaccgacgcgguccgcgacccccagacccuggagauccucgacaucacccccugcagcuucggcgggguguccgugaucacgccgggcaccaacaccagcaaccaggucgccgugcuguaccagggcgugaacugcaccgagguccccguggccauccacgccgaccagcugacgcccaccuggcggguguacuccaccggcagcaacgucuuccagacccgcgccgggugccucaucggcgcggagcacgugaacaacuccuacgagugcgacauccccaucggggccggcaucugcgccagcuaccagacgcagaccaacuccccgcggcgcgcccggagcguggcgucccagagcaucaucgccuacaccaugucccugggcgccgagaacagcgucgccuacuccaacaacagcaucgccauccccaccaacuucacgaucuccgugaccaccgagauccugcccgugagcaugaccaagacgagcgucgacugcaccauguacaucugcggggacuccaccgagugcagcaaccuccugcugcaguacggcuccuucugcacccagcucaaccgcgcgcugacggggaucgccguggagcaggacaagaacacccaggagguguucgcccaggucaagcagaucuacaagacgcccccgaucaaggacuucggcggguucaacuucagccagauccugcccgaccccuccaagcccagcaagcgguccuucaucgaggaccuccuguucaacaaggugacccuggccgacgccggcuucaucaagcaguacggcgacugccucggggacaucgcggcccgcgaccugaucugcgcccagaaguucaacggccugaccgugcucccgccccugcugaccgacgagaugaucgcccaguacaccagcgcccuccuggcggggaccaucacguccggcuggaccuucggggccggcgccgcccugcagauccccuucgcgaugcagauggccuaccgguucaacggcaucggggucacccagaacgugcucuacgagaaccagaagcugaucgccaaccaguucaacagcgccaucggcaagauccaggacucccugagcuccaccgccagcgcgcucgggaagcugcaggacguggucaaccagaacgcccaggcccugaacacgcucgugaagcagcuguccagcaacuucggcgccaucuccagcgugcugaacgacauccucucccgccuggacccgcccgaggccgaggugcagaucgaccggcugaucaccgggcgccuccagagccugcagaccuacgugacccagcagcugauccgggcggccgagauccgcgccagcgccaaccucgccgcgaccaagauguccgagugcguccugggccagagcaagcggguggacuucugcggcaagggguaccaccugauguccuucccccagagcgccccgcacggcguggucuuccuccacgugacguacguccccgcccaggagaagaacuucaccaccgcccccgcgaucugccacgacgggaaggcccacuucccccgcgagggcguguucguguccaacgggacccacugguucgucacgcagcggaacuucuacgagccgcagaucaucaccaccgacaacaccuucgugagcggcaacugcgacguggucaucggcaucgugaacaacacgguguacgacccccugcagcccgagcuggacuccuucaaggaggagcucgacaaguacuucaagaaccacaccagccccgacgucgaccugggggacaucuccggcaucaacgccagcguggugaacauccagaaggagaucgaccgccugaacgaggucgccaagaaccucaacgagucccugaucgaccugcaggagcucgggaaguacgagcaguacaucaaguggccgugguacaucuggcugggcuucaucgccggccugaucgcgaucgugauggugaccaucaugcucugcugcaugaccagcugcugcuccugccugaaggggugcugcagcugcggcuccugcugcaaguucgacgaggacgacagcgagcccguccugaagggggugaagcuccacuacacgugaggacuaguguccaccugucccuccugggcugcuggauugucucguuuuccugccaaauaaacaggaucagcgcuuuacagaucuaaaaaaaaaaaaaaaaaaaaaaaaaaaaaaaaaaaaaaaaaaaaaaaaaaaaaaaaaaaaaaaaaaaaaaaaaaaaaaaaaaaaaaaaaaaaaaaaaaaa

SEQ ID NO: 25279 - RNA, 4105 nt, Artificial Sequence
  SARS-CoV-2/Wuhan/WIV05/2019__EPI_ISL_402128 spike protein mRNA gc (1-1273)(K986P_V987P_A222V_D614G)
aggagacccgugacccggaaguuguacggcuacgcgacuuucccucccacaaacccucgcgcccuuccuuuccuacuugggcccggcagaaagcuuaccauguucguguuccugguccuccugccccuggugagcucccagugcgugaaccucaccacccgcacgcagcugccgcccgccuacaccaacagcuucacccggggcgucuacuaccccgacaagguguuccgcuccagcgugcugcacuccacccaggaccucuuccugcccuucuucagcaacgucacgugguuccacgccauccacguguccgggaccaacggcaccaagcgguucgacaacccggugcugcccuucaacgacggggucuacuucgcgagcaccgagaaguccaacaucauccgcggcuggaucuucgggacgacccucgacagcaagacccagucccugcugaucgugaacaacgccaccaacguggucaucaaggugugcgaguuccaguucugcaacgaccccuuccucggcguguacuaccacaagaacaacaagagcuggauggaguccgaguuccgggucuacagcuccgccaacaacugcacguucgaguacgugagccagcccuuccugauggaccuggagggcaagcaggggaacuucaagaaccuccgcgaguucguguucaagaacaucgacggcuacuucaagaucuacuccaagcacaccccgaucaaccugguccgggaccugccccagggguucagcguccucgagccccugguggaccugcccaucggcaucaacaucacccgcuuccagacccuccuggcccugcaccgguccuaccucacgccgggggacagcagcuccggcuggaccgcgggcgccgccgccuacuacgugggguaccugcagccccgcaccuuccugcucaaguacaacgagaacggcaccaucacggacgcggucgacugcgcccuggacccccugagcgagaccaagugcacccucaaguccuucaccguggagaaggggaucuaccagacgagcaacuuccgggugcagcccaccgaguccaucguccgcuucccgaacaucaccaaccugugccccuucggcgagguguucaacgccacccgguucgccagcgucuacgccuggaaccgcaagcggaucuccaacugcguggcggacuacagcgugcuguacaacuccgccagcuucuccacguucaagugcuacggcgucagccccaccaagcucaacgaccugugcuucaccaacguguacgccgacuccuucgugauccgcggggacgagguccggcagaucgcccccggccagaccgggaagaucgccgacuacaacuacaagcugccggacgacuucacgggcugcgugaucgcguggaacagcaacaaccucgacuccaaggucgggggcaacuacaacuaccuguaccgccuguuccgcaagagcaaccucaagcccuucgagcgggacaucuccaccgagaucuaccaggccggcagcacccccugcaacgggguggagggcuucaacugcuacuucccccugcaguccuacggguuccagccgaccaacggcgugggguaccagcccuaccggguggucgugcugagcuucgagcuccugcacgcccccgccacggugugcggccccaagaaguccaccaaccuggucaagaacaagugcgugaacuucaacuucaacggccucaccgggaccggcgugcugaccgagagcaacaagaaguuccugccguuccagcaguucgggcgcgacaucgccgacacgaccgacgcgguccgcgacccccagacccuggagauccucgacaucacccccugcagcuucggcgggguguccgugaucacgccgggcaccaacaccagcaaccaggucgccgugcuguaccagggcgugaacugcaccgagguccccguggccauccacgccgaccagcugacgcccaccuggcggguguacuccaccggcagcaacgucuuccagacccgcgccgggugccucaucggcgcggagcacgugaacaacuccuacgagugcgacauccccaucggggccggcaucugcgccagcuaccagacgcagaccaacuccccgcggcgcgcccggagcguggcgucccagagcaucaucgccuacaccaugucccugggcgccgagaacagcgucgccuacuccaacaacagcaucgccauccccaccaacuucacgaucuccgugaccaccgagauccugcccgugagcaugaccaagacgagcgucgacugcaccauguacaucugcggggacuccaccgagugcagcaaccuccugcugcaguacggcuccuucugcacccagcucaaccgcgcgcugacggggaucgccguggagcaggacaagaacacccaggagguguucgcccaggucaagcagaucuacaagacgcccccgaucaaggacuucggcggguucaacuucagccagauccugcccgaccccuccaagcccagcaagcgguccuucaucgaggaccuccuguucaacaaggugacccuggccgacgccggcuucaucaagcaguacggcgacugccucggggacaucgcggcccgcgaccugaucugcgcccagaaguucaacggccugaccgugcucccgccccugcugaccgacgagaugaucgcccaguacaccagcgcccuccuggcggggaccaucacguccggcuggaccuucggggccggcgccgcccugcagauccccuucgcgaugcagauggccuaccgguucaacggcaucggggucacccagaacgugcucuacgagaaccagaagcugaucgccaaccaguucaacagcgccaucggcaagauccaggacucccugagcuccaccgccagcgcgcucgggaagcugcaggacguggucaaccagaacgcccaggcccugaacacgcucgugaagcagcuguccagcaacuucggcgccaucuccagcgugcugaacgacauccucucccgccuggacccgcccgaggccgaggugcagaucgaccggcugaucaccgggcgccuccagagccugcagaccuacgugacccagcagcugauccgggcggccgagauccgcgccagcgccaaccucgccgcgaccaagauguccgagugcguccugggccagagcaagcggguggacuucugcggcaagggguaccaccugauguccuucccccagagcgccccgcacggcguggucuuccuccacgugacguacguccccgcccaggagaagaacuucaccaccgcccccgcgaucugccacgacgggaaggcccacuucccccgcgagggcguguucguguccaacgggacccacugguucgucacgcagcggaacuucuacgagccgcagaucaucaccaccgacaacaccuucgugagcggcaacugcgacguggucaucggcaucgugaacaacacgguguacgacccccugcagcccgagcuggacuccuucaaggaggagcucgacaaguacuucaagaaccacaccagccccgacgucgaccugggggacaucuccggcaucaacgccagcguggugaacauccagaaggagaucgaccgccugaacgaggucgccaagaaccucaacgagucccugaucgaccugcaggagcucgggaaguacgagcaguacaucaaguggccgugguacaucuggcugggcuucaucgccggccugaucgcgaucgugauggugaccaucaugcucugcugcaugaccagcugcugcuccugccugaaggggugcugcagcugcggcuccugcugcaaguucgacgaggacgacagcgagcccguccugaagggggugaagcuccacuacacgugaggacuaguguccaccugucccuccugggcugcuggauugucucguuuuccugccaaauaaacaggaucagcgcuuuacagaucuaaaaaaaaaaaaaaaaaaaaaaaaaaaaaaaaaaaaaaaaaaaaaaaaaaaaaaaaaaaaaaaaaaaaaaaaaaaaaaaaaaaaaaaaaaaaaaaaaaaa

SEQ ID NO: 25280 - RNA, 4105 nt, Artificial Sequence
  SARS-CoV-2/Wuhan/WIV05/2019__EPI_ISL_402128 spike protein mRNA gc (1-1273)(K986P_V987P_N439K_D614G)
aggagacccgugacccggaaguuguacggcuacgcgacuuucccucccacaaacccucgcgcccuuccuuuccuacuugggcccggcagaaagcuuaccauguucguguuccugguccuccugccccuggugagcucccagugcgugaaccucaccacccgcacgcagcugccgcccgccuacaccaacagcuucacccggggcgucuacuaccccgacaagguguuccgcuccagcgugcugcacuccacccaggaccucuuccugcccuucuucagcaacgucacgugguuccacgccauccacguguccgggaccaacggcaccaagcgguucgacaacccggugcugcccuucaacgacggggucuacuucgcgagcaccgagaaguccaacaucauccgcggcuggaucuucgggacgacccucgacagcaagacccagucccugcugaucgugaacaacgccaccaacguggucaucaaggugugcgaguuccaguucugcaacgaccccuuccucggcguguacuaccacaagaacaacaagagcuggauggaguccgaguuccgggucuacagcuccgccaacaacugcacguucgaguacgugagccagcccuuccugauggaccuggagggcaagcaggggaacuucaagaaccuccgcgaguucguguucaagaacaucgacggcuacuucaagaucuacuccaagcacaccccgaucaaccugguccgggaccugccccagggguucagcgcccucgagccccugguggaccugcccaucggcaucaacaucacccgcuuccagacccuccuggcccugcaccgguccuaccucacgccgggggacagcagcuccggcuggaccgcgggcgccgccgccuacuacgugggguaccugcagccccgcaccuuccugcucaaguacaacgagaacggcaccaucacggacgcggucgacugcgcccuggacccccugagcgagaccaagugcacccucaaguccuucaccguggagaaggggaucuaccagacgagcaacuuccgggugcagcccaccgaguccaucguccgcuucccgaacaucaccaaccugugccccuucggcgagguguucaacgccacccgguucgccagcgucuacgccuggaaccgcaagcggaucuccaacugcguggcggacuacagcgugcuguacaacuccgccagcuucuccacguucaagugcuacggcgucagccccaccaagcucaacgaccugugcuucaccaacguguacgccgacuccuucgugauccgcggggacgagguccggcagaucgcccccggccagaccgggaagaucgccgacuacaacuacaagcugccggacgacuucacgggcugcgugaucgcguggaacagcaagaaccucgacuccaaggucgggggcaacuacaacuaccuguaccgccuguuccgcaagagcaaccucaagcccuucgagcgggacaucuccaccgagaucuaccaggccggcagcacccccugcaacgggguggagggcuucaacugcuacuucccccugcaguccuacggguuccagccgaccaacggcgugggguaccagcccuaccggguggucgugcugagcuucgagcuccugcacgcccccgccacggugugcggccccaagaaguccaccaaccuggucaagaacaagugcgugaacuucaacuucaacggccucaccgggaccggcgugcugaccgagagcaacaagaaguuccugccguuccagcaguucgggcgcgacaucgccgacacgaccgacgcgguccgcgacccccagacccuggagauccucgacaucacccccugcagcuucggcgggguguccgugaucacgccgggcaccaacaccagcaaccaggucgccgugcuguaccagggcgugaacugcaccgagguccccguggccauccacgccgaccagcugacgcccaccuggcggguguacuccaccggcagcaacgucuuccagacccgcgccgggugccucaucggcgcggagcacgugaacaacuccuacgagugcgacauccccaucggggccggcaucugcgccagcuaccagacgcagaccaacuccccgcggcgcgcccggagcguggcgucccagagcaucaucgccuacaccaugucccugggcgccgagaacagcgucgccuacuccaacaacagcaucgccauccccaccaacuucacgaucuccgugaccaccgagauccugcccgugagcaugaccaagacgagcgucgacugcaccauguacaucugcggggacuccaccgagugcagcaaccuccugcugcaguacggcuccuucugcacccagcucaaccgcgcgcugacggggaucgccguggagcaggacaagaacacccaggagguguucgcccaggucaagcagaucuacaagacgcccccgaucaaggacuucggcggguucaacuucagccagauccugcccgaccccuccaagcccagcaagcgguccuucaucgaggaccuccuguucaacaaggugacccuggccgacgccggcuucaucaagcaguacggcgacugccucggggacaucgcggcccgcgaccugaucugcgcccagaaguucaacggccugaccgugcucccgccccugcugaccgacgagaugaucgcccaguacaccagcgcccuccuggcggggaccaucacguccggcuggaccuucggggccggcgccgcccugcagauccccuucgcgaugcagauggccuaccgguucaacggcaucggggucacccagaacgugcucuacgagaaccagaagcugaucgccaaccaguucaacagcgccaucggcaagauccaggacucccugagcuccaccgccagcgcgcucgggaagcugcaggacguggucaaccagaacgcccaggcccugaacacgcucgugaagcagcuguccagcaacuucggcgccaucuccagcgugcugaacgacauccucucccgccuggacccgcccgaggccgaggugcagaucgaccggcugaucaccgggcgccuccagagccugcagaccuacgugacccagcagcugauccgggcggccgagauccgcgccagcgccaaccucgccgcgaccaagauguccgagugcguccugggccagagcaagcggguggacuucugcggcaagggguaccaccugauguccuucccccagagcgccccgcacggcguggucuuccuccacgugacguacguccccgcccaggagaagaacuucaccaccgcccccgcgaucugccacgacgggaaggcccacuucccccgcgagggcguguucguguccaacgggacccacugguucgucacgcagcggaacuucuacgagccgcagaucaucaccaccgacaacaccuucgugagcggcaacugcgacguggucaucggcaucgugaacaacacgguguacgacccccugcagcccgagcuggacuccuucaaggaggagcucgacaaguacuucaagaaccacaccagccccgacgucgaccugggggacaucuccggcaucaacgccagcguggugaacauccagaaggagaucgaccgccugaacgaggucgccaagaaccucaacgagucccugaucgaccugcaggagcucgggaaguacgagcaguacaucaaguggccgugguacaucuggcugggcuucaucgccggccugaucgcgaucgugauggugaccaucaugcucugcugcaugaccagcugcugcuccugccugaaggggugcugcagcugcggcuccugcugcaaguucgacgaggacgacagcgagcccguccugaagggggugaagcuccacuacacgugaggacuaguguccaccugucccuccugggcugcuggauugucucguuuuccugccaaauaaacaggaucagcgcuuuacagaucuaaaaaaaaaaaaaaaaaaaaaaaaaaaaaaaaaaaaaaaaaaaaaaaaaaaaaaaaaaaaaaaaaaaaaaaaaaaaaaaaaaaaaaaaaaaaaaaaaaaa

SEQ ID NO: 25281 - RNA, 4105 nt, Artificial Sequence
  SARS-CoV-2/Wuhan/WIV05/2019__EPI_ISL_402128 spike protein mRNA gc (1-1273)(K986P_V987P_S477N_D614G)
aggagacccgugacccggaaguuguacggcuacgcgacuuucccucccacaaacccucgcgcccuuccuuuccuacuugggcccggcagaaagcuuaccauguucguguuccugguccuccugccccuggugagcucccagugcgugaaccucaccacccgcacgcagcugccgcccgccuacaccaacagcuucacccggggcgucuacuaccccgacaagguguuccgcuccagcgugcugcacuccacccaggaccucuuccugcccuucuucagcaacgucacgugguuccacgccauccacguguccgggaccaacggcaccaagcgguucgacaacccggugcugcccuucaacgacggggucuacuucgcgagcaccgagaaguccaacaucauccgcggcuggaucuucgggacgacccucgacagcaagacccagucccugcugaucgugaacaacgccaccaacguggucaucaaggugugcgaguuccaguucugcaacgaccccuuccucggcguguacuaccacaagaacaacaagagcuggauggaguccgaguuccgggucuacagcuccgccaacaacugcacguucgaguacgugagccagcccuuccugauggaccuggagggcaagcaggggaacuucaagaaccuccgcgaguucguguucaagaacaucgacggcuacuucaagaucuacuccaagcacaccccgaucaaccugguccgggaccugccccagggguucagcgcccucgagccccugguggaccugcccaucggcaucaacaucacccgcuuccagacccuccuggcccugcaccgguccuaccucacgccgggggacagcagcuccggcuggaccgcgggcgccgccgccuacuacgugggguaccugcagccccgcaccuuccugcucaaguacaacgagaacggcaccaucacggacgcggucgacugcgcccuggacccccugagcgagaccaagugcacccucaaguccuucaccguggagaaggggaucuaccagacgagcaacuuccgggugcagcccaccgaguccaucguccgcuucccgaacaucaccaaccugugccccuucggcgagguguucaacgccacccgguucgccagcgucuacgccuggaaccgcaagcggaucuccaacugcguggcggacuacagcgugcuguacaacuccgccagcuucuccacguucaagugcuacggcgucagccccaccaagcucaacgaccugugcuucaccaacguguacgccgacuccuucgugauccgcggggacgagguccggcagaucgcccccggccagaccgggaagaucgccgacuacaacuacaagcugccggacgacuucacgggcugcgugaucgcguggaacagcaacaaccucgacuccaaggucgggggcaacuacaacuaccuguaccgccuguuccgcaagagcaaccucaagcccuucgagcgggacaucuccaccgagaucuaccaggccggcaacacccccugcaacgggguggagggcuucaacugcuacuucccccugcaguccuacggguuccagccgaccaacggcgugggguaccagcccuaccggguggucgugcugagcuucgagcuccugcacgcccccgccacggugugcggccccaagaaguccaccaaccuggucaagaacaagugcgugaacuucaacuucaacggccucaccgggaccggcgugcugaccgagagcaacaagaaguuccugccguuccagcaguucgggcgcgacaucgccgacacgaccgacgcgguccgcgacccccagacccuggagauccucgacaucacccccugcagcuucggcgggguguccgugaucacgccgggcaccaacaccagcaaccaggucgccgugcuguaccagggcgugaacugcaccgagguccccguggccauccacgccgaccagcugacgcccaccuggcggguguacuccaccggcagcaacgucuuccagacccgcgccgggugccucaucggcgcggagcacgugaacaacuccuacgagugcgacauccccaucggggccggcaucugcgccagcuaccagacgcagaccaacuccccgcggcgcgcccggagcguggcgucccagagcaucaucgccuacaccaugucccugggcgccgagaacagcgucgccuacuccaacaacagcaucgccauccccaccaacuucacgaucuccgugaccaccgagauccugcccgugagcaugaccaagacgagcgucgacugcaccauguacaucugcggggacuccaccgagugcagcaaccuccugcugcaguacggcuccuucugcacccagcucaaccgcgcgcugacggggaucgccguggagcaggacaagaacacccaggagguguucgcccaggucaagcagaucuacaagacgcccccgaucaaggacuucggcggguucaacuucagccagauccugcccgaccccuccaagcccagcaagcgguccuucaucgaggaccuccuguucaacaaggugacccuggccgacgccggcuucaucaagcaguacggcgacugccucggggacaucgcggcccgcgaccugaucugcgcccagaaguucaacggccugaccgugcucccgccccugcugaccgacgagaugaucgcccaguacaccagcgcccuccuggcggggaccaucacguccggcuggaccuucggggccggcgccgcccugcagauccccuucgcgaugcagauggccuaccgguucaacggcaucggggucacccagaacgugcucuacgagaaccagaagcugaucgccaaccaguucaacagcgccaucggcaagauccaggacucccugagcuccaccgccagcgcgcucgggaagcugcaggacguggucaaccagaacgcccaggcccugaacacgcucgugaagcagcuguccagcaacuucggcgccaucuccagcgugcugaacgacauccucucccgccuggacccgcccgaggccgaggugcagaucgaccggcugaucaccgggcgccuccagagccugcagaccuacgugacccagcagcugauccgggcggccgagauccgcgccagcgccaaccucgccgcgaccaagauguccgagugcguccugggccagagcaagcggguggacuucugcggcaagggguaccaccugauguccuucccccagagcgccccgcacggcguggucuuccuccacgugacguacguccccgcccaggagaagaacuucaccaccgcccccgcgaucugccacgacgggaaggcccacuucccccgcgagggcguguucguguccaacgggacccacugguucgucacgcagcggaacuucuacgagccgcagaucaucaccaccgacaacaccuucgugagcggcaacugcgacguggucaucggcaucgugaacaacacgguguacgacccccugcagcccgagcuggacuccuucaaggaggagcucgacaaguacuucaagaaccacaccagccccgacgucgaccugggggacaucuccggcaucaacgccagcguggugaacauccagaaggagaucgaccgccugaacgaggucgccaagaaccucaacgagucccugaucgaccugcaggagcucgggaaguacgagcaguacaucaaguggccgugguacaucuggcugggcuucaucgccggccugaucgcgaucgugauggugaccaucaugcucugcugcaugaccagcugcugcuccugccugaaggggugcugcagcugcggcuccugcugcaaguucgacgaggacgacagcgagcccguccugaagggggugaagcuccacuacacgugaggacuaguguccaccugucccuccugggcugcuggauugucucguuuuccugccaaauaaacaggaucagcgcuuuacagaucuaaaaaaaaaaaaaaaaaaaaaaaaaaaaaaaaaaaaaaaaaaaaaaaaaaaaaaaaaaaaaaaaaaaaaaaaaaaaaaaaaaaaaaaaaaaaaaaaaaaa

SEQ ID NO: 25282 - RNA, 4105 nt, Artificial Sequence
  SARS-CoV-2/Wuhan/WIV05/2019__EPI_ISL_402128 spike protein mRNA gc (1-1273)(K986P_V987P_N501Y_D614G)
aggagacccgugacccggaaguuguacggcuacgcgacuuucccucccacaaacccucgcgcccuuccuuuccuacuugggcccggcagaaagcuuaccauguucguguuccugguccuccugccccuggugagcucccagugcgugaaccucaccacccgcacgcagcugccgcccgccuacaccaacagcuucacccggggcgucuacuaccccgacaagguguuccgcuccagcgugcugcacuccacccaggaccucuuccugcccuucuucagcaacgucacgugguuccacgccauccacguguccgggaccaacggcaccaagcgguucgacaacccggugcugcccuucaacgacggggucuacuucgcgagcaccgagaaguccaacaucauccgcggcuggaucuucgggacgacccucgacagcaagacccagucccugcugaucgugaacaacgccaccaacguggucaucaaggugugcgaguuccaguucugcaacgaccccuuccucggcguguacuaccacaagaacaacaagagcuggauggaguccgaguuccgggucuacagcuccgccaacaacugcacguucgaguacgugagccagcccuuccugauggaccuggagggcaagcaggggaacuucaagaaccuccgcgaguucguguucaagaacaucgacggcuacuucaagaucuacuccaagcacaccccgaucaaccugguccgggaccugccccagggguucagcgcccucgagccccugguggaccugcccaucggcaucaacaucacccgcuuccagacccuccuggcccugcaccgguccuaccucacgccgggggacagcagcuccggcuggaccgcgggcgccgccgccuacuacgugggguaccugcagccccgcaccuuccugcucaaguacaacgagaacggcaccaucacggacgcggucgacugcgcccuggacccccugagcgagaccaagugcacccucaaguccuucaccguggagaaggggaucuaccagacgagcaacuuccgggugcagcccaccgaguccaucguccgcuucccgaacaucaccaaccugugccccuucggcgagguguucaacgccacccgguucgccagcgucuacgccuggaaccgcaagcggaucuccaacugcguggcggacuacagcgugcuguacaacuccgccagcuucuccacguucaagugcuacggcgucagccccaccaagcucaacgaccugugcuucaccaacguguacgccgacuccuucgugauccgcggggacgagguccggcagaucgcccccggccagaccgggaagaucgccgacuacaacuacaagcugccggacgacuucacgggcugcgugaucgcguggaacagcaacaaccucgacuccaaggucgggggcaacuacaacuaccuguaccgccuguuccgcaagagcaaccucaagcccuucgagcgggacaucuccaccgagaucuaccaggccggcagcacccccugcaacgggguggagggcuucaacugcuacuucccccugcaguccuacggguuccagccgaccuacggcgugggguaccagcccuaccggguggucgugcugagcuucgagcuccugcacgcccccgccacggugugcggccccaagaaguccaccaaccuggucaagaacaagugcgugaacuucaacuucaacggccucaccgggaccggcgugcugaccgagagcaacaagaaguuccugccguuccagcaguucgggcgcgacaucgccgacacgaccgacgcgguccgcgacccccagacccuggagauccucgacaucacccccugcagcuucggcgggguguccgugaucacgccgggcaccaacaccagcaaccaggucgccgugcuguaccagggcgugaacugcaccgagguccccguggccauccacgccgaccagcugacgcccaccuggcggguguacuccaccggcagcaacgucuuccagacccgcgccgggugccucaucggcgcggagcacgugaacaacuccuacgagugcgacauccccaucggggccggcaucugcgccagcuaccagacgcagaccaacuccccgcggcgcgcccggagcguggcgucccagagcaucaucgccuacaccaugucccugggcgccgagaacagcgucgccuacuccaacaacagcaucgccauccccaccaacuucacgaucuccgugaccaccgagauccugcccgugagcaugaccaagacgagcgucgacugcaccauguacaucugcggggacuccaccgagugcagcaaccuccugcugcaguacggcuccuucugcacccagcucaaccgcgcgcugacggggaucgccguggagcaggacaagaacacccaggagguguucgcccaggucaagcagaucuacaagacgcccccgaucaaggacuucggcggguucaacuucagccagauccugcccgaccccuccaagcccagcaagcgguccuucaucgaggaccuccuguucaacaaggugacccuggccgacgccggcuucaucaagcaguacggcgacugccucggggacaucgcggcccgcgaccugaucugcgcccagaaguucaacggccugaccgugcucccgccccugcugaccgacgagaugaucgcccaguacaccagcgcccuccuggcggggaccaucacguccggcuggaccuucggggccggcgccgcccugcagauccccuucgcgaugcagauggccuaccgguucaacggcaucggggucacccagaacgugcucuacgagaaccagaagcugaucgccaaccaguucaacagcgccaucggcaagauccaggacucccugagcuccaccgccagcgcgcucgggaagcugcaggacguggucaaccagaacgcccaggcccugaacacgcucgugaagcagcuguccagcaacuucggcgccaucuccagcgugcugaacgacauccucucccgccuggacccgcccgaggccgaggugcagaucgaccggcugaucaccgggcgccuccagagccugcagaccuacgugacccagcagcugauccgggcggccgagauccgcgccagcgccaaccucgccgcgaccaagauguccgagugcguccugggccagagcaagcggguggacuucugcggcaagggguaccaccugauguccuucccccagagcgccccgcacggcguggucuuccuccacgugacguacguccccgcccaggagaagaacuucaccaccgcccccgcgaucugccacgacgggaaggcccacuucccccgcgagggcguguucguguccaacgggacccacugguucgucacgcagcggaacuucuacgagccgcagaucaucaccaccgacaacaccuucgugagcggcaacugcgacguggucaucggcaucgugaacaacacgguguacgacccccugcagcccgagcuggacuccuucaaggaggagcucgacaaguacuucaagaaccacaccagccccgacgucgaccugggggacaucuccggcaucaacgccagcguggugaacauccagaaggagaucgaccgccugaacgaggucgccaagaaccucaacgagucccugaucgaccugcaggagcucgggaaguacgagcaguacaucaaguggccgugguacaucuggcugggcuucaucgccggccugaucgcgaucgugauggugaccaucaugcucugcugcaugaccagcugcugcuccugccugaaggggugcugcagcugcggcuccugcugcaaguucgacgaggacgacagcgagcccguccugaagggggugaagcuccacuacacgugaggacuaguguccaccugucccuccugggcugcuggauugucucguuuuccugccaaauaaacaggaucagcgcuuuacagaucuaaaaaaaaaaaaaaaaaaaaaaaaaaaaaaaaaaaaaaaaaaaaaaaaaaaaaaaaaaaaaaaaaaaaaaaaaaaaaaaaaaaaaaaaaaaaaaaaaaaa

SEQ ID NO: 25283 - RNA, 4099 nt, Artificial Sequence
  SARS-CoV-2/Wuhan/WIV05/2019__EPI_ISL_402128 spike protein mRNA gc (1-1273)(K986P_V987P_H69del_V70del_D614G)
aggagacccgugacccggaaguuguacggcuacgcgacuuucccucccacaaacccucgcgcccuuccuuuccuacuugggcccggcagaaagcuuaccauguucguguuccugguccuccugccccuggugagcucccagugcgugaaccucaccacccgcacgcagcugccgcccgccuacaccaacagcuucacccggggcgucuacuaccccgacaagguguuccgcuccagcgugcugcacuccacccaggaccucuuccugcccuucuucagcaacgucacgugguuccacgccaucuccgggaccaacggcaccaagcgguucgacaacccggugcugcccuucaacgacggggucuacuucgcgagcaccgagaaguccaacaucauccgcggcuggaucuucgggacgacccucgacagcaagacccagucccugcugaucgugaacaacgccaccaacguggucaucaaggugugcgaguuccaguucugcaacgaccccuuccucggcguguacuaccacaagaacaacaagagcuggauggaguccgaguuccgggucuacagcuccgccaacaacugcacguucgaguacgugagccagcccuuccugauggaccuggagggcaagcaggggaacuucaagaaccuccgcgaguucguguucaagaacaucgacggcuacuucaagaucuacuccaagcacaccccgaucaaccugguccgggaccugccccagggguucagcgcccucgagccccugguggaccugcccaucggcaucaacaucacccgcuuccagacccuccuggcccugcaccgguccuaccucacgccgggggacagcagcuccggcuggaccgcgggcgccgccgccuacuacgugggguaccugcagccccgcaccuuccugcucaaguacaacgagaacggcaccaucacggacgcggucgacugcgcccuggacccccugagcgagaccaagugcacccucaaguccuucaccguggagaaggggaucuaccagacgagcaacuuccgggugcagcccaccgaguccaucguccgcuucccgaacaucaccaaccugugccccuucggcgagguguucaacgccacccgguucgccagcgucuacgccuggaaccgcaagcggaucuccaacugcguggcggacuacagcgugcuguacaacuccgccagcuucuccacguucaagugcuacggcgucagccccaccaagcucaacgaccugugcuucaccaacguguacgccgacuccuucgugauccgcggggacgagguccggcagaucgcccccggccagaccgggaagaucgccgacuacaacuacaagcugccggacgacuucacgggcugcgugaucgcguggaacagcaacaaccucgacuccaaggucgggggcaacuacaacuaccuguaccgccuguuccgcaagagcaaccucaagcccuucgagcgggacaucuccaccgagaucuaccaggccggcagcacccccugcaacgggguggagggcuucaacugcuacuucccccugcaguccuacggguuccagccgaccaacggcgugggguaccagcccuaccggguggucgugcugagcuucgagcuccugcacgcccccgccacggugugcggccccaagaaguccaccaaccuggucaagaacaagugcgugaacuucaacuucaacggccucaccgggaccggcgugcugaccgagagcaacaagaaguuccugccguuccagcaguucgggcgcgacaucgccgacacgaccgacgcgguccgcgacccccagacccuggagauccucgacaucacccccugcagcuucggcgggguguccgugaucacgccgggcaccaacaccagcaaccaggucgccgugcuguaccagggcgugaacugcaccgagguccccguggccauccacgccgaccagcugacgcccaccuggcggguguacuccaccggcagcaacgucuuccagacccgcgccgggugccucaucggcgcggagcacgugaacaacuccuacgagugcgacauccccaucggggccggcaucugcgccagcuaccagacgcagaccaacuccccgcggcgcgcccggagcguggcgucccagagcaucaucgccuacaccaugucccugggcgccgagaacagcgucgccuacuccaacaacagcaucgccauccccaccaacuucacgaucuccgugaccaccgagauccugcccgugagcaugaccaagacgagcgucgacugcaccauguacaucugcggggacuccaccgagugcagcaaccuccugcugcaguacggcuccuucugcacccagcucaaccgcgcgcugacggggaucgccguggagcaggacaagaacacccaggagguguucgcccaggucaagcagaucuacaagacgcccccgaucaaggacuucggcggguucaacuucagccagauccugcccgaccccuccaagcccagcaagcgguccuucaucgaggaccuccuguucaacaaggugacccuggccgacgccggcuucaucaagcaguacggcgacugccucggggacaucgcggcccgcgaccugaucugcgcccagaaguucaacggccugaccgugcucccgccccugcugaccgacgagaugaucgcccaguacaccagcgcccuccuggcggggaccaucacguccggcuggaccuucggggccggcgccgcccugcagauccccuucgcgaugcagauggccuaccgguucaacggcaucggggucacccagaacgugcucuacgagaaccagaagcugaucgccaaccaguucaacagcgccaucggcaagauccaggacucccugagcuccaccgccagcgcgcucgggaagcugcaggacguggucaaccagaacgcccaggcccugaacacgcucgugaagcagcuguccagcaacuucggcgccaucuccagcgugcugaacgacauccucucccgccuggacccgcccgaggccgaggugcagaucgaccggcugaucaccgggcgccuccagagccugcagaccuacgugacccagcagcugauccgggcggccgagauccgcgccagcgccaaccucgccgcgaccaagauguccgagugcguccugggccagagcaagcggguggacuucugcggcaagggguaccaccugauguccuucccccagagcgccccgcacggcguggucuuccuccacgugacguacguccccgcccaggagaagaacuucaccaccgcccccgcgaucugccacgacgggaaggcccacuucccccgcgagggcguguucguguccaacgggacccacugguucgucacgcagcggaacuucuacgagccgcagaucaucaccaccgacaacaccuucgugagcggcaacugcgacguggucaucggcaucgugaacaacacgguguacgacccccugcagcccgagcuggacuccuucaaggaggagcucgacaaguacuucaagaaccacaccagccccgacgucgaccugggggacaucuccggcaucaacgccagcguggugaacauccagaaggagaucgaccgccugaacgaggucgccaagaaccucaacgagucccugaucgaccugcaggagcucgggaaguacgagcaguacaucaaguggccgugguacaucuggcugggcuucaucgccggccugaucgcgaucgugauggugaccaucaugcucugcugcaugaccagcugcugcuccugccugaaggggugcugcagcugcggcuccugcugcaaguucgacgaggacgacagcgagcccguccugaagggggugaagcuccacuacacgugaggacuaguguccaccugucccuccugggcugcuggauugucucguuuuccugccaaauaaacaggaucagcgcuuuacagaucuaaaaaaaaaaaaaaaaaaaaaaaaaaaaaaaaaaaaaaaaaaaaaaaaaaaaaaaaaaaaaaaaaaaaaaaaaaaaaaaaaaaaaaaaaaaaaaaaaaaa

SEQ ID NO: 25284 - RNA, 4105 nt, Artificial Sequence
  SARS-CoV-2/Wuhan/WIV05/2019__EPI_ISL_402128 spike protein mRNA gc (1-1273)(K986P_V987P_Y453F_D614G)
aggagacccgugacccggaaguuguacggcuacgcgacuuucccucccacaaacccucgcgcccuuccuuuccuacuugggcccggcagaaagcuuaccauguucguguuccugguccuccugccccuggugagcucccagugcgugaaccucaccacccgcacgcagcugccgcccgccuacaccaacagcuucacccggggcgucuacuaccccgacaagguguuccgcuccagcgugcugcacuccacccaggaccucuuccugcccuucuucagcaacgucacgugguuccacgccauccacguguccgggaccaacggcaccaagcgguucgacaacccggugcugcccuucaacgacggggucuacuucgcgagcaccgagaaguccaacaucauccgcggcuggaucuucgggacgacccucgacagcaagacccagucccugcugaucgugaacaacgccaccaacguggucaucaaggugugcgaguuccaguucugcaacgaccccuuccucggcguguacuaccacaagaacaacaagagcuggauggaguccgaguuccgggucuacagcuccgccaacaacugcacguucgaguacgugagccagcccuuccugauggaccuggagggcaagcaggggaacuucaagaaccuccgcgaguucguguucaagaacaucgacggcuacuucaagaucuacuccaagcacaccccgaucaaccugguccgggaccugccccagggguucagcgcccucgagccccugguggaccugcccaucggcaucaacaucacccgcuuccagacccuccuggcccugcaccgguccuaccucacgccgggggacagcagcuccggcuggaccgcgggcgccgccgccuacuacgugggguaccugcagccccgcaccuuccugcucaaguacaacgagaacggcaccaucacggacgcggucgacugcgcccuggacccccugagcgagaccaagugcacccucaaguccuucaccguggagaaggggaucuaccagacgagcaacuuccgggugcagcccaccgaguccaucguccgcuucccgaacaucaccaaccugugccccuucggcgagguguucaacgccacccgguucgccagcgucuacgccuggaaccgcaagcggaucuccaacugcguggcggacuacagcgugcuguacaacuccgccagcuucuccacguucaagugcuacggcgucagccccaccaagcucaacgaccugugcuucaccaacguguacgccgacuccuucgugauccgcggggacgagguccggcagaucgcccccggccagaccgggaagaucgccgacuacaacuacaagcugccggacgacuucacgggcugcgugaucgcguggaacagcaacaaccucgacuccaaggucgggggcaacuacaacuaccuguuccgccuguuccgcaagagcaaccucaagcccuucgagcgggacaucuccaccgagaucuaccaggccggcagcacccccugcaacgggguggagggcuucaacugcuacuucccccugcaguccuacggguuccagccgaccaacggcgugggguaccagcccuaccggguggucgugcugagcuucgagcuccugcacgcccccgccacggugugcggccccaagaaguccaccaaccuggucaagaacaagugcgugaacuucaacuucaacggccucaccgggaccggcgugcugaccgagagcaacaagaaguuccugccguuccagcaguucgggcgcgacaucgccgacacgaccgacgcgguccgcgacccccagacccuggagauccucgacaucacccccugcagcuucggcgggguguccgugaucacgccgggcaccaacaccagcaaccaggucgccgugcuguaccagggcgugaacugcaccgagguccccguggccauccacgccgaccagcugacgcccaccuggcggguguacuccaccggcagcaacgucuuccagacccgcgccgggugccucaucggcgcggagcacgugaacaacuccuacgagugcgacauccccaucggggccggcaucugcgccagcuaccagacgcagaccaacuccccgcggcgcgcccggagcguggcgucccagagcaucaucgccuacaccaugucccugggcgccgagaacagcgucgccuacuccaacaacagcaucgccauccccaccaacuucacgaucuccgugaccaccgagauccugcccgugagcaugaccaagacgagcgucgacugcaccauguacaucugcggggacuccaccgagugcagcaaccuccugcugcaguacggcuccuucugcacccagcucaaccgcgcgcugacggggaucgccguggagcaggacaagaacacccaggagguguucgcccaggucaagcagaucuacaagacgcccccgaucaaggacuucggcggguucaacuucagccagauccugcccgaccccuccaagcccagcaagcgguccuucaucgaggaccuccuguucaacaaggugacccuggccgacgccggcuucaucaagcaguacggcgacugccucggggacaucgcggcccgcgaccugaucugcgcccagaaguucaacggccugaccgugcucccgccccugcugaccgacgagaugaucgcccaguacaccagcgcccuccuggcggggaccaucacguccggcuggaccuucggggccggcgccgcccugcagauccccuucgcgaugcagauggccuaccgguucaacggcaucggggucacccagaacgugcucuacgagaaccagaagcugaucgccaaccaguucaacagcgccaucggcaagauccaggacucccugagcuccaccgccagcgcgcucgggaagcugcaggacguggucaaccagaacgcccaggcccugaacacgcucgugaagcagcuguccagcaacuucggcgccaucuccagcgugcugaacgacauccucucccgccuggacccgcccgaggccgaggugcagaucgaccggcugaucaccgggcgccuccagagccugcagaccuacgugacccagcagcugauccgggcggccgagauccgcgccagcgccaaccucgccgcgaccaagauguccgagugcguccugggccagagcaagcggguggacuucugcggcaagggguaccaccugauguccuucccccagagcgccccgcacggcguggucuuccuccacgugacguacguccccgcccaggagaagaacuucaccaccgcccccgcgaucugccacgacgggaaggcccacuucccccgcgagggcguguucguguccaacgggacccacugguucgucacgcagcggaacuucuacgagccgcagaucaucaccaccgacaacaccuucgugagcggcaacugcgacguggucaucggcaucgugaacaacacgguguacgacccccugcagcccgagcuggacuccuucaaggaggagcucgacaaguacuucaagaaccacaccagccccgacgucgaccugggggacaucuccggcaucaacgccagcguggugaacauccagaaggagaucgaccgccugaacgaggucgccaagaaccucaacgagucccugaucgaccugcaggagcucgggaaguacgagcaguacaucaaguggccgugguacaucuggcugggcuucaucgccggccugaucgcgaucgugauggugaccaucaugcucugcugcaugaccagcugcugcuccugccugaaggggugcugcagcugcggcuccugcugcaaguucgacgaggacgacagcgagcccguccugaagggggugaagcuccacuacacgugaggacuaguguccaccugucccuccugggcugcuggauugucucguuuuccugccaaauaaacaggaucagcgcuuuacagaucuaaaaaaaaaaaaaaaaaaaaaaaaaaaaaaaaaaaaaaaaaaaaaaaaaaaaaaaaaaaaaaaaaaaaaaaaaaaaaaaaaaaaaaaaaaaaaaaaaaaa

SEQ ID NO: 25285 - RNA, 4105 nt, Artificial Sequence
  SARS-CoV-2/Wuhan/WIV05/2019__EPI_ISL_402128 spike protein mRNA gc (1-1273)(K986P_V987P_D614G_I692V)
aggagacccgugacccggaaguuguacggcuacgcgacuuucccucccacaaacccucgcgcccuuccuuuccuacuugggcccggcagaaagcuuaccauguucguguuccugguccuccugccccuggugagcucccagugcgugaaccucaccacccgcacgcagcugccgcccgccuacaccaacagcuucacccggggcgucuacuaccccgacaagguguuccgcuccagcgugcugcacuccacccaggaccucuuccugcccuucuucagcaacgucacgugguuccacgccauccacguguccgggaccaacggcaccaagcgguucgacaacccggugcugcccuucaacgacggggucuacuucgcgagcaccgagaaguccaacaucauccgcggcuggaucuucgggacgacccucgacagcaagacccagucccugcugaucgugaacaacgccaccaacguggucaucaaggugugcgaguuccaguucugcaacgaccccuuccucggcguguacuaccacaagaacaacaagagcuggauggaguccgaguuccgggucuacagcuccgccaacaacugcacguucgaguacgugagccagcccuuccugauggaccuggagggcaagcaggggaacuucaagaaccuccgcgaguucguguucaagaacaucgacggcuacuucaagaucuacuccaagcacaccccgaucaaccugguccgggaccugccccagggguucagcgcccucgagccccugguggaccugcccaucggcaucaacaucacccgcuuccagacccuccuggcccugcaccgguccuaccucacgccgggggacagcagcuccggcuggaccgcgggcgccgccgccuacuacgugggguaccugcagccccgcaccuuccugcucaaguacaacgagaacggcaccaucacggacgcggucgacugcgcccuggacccccugagcgagaccaagugcacccucaaguccuucaccguggagaaggggaucuaccagacgagcaacuuccgggugcagcccaccgaguccaucguccgcuucccgaacaucaccaaccugugccccuucggcgagguguucaacgccacccgguucgccagcgucuacgccuggaaccgcaagcggaucuccaacugcguggcggacuacagcgugcuguacaacuccgccagcuucuccacguucaagugcuacggcgucagccccaccaagcucaacgaccugugcuucaccaacguguacgccgacuccuucgugauccgcggggacgagguccggcagaucgcccccggccagaccgggaagaucgccgacuacaacuacaagcugccggacgacuucacgggcugcgugaucgcguggaacagcaacaaccucgacuccaaggucgggggcaacuacaacuaccuguaccgccuguuccgcaagagcaaccucaagcccuucgagcgggacaucuccaccgagaucuaccaggccggcagcacccccugcaacgggguggagggcuucaacugcuacuucccccugcaguccuacggguuccagccgaccaacggcgugggguaccagcccuaccggguggucgugcugagcuucgagcuccugcacgcccccgccacggugugcggccccaagaaguccaccaaccuggucaagaacaagugcgugaacuucaacuucaacggccucaccgggaccggcgugcugaccgagagcaacaagaaguuccugccguuccagcaguucgggcgcgacaucgccgacacgaccgacgcgguccgcgacccccagacccuggagauccucgacaucacccccugcagcuucggcgggguguccgugaucacgccgggcaccaacaccagcaaccaggucgccgugcuguaccagggcgugaacugcaccgagguccccguggccauccacgccgaccagcugacgcccaccuggcggguguacuccaccggcagcaacgucuuccagacccgcgccgggugccucaucggcgcggagcacgugaacaacuccuacgagugcgacauccccaucggggccggcaucugcgccagcuaccagacgcagaccaacuccccgcggcgcgcccggagcguggcgucccagagcgucaucgccuacaccaugucccugggcgccgagaacagcgucgccuacuccaacaacagcaucgccauccccaccaacuucacgaucuccgugaccaccgagauccugcccgugagcaugaccaagacgagcgucgacugcaccauguacaucugcggggacuccaccgagugcagcaaccuccugcugcaguacggcuccuucugcacccagcucaaccgcgcgcugacggggaucgccguggagcaggacaagaacacccaggagguguucgcccaggucaagcagaucuacaagacgcccccgaucaaggacuucggcggguucaacuucagccagauccugcccgaccccuccaagcccagcaagcgguccuucaucgaggaccuccuguucaacaaggugacccuggccgacgccggcuucaucaagcaguacggcgacugccucggggacaucgcggcccgcgaccugaucugcgcccagaaguucaacggccugaccgugcucccgccccugcugaccgacgagaugaucgcccaguacaccagcgcccuccuggcggggaccaucacguccggcuggaccuucggggccggcgccgcccugcagauccccuucgcgaugcagauggccuaccgguucaacggcaucggggucacccagaacgugcucuacgagaaccagaagcugaucgccaaccaguucaacagcgccaucggcaagauccaggacucccugagcuccaccgccagcgcgcucgggaagcugcaggacguggucaaccagaacgcccaggcccugaacacgcucgugaagcagcuguccagcaacuucggcgccaucuccagcgugcugaacgacauccucucccgccuggacccgcccgaggccgaggugcagaucgaccggcugaucaccgggcgccuccagagccugcagaccuacgugacccagcagcugauccgggcggccgagauccgcgccagcgccaaccucgccgcgaccaagauguccgagugcguccugggccagagcaagcggguggacuucugcggcaagggguaccaccugauguccuucccccagagcgccccgcacggcguggucuuccuccacgugacguacguccccgcccaggagaagaacuucaccaccgcccccgcgaucugccacgacgggaaggcccacuucccccgcgagggcguguucguguccaacgggacccacugguucgucacgcagcggaacuucuacgagccgcagaucaucaccaccgacaacaccuucgugagcggcaacugcgacguggucaucggcaucgugaacaacacgguguacgacccccugcagcccgagcuggacuccuucaaggaggagcucgacaaguacuucaagaaccacaccagccccgacgucgaccugggggacaucuccggcaucaacgccagcguggugaacauccagaaggagaucgaccgccugaacgaggucgccaagaaccucaacgagucccugaucgaccugcaggagcucgggaaguacgagcaguacaucaaguggccgugguacaucuggcugggcuucaucgccggccugaucgcgaucgugauggugaccaucaugcucugcugcaugaccagcugcugcuccugccugaaggggugcugcagcugcggcuccugcugcaaguucgacgaggacgacagcgagcccguccugaagggggugaagcuccacuacacgugaggacuaguguccaccugucccuccugggcugcuggauugucucguuuuccugccaaauaaacaggaucagcgcuuuacagaucuaaaaaaaaaaaaaaaaaaaaaaaaaaaaaaaaaaaaaaaaaaaaaaaaaaaaaaaaaaaaaaaaaaaaaaaaaaaaaaaaaaaaaaaaaaaaaaaaaaaa

SEQ ID NO: 25286 - RNA, 4105 nt, Artificial Sequence
  SARS-CoV-2/Wuhan/WIV05/2019__EPI_ISL_402128 spike protein mRNA gc (1-1273)(K986P_V987P_D614G_M1229I)
aggagacccgugacccggaaguuguacggcuacgcgacuuucccucccacaaacccucgcgcccuuccuuuccuacuugggcccggcagaaagcuuaccauguucguguuccugguccuccugccccuggugagcucccagugcgugaaccucaccacccgcacgcagcugccgcccgccuacaccaacagcuucacccggggcgucuacuaccccgacaagguguuccgcuccagcgugcugcacuccacccaggaccucuuccugcccuucuucagcaacgucacgugguuccacgccauccacguguccgggaccaacggcaccaagcgguucgacaacccggugcugcccuucaacgacggggucuacuucgcgagcaccgagaaguccaacaucauccgcggcuggaucuucgggacgacccucgacagcaagacccagucccugcugaucgugaacaacgccaccaacguggucaucaaggugugcgaguuccaguucugcaacgaccccuuccucggcguguacuaccacaagaacaacaagagcuggauggaguccgaguuccgggucuacagcuccgccaacaacugcacguucgaguacgugagccagcccuuccugauggaccuggagggcaagcaggggaacuucaagaaccuccgcgaguucguguucaagaacaucgacggcuacuucaagaucuacuccaagcacaccccgaucaaccugguccgggaccugccccagggguucagcgcccucgagccccugguggaccugcccaucggcaucaacaucacccgcuuccagacccuccuggcccugcaccgguccuaccucacgccgggggacagcagcuccggcuggaccgcgggcgccgccgccuacuacgugggguaccugcagccccgcaccuuccugcucaaguacaacgagaacggcaccaucacggacgcggucgacugcgcccuggacccccugagcgagaccaagugcacccucaaguccuucaccguggagaaggggaucuaccagacgagcaacuuccgggugcagcccaccgaguccaucguccgcuucccgaacaucaccaaccugugccccuucggcgagguguucaacgccacccgguucgccagcgucuacgccuggaaccgcaagcggaucuccaacugcguggcggacuacagcgugcuguacaacuccgccagcuucuccacguucaagugcuacggcgucagccccaccaagcucaacgaccugugcuucaccaacguguacgccgacuccuucgugauccgcggggacgagguccggcagaucgcccccggccagaccgggaagaucgccgacuacaacuacaagcugccggacgacuucacgggcugcgugaucgcguggaacagcaacaaccucgacuccaaggucgggggcaacuacaacuaccuguaccgccuguuccgcaagagcaaccucaagcccuucgagcgggacaucuccaccgagaucuaccaggccggcagcacccccugcaacgggguggagggcuucaacugcuacuucccccugcaguccuacggguuccagccgaccaacggcgugggguaccagcccuaccggguggucgugcugagcuucgagcuccugcacgcccccgccacggugugcggccccaagaaguccaccaaccuggucaagaacaagugcgugaacuucaacuucaacggccucaccgggaccggcgugcugaccgagagcaacaagaaguuccugccguuccagcaguucgggcgcgacaucgccgacacgaccgacgcgguccgcgacccccagacccuggagauccucgacaucacccccugcagcuucggcgggguguccgugaucacgccgggcaccaacaccagcaaccaggucgccgugcuguaccagggcgugaacugcaccgagguccccguggccauccacgccgaccagcugacgcccaccuggcggguguacuccaccggcagcaacgucuuccagacccgcgccgggugccucaucggcgcggagcacgugaacaacuccuacgagugcgacauccccaucggggccggcaucugcgccagcuaccagacgcagaccaacuccccgcggcgcgcccggagcguggcgucccagagcaucaucgccuacaccaugucccugggcgccgagaacagcgucgccuacuccaacaacagcaucgccauccccaccaacuucacgaucuccgugaccaccgagauccugcccgugagcaugaccaagacgagcgucgacugcaccauguacaucugcggggacuccaccgagugcagcaaccuccugcugcaguacggcuccuucugcacccagcucaaccgcgcgcugacggggaucgccguggagcaggacaagaacacccaggagguguucgcccaggucaagcagaucuacaagacgcccccgaucaaggacuucggcggguucaacuucagccagauccugcccgaccccuccaagcccagcaagcgguccuucaucgaggaccuccuguucaacaaggugacccuggccgacgccggcuucaucaagcaguacggcgacugccucggggacaucgcggcccgcgaccugaucugcgcccagaaguucaacggccugaccgugcucccgccccugcugaccgacgagaugaucgcccaguacaccagcgcccuccuggcggggaccaucacguccggcuggaccuucggggccggcgccgcccugcagauccccuucgcgaugcagauggccuaccgguucaacggcaucggggucacccagaacgugcucuacgagaaccagaagcugaucgccaaccaguucaacagcgccaucggcaagauccaggacucccugagcuccaccgccagcgcgcucgggaagcugcaggacguggucaaccagaacgcccaggcccugaacacgcucgugaagcagcuguccagcaacuucggcgccaucuccagcgugcugaacgacauccucucccgccuggacccgcccgaggccgaggugcagaucgaccggcugaucaccgggcgccuccagagccugcagaccuacgugacccagcagcugauccgggcggccgagauccgcgccagcgccaaccucgccgcgaccaagauguccgagugcguccugggccagagcaagcggguggacuucugcggcaagggguaccaccugauguccuucccccagagcgccccgcacggcguggucuuccuccacgugacguacguccccgcccaggagaagaacuucaccaccgcccccgcgaucugccacgacgggaaggcccacuucccccgcgagggcguguucguguccaacgggacccacugguucgucacgcagcggaacuucuacgagccgcagaucaucaccaccgacaacaccuucgugagcggcaacugcgacguggucaucggcaucgugaacaacacgguguacgacccccugcagcccgagcuggacuccuucaaggaggagcucgacaaguacuucaagaaccacaccagccccgacgucgaccugggggacaucuccggcaucaacgccagcguggugaacauccagaaggagaucgaccgccugaacgaggucgccaagaaccucaacgagucccugaucgaccugcaggagcucgggaaguacgagcaguacaucaaguggccgugguacaucuggcugggcuucaucgccggccugaucgcgaucgugaucgugaccaucaugcucugcugcaugaccagcugcugcuccugccugaaggggugcugcagcugcggcuccugcugcaaguucgacgaggacgacagcgagcccguccugaagggggugaagcuccacuacacgugaggacuaguguccaccugucccuccugggcugcuggauugucucguuuuccugccaaauaaacaggaucagcgcuuuacagaucuaaaaaaaaaaaaaaaaaaaaaaaaaaaaaaaaaaaaaaaaaaaaaaaaaaaaaaaaaaaaaaaaaaaaaaaaaaaaaaaaaaaaaaaaaaaaaaaaaaaa

SEQ ID NO: 25287 - RNA, 4099 nt, Artificial Sequence
  SARS-CoV-2/Wuhan/WIV05/2019__EPI_ISL_402128 spike protein mRNA gc (1-1273)(K986P_V987P_H69del_V70del_A222V_Y453F_S477N_D614G_I692V)
aggagacccgugacccggaaguuguacggcuacgcgacuuucccucccacaaacccucgcgcccuuccuuuccuacuugggcccggcagaaagcuuaccauguucguguuccugguccuccugccccuggugagcucccagugcgugaaccucaccacccgcacgcagcugccgcccgccuacaccaacagcuucacccggggcgucuacuaccccgacaagguguuccgcuccagcgugcugcacuccacccaggaccucuuccugcccuucuucagcaacgucacgugguuccacgccaucuccgggaccaacggcaccaagcgguucgacaacccggugcugcccuucaacgacggggucuacuucgcgagcaccgagaaguccaacaucauccgcggcuggaucuucgggacgacccucgacagcaagacccagucccugcugaucgugaacaacgccaccaacguggucaucaaggugugcgaguuccaguucugcaacgaccccuuccucggcguguacuaccacaagaacaacaagagcuggauggaguccgaguuccgggucuacagcuccgccaacaacugcacguucgaguacgugagccagcccuuccugauggaccuggagggcaagcaggggaacuucaagaaccuccgcgaguucguguucaagaacaucgacggcuacuucaagaucuacuccaagcacaccccgaucaaccugguccgggaccugccccagggguucagcguccucgagccccugguggaccugcccaucggcaucaacaucacccgcuuccagacccuccuggcccugcaccgguccuaccucacgccgggggacagcagcuccggcuggaccgcgggcgccgccgccuacuacgugggguaccugcagccccgcaccuuccugcucaaguacaacgagaacggcaccaucacggacgcggucgacugcgcccuggacccccugagcgagaccaagugcacccucaaguccuucaccguggagaaggggaucuaccagacgagcaacuuccgggugcagcccaccgaguccaucguccgcuucccgaacaucaccaaccugugccccuucggcgagguguucaacgccacccgguucgccagcgucuacgccuggaaccgcaagcggaucuccaacugcguggcggacuacagcgugcuguacaacuccgccagcuucuccacguucaagugcuacggcgucagccccaccaagcucaacgaccugugcuucaccaacguguacgccgacuccuucgugauccgcggggacgagguccggcagaucgcccccggccagaccgggaagaucgccgacuacaacuacaagcugccggacgacuucacgggcugcgugaucgcguggaacagcaacaaccucgacuccaaggucgggggcaacuacaacuaccuguuccgccuguuccgcaagagcaaccucaagcccuucgagcgggacaucuccaccgagaucuaccaggccggcaacacccccugcaacgggguggagggcuucaacugcuacuucccccugcaguccuacggguuccagccgaccaacggcgugggguaccagcccuaccggguggucgugcugagcuucgagcuccugcacgcccccgccacggugugcggccccaagaaguccaccaaccuggucaagaacaagugcgugaacuucaacuucaacggccucaccgggaccggcgugcugaccgagagcaacaagaaguuccugccguuccagcaguucgggcgcgacaucgccgacacgaccgacgcgguccgcgacccccagacccuggagauccucgacaucacccccugcagcuucggcgggguguccgugaucacgccgggcaccaacaccagcaaccaggucgccgugcuguaccagggcgugaacugcaccgagguccccguggccauccacgccgaccagcugacgcccaccuggcggguguacuccaccggcagcaacgucuuccagacccgcgccgggugccucaucggcgcggagcacgugaacaacuccuacgagugcgacauccccaucggggccggcaucugcgccagcuaccagacgcagaccaacuccccgcggcgcgcccggagcguggcgucccagagcgucaucgccuacaccaugucccugggcgccgagaacagcgucgccuacuccaacaacagcaucgccauccccaccaacuucacgaucuccgugaccaccgagauccugcccgugagcaugaccaagacgagcgucgacugcaccauguacaucugcggggacuccaccgagugcagcaaccuccugcugcaguacggcuccuucugcacccagcucaaccgcgcgcugacggggaucgccguggagcaggacaagaacacccaggagguguucgcccaggucaagcagaucuacaagacgcccccgaucaaggacuucggcggguucaacuucagccagauccugcccgaccccuccaagcccagcaagcgguccuucaucgaggaccuccuguucaacaaggugacccuggccgacgccggcuucaucaagcaguacggcgacugccucggggacaucgcggcccgcgaccugaucugcgcccagaaguucaacggccugaccgugcucccgccccugcugaccgacgagaugaucgcccaguacaccagcgcccuccuggcggggaccaucacguccggcuggaccuucggggccggcgccgcccugcagauccccuucgcgaugcagauggccuaccgguucaacggcaucggggucacccagaacgugcucuacgagaaccagaagcugaucgccaaccaguucaacagcgccaucggcaagauccaggacucccugagcuccaccgccagcgcgcucgggaagcugcaggacguggucaaccagaacgcccaggcccugaacacgcucgugaagcagcuguccagcaacuucggcgccaucuccagcgugcugaacgacauccucucccgccuggacccgcccgaggccgaggugcagaucgaccggcugaucaccgggcgccuccagagccugcagaccuacgugacccagcagcugauccgggcggccgagauccgcgccagcgccaaccucgccgcgaccaagauguccgagugcguccugggccagagcaagcggguggacuucugcggcaagggguaccaccugauguccuucccccagagcgccccgcacggcguggucuuccuccacgugacguacguccccgcccaggagaagaacuucaccaccgcccccgcgaucugccacgacgggaaggcccacuucccccgcgagggcguguucguguccaacgggacccacugguucgucacgcagcggaacuucuacgagccgcagaucaucaccaccgacaacaccuucgugagcggcaacugcgacguggucaucggcaucgugaacaacacgguguacgacccccugcagcccgagcuggacuccuucaaggaggagcucgacaaguacuucaagaaccacaccagccccgacgucgaccugggggacaucuccggcaucaacgccagcguggugaacauccagaaggagaucgaccgccugaacgaggucgccaagaaccucaacgagucccugaucgaccugcaggagcucgggaaguacgagcaguacaucaaguggccgugguacaucuggcugggcuucaucgccggccugaucgcgaucgugauggugaccaucaugcucugcugcaugaccagcugcugcuccugccugaaggggugcugcagcugcggcuccugcugcaaguucgacgaggacgacagcgagcccguccugaagggggugaagcuccacuacacgugaggacuaguguccaccugucccuccugggcugcuggauugucucguuuuccugccaaauaaacaggaucagcgcuuuacagaucuaaaaaaaaaaaaaaaaaaaaaaaaaaaaaaaaaaaaaaaaaaaaaaaaaaaaaaaaaaaaaaaaaaaaaaaaaaaaaaaaaaaaaaaaaaaaaaaaaaaa

SEQ ID NO: 25288 - RNA, 4099 nt, Artificial Sequence
  SARS-CoV-2/Wuhan/WIV05/2019__EPI_ISL_402128 spike protein mRNA gc (1-1273)(K986P_V987P_H69del_V70del_Y453F_D614G_I692V_M1229I)
aggagacccgugacccggaaguuguacggcuacgcgacuuucccucccacaaacccucgcgcccuuccuuuccuacuugggcccggcagaaagcuuaccauguucguguuccugguccuccugccccuggugagcucccagugcgugaaccucaccacccgcacgcagcugccgcccgccuacaccaacagcuucacccggggcgucuacuaccccgacaagguguuccgcuccagcgugcugcacuccacccaggaccucuuccugcccuucuucagcaacgucacgugguuccacgccaucuccgggaccaacggcaccaagcgguucgacaacccggugcugcccuucaacgacggggucuacuucgcgagcaccgagaaguccaacaucauccgcggcuggaucuucgggacgacccucgacagcaagacccagucccugcugaucgugaacaacgccaccaacguggucaucaaggugugcgaguuccaguucugcaacgaccccuuccucggcguguacuaccacaagaacaacaagagcuggauggaguccgaguuccgggucuacagcuccgccaacaacugcacguucgaguacgugagccagcccuuccugauggaccuggagggcaagcaggggaacuucaagaaccuccgcgaguucguguucaagaacaucgacggcuacuucaagaucuacuccaagcacaccccgaucaaccugguccgggaccugccccagggguucagcgcccucgagccccugguggaccugcccaucggcaucaacaucacccgcuuccagacccuccuggcccugcaccgguccuaccucacgccgggggacagcagcuccggcuggaccgcgggcgccgccgccuacuacgugggguaccugcagccccgcaccuuccugcucaaguacaacgagaacggcaccaucacggacgcggucgacugcgcccuggacccccugagcgagaccaagugcacccucaaguccuucaccguggagaaggggaucuaccagacgagcaacuuccgggugcagcccaccgaguccaucguccgcuucccgaacaucaccaaccugugccccuucggcgagguguucaacgccacccgguucgccagcgucuacgccuggaaccgcaagcggaucuccaacugcguggcggacuacagcgugcuguacaacuccgccagcuucuccacguucaagugcuacggcgucagccccaccaagcucaacgaccugugcuucaccaacguguacgccgacuccuucgugauccgcggggacgagguccggcagaucgcccccggccagaccgggaagaucgccgacuacaacuacaagcugccggacgacuucacgggcugcgugaucgcguggaacagcaacaaccucgacuccaaggucgggggcaacuacaacuaccuguuccgccuguuccgcaagagcaaccucaagcccuucgagcgggacaucuccaccgagaucuaccaggccggcagcacccccugcaacgggguggagggcuucaacugcuacuucccccugcaguccuacggguuccagccgaccaacggcgugggguaccagcccuaccggguggucgugcugagcuucgagcuccugcacgcccccgccacggugugcggccccaagaaguccaccaaccuggucaagaacaagugcgugaacuucaacuucaacggccucaccgggaccggcgugcugaccgagagcaacaagaaguuccugccguuccagcaguucgggcgcgacaucgccgacacgaccgacgcgguccgcgacccccagacccuggagauccucgacaucacccccugcagcuucggcgggguguccgugaucacgccgggcaccaacaccagcaaccaggucgccgugcuguaccagggcgugaacugcaccgagguccccguggccauccacgccgaccagcugacgcccaccuggcggguguacuccaccggcagcaacgucuuccagacccgcgccgggugccucaucggcgcggagcacgugaacaacuccuacgagugcgacauccccaucggggccggcaucugcgccagcuaccagacgcagaccaacuccccgcggcgcgcccggagcguggcgucccagagcgugaucgccuacaccaugucccugggcgccgagaacagcgucgccuacuccaacaacagcaucgccauccccaccaacuucacgaucuccgugaccaccgagauccugcccgugagcaugaccaagacgagcgucgacugcaccauguacaucugcggggacuccaccgagugcagcaaccuccugcugcaguacggcuccuucugcacccagcucaaccgcgcgcugacggggaucgccguggagcaggacaagaacacccaggagguguucgcccaggucaagcagaucuacaagacgcccccgaucaaggacuucggcggguucaacuucagccagauccugcccgaccccuccaagcccagcaagcgguccuucaucgaggaccuccuguucaacaaggugacccuggccgacgccggcuucaucaagcaguacggcgacugccucggggacaucgcggcccgcgaccugaucugcgcccagaaguucaacggccugaccgugcucccgccccugcugaccgacgagaugaucgcccaguacaccagcgcccuccuggcggggaccaucacguccggcuggaccuucggggccggcgccgcccugcagauccccuucgcgaugcagauggccuaccgguucaacggcaucggggucacccagaacgugcucuacgagaaccagaagcugaucgccaaccaguucaacagcgccaucggcaagauccaggacucccugagcuccaccgccagcgcgcucgggaagcugcaggacguggucaaccagaacgcccaggcccugaacacgcucgugaagcagcuguccagcaacuucggcgccaucuccagcgugcugaacgacauccucucccgccuggacccgcccgaggccgaggugcagaucgaccggcugaucaccgggcgccuccagagccugcagaccuacgugacccagcagcugauccgggcggccgagauccgcgccagcgccaaccucgccgcgaccaagauguccgagugcguccugggccagagcaagcggguggacuucugcggcaagggguaccaccugauguccuucccccagagcgccccgcacggcguggucuuccuccacgugacguacguccccgcccaggagaagaacuucaccaccgcccccgcgaucugccacgacgggaaggcccacuucccccgcgagggcguguucguguccaacgggacccacugguucgucacgcagcggaacuucuacgagccgcagaucaucaccaccgacaacaccuucgugagcggcaacugcgacguggucaucggcaucgugaacaacacgguguacgacccccugcagcccgagcuggacuccuucaaggaggagcucgacaaguacuucaagaaccacaccagccccgacgucgaccugggggacaucuccggcaucaacgccagcguggugaacauccagaaggagaucgaccgccugaacgaggucgccaagaaccucaacgagucccugaucgaccugcaggagcucgggaaguacgagcaguacaucaaguggccgugguacaucuggcugggcuucaucgccggccugaucgcgaucgugaucgugaccaucaugcucugcugcaugaccagcugcugcuccugccugaaggggugcugcagcugcggcuccugcugcaaguucgacgaggacgacagcgagcccguccugaagggggugaagcuccacuacacgugaggacuaguguccaccugucccuccugggcugcuggauugucucguuuuccugccaaauaaacaggaucagcgcuuuacagaucuaaaaaaaaaaaaaaaaaaaaaaaaaaaaaaaaaaaaaaaaaaaaaaaaaaaaaaaaaaaaaaaaaaaaaaaaaaaaaaaaaaaaaaaaaaaaaaaaaaaa

SEQ ID NO: 25289 - RNA, 4096 nt, Artificial Sequence
  SARS-CoV-2/Wuhan/WIV05/2019__EPI_ISL_402128 spike protein mRNA gc (1-1273)(K986P_V987P_K986P_V987P_H69del_V70del_Y144del_N501Y_A570 D_D614G_P681H_T716I_S982A_D1118H)
aggagacccgugacccggaaguuguacggcuacgcgacuuucccucccacaaacccucgcgcccuuccuuuccuacuugggcccggcagaaagcuuaccauguucguguuccugguccuccugccccuggugagcucccagugcgugaaccucaccacccgcacgcagcugccgcccgccuacaccaacagcuucacccggggcgucuacuaccccgacaagguguuccgcuccagcgugcugcacuccacccaggaccucuuccugcccuucuucagcaacgucacgugguuccacgccaucuccgggaccaacggcaccaagcgguucgacaacccggugcugcccuucaacgacggggucuacuucgcgagcaccgagaaguccaacaucauccgcggcuggaucuucgggacgacccucgacagcaagacccagucccugcugaucgugaacaacgccaccaacguggucaucaaggugugcgaguuccaguucugcaacgaccccuuccucggcguguaccacaagaacaacaagagcuggauggaguccgaguuccgggucuacagcuccgccaacaacugcacguucgaguacgugagccagcccuuccugauggaccuggagggcaagcaggggaacuucaagaaccuccgcgaguucguguucaagaacaucgacggcuacuucaagaucuacuccaagcacaccccgaucaaccugguccgggaccugccccagggguucagcgcccucgagccccugguggaccugcccaucggcaucaacaucacccgcuuccagacccuccuggcccugcaccgguccuaccucacgccgggggacagcagcuccggcuggaccgcgggcgccgccgccuacuacgugggguaccugcagccccgcaccuuccugcucaaguacaacgagaacggcaccaucacggacgcggucgacugcgcccuggacccccugagcgagaccaagugcacccucaaguccuucaccguggagaaggggaucuaccagacgagcaacuuccgggugcagcccaccgaguccaucguccgcuucccgaacaucaccaaccugugccccuucggcgagguguucaacgccacccgguucgccagcgucuacgccuggaaccgcaagcggaucuccaacugcguggcggacuacagcgugcuguacaacuccgccagcuucuccacguucaagugcuacggcgucagccccaccaagcucaacgaccugugcuucaccaacguguacgccgacuccuucgugauccgcggggacgagguccggcagaucgcccccggccagaccgggaagaucgccgacuacaacuacaagcugccggacgacuucacgggcugcgugaucgcguggaacagcaacaaccucgacuccaaggucgggggcaacuacaacuaccuguaccgccuguuccgcaagagcaaccucaagcccuucgagcgggacaucuccaccgagaucuaccaggccggcagcacccccugcaacgggguggagggcuucaacugcuacuucccccugcaguccuacggguuccagccgaccuacggcgugggguaccagcccuaccggguggucgugcugagcuucgagcuccugcacgcccccgccacggugugcggccccaagaaguccaccaaccuggucaagaacaagugcgugaacuucaacuucaacggccucaccgggaccggcgugcugaccgagagcaacaagaaguuccugccguuccagcaguucgggcgcgacaucgacgacacgaccgacgcgguccgcgacccccagacccuggagauccucgacaucacccccugcagcuucggcgggguguccgugaucacgccgggcaccaacaccagcaaccaggucgccgugcuguaccagggcgugaacugcaccgagguccccguggccauccacgccgaccagcugacgcccaccuggcggguguacuccaccggcagcaacgucuuccagacccgcgccgggugccucaucggcgcggagcacgugaacaacuccuacgagugcgacauccccaucggggccggcaucugcgccagcuaccagacgcagaccaacucccaccggcgcgcccggagcguggcgucccagagcaucaucgccuacaccaugucccugggcgccgagaacagcgucgccuacuccaacaacagcaucgccauccccaucaacuucacgaucuccgugaccaccgagauccugcccgugagcaugaccaagacgagcgucgacugcaccauguacaucugcggggacuccaccgagugcagcaaccuccugcugcaguacggcuccuucugcacccagcucaaccgcgcgcugacggggaucgccguggagcaggacaagaacacccaggagguguucgcccaggucaagcagaucuacaagacgcccccgaucaaggacuucggcggguucaacuucagccagauccugcccgaccccuccaagcccagcaagcgguccuucaucgaggaccuccuguucaacaaggugacccuggccgacgccggcuucaucaagcaguacggcgacugccucggggacaucgcggcccgcgaccugaucugcgcccagaaguucaacggccugaccgugcucccgccccugcugaccgacgagaugaucgcccaguacaccagcgcccuccuggcggggaccaucacguccggcuggaccuucggggccggcgccgcccugcagauccccuucgcgaugcagauggccuaccgguucaacggcaucggggucacccagaacgugcucuacgagaaccagaagcugaucgccaaccaguucaacagcgccaucggcaagauccaggacucccugagcuccaccgccagcgcgcucgggaagcugcaggacguggucaaccagaacgcccaggcccugaacacgcucgugaagcagcuguccagcaacuucggcgccaucuccagcgugcugaacgacauccucgcccgccuggacccgcccgaggccgaggugcagaucgaccggcugaucaccgggcgccuccagagccugcagaccuacgugacccagcagcugauccgggcggccgagauccgcgccagcgccaaccucgccgcgaccaagauguccgagugcguccugggccagagcaagcggguggacuucugcggcaagggguaccaccugauguccuucccccagagcgccccgcacggcguggucuuccuccacgugacguacguccccgcccaggagaagaacuucaccaccgcccccgcgaucugccacgacgggaaggcccacuucccccgcgagggcguguucguguccaacgggacccacugguucgucacgcagcggaacuucuacgagccgcagaucaucaccacccacaacaccuucgugagcggcaacugcgacguggucaucggcaucgugaacaacacgguguacgacccccugcagcccgagcuggacuccuucaaggaggagcucgacaaguacuucaagaaccacaccagccccgacgucgaccugggggacaucuccggcaucaacgccagcguggugaacauccagaaggagaucgaccgccugaacgaggucgccaagaaccucaacgagucccugaucgaccugcaggagcucgggaaguacgagcaguacaucaaguggccgugguacaucuggcugggcuucaucgccggccugaucgcgaucgugauggugaccaucaugcucugcugcaugaccagcugcugcuccugccugaaggggugcugcagcugcggcuccugcugcaaguucgacgaggacgacagcgagcccguccugaagggggugaagcuccacuacacgugaggacuaguguccaccugucccuccugggcugcuggauugucucguuuuccugccaaauaaacaggaucagcgcuuuacagaucuaaaaaaaaaaaaaaaaaaaaaaaaaaaaaaaaaaaaaaaaaaaaaaaaaaaaaaaaaaaaaaaaaaaaaaaaaaaaaaaaaaaaaaaaaaaaaaaaaaaa

SEQ ID NO: 25290 - RNA, 4105 nt, Artificial Sequence
  SARS-CoV-2/Wuhan/WIV05/2019__EPI_ISL_402128 spike protein mRNA gc (1-1273)(K986P_V987P_K986P_V987P_K417N_E484K_N501Y_D614G)
aggagacccgugacccggaaguuguacggcuacgcgacuuucccucccacaaacccucgcgcccuuccuuuccuacuugggcccggcagaaagcuuaccauguucguguuccugguccuccugccccuggugagcucccagugcgugaaccucaccacccgcacgcagcugccgcccgccuacaccaacagcuucacccggggcgucuacuaccccgacaagguguuccgcuccagcgugcugcacuccacccaggaccucuuccugcccuucuucagcaacgucacgugguuccacgccauccacguguccgggaccaacggcaccaagcgguucgacaacccggugcugcccuucaacgacggggucuacuucgcgagcaccgagaaguccaacaucauccgcggcuggaucuucgggacgacccucgacagcaagacccagucccugcugaucgugaacaacgccaccaacguggucaucaaggugugcgaguuccaguucugcaacgaccccuuccucggcguguacuaccacaagaacaacaagagcuggauggaguccgaguuccgggucuacagcuccgccaacaacugcacguucgaguacgugagccagcccuuccugauggaccuggagggcaagcaggggaacuucaagaaccuccgcgaguucguguucaagaacaucgacggcuacuucaagaucuacuccaagcacaccccgaucaaccugguccgggaccugccccagggguucagcgcccucgagccccugguggaccugcccaucggcaucaacaucacccgcuuccagacccuccuggcccugcaccgguccuaccucacgccgggggacagcagcuccggcuggaccgcgggcgccgccgccuacuacgugggguaccugcagccccgcaccuuccugcucaaguacaacgagaacggcaccaucacggacgcggucgacugcgcccuggacccccugagcgagaccaagugcacccucaaguccuucaccguggagaaggggaucuaccagacgagcaacuuccgggugcagcccaccgaguccaucguccgcuucccgaacaucaccaaccugugccccuucggcgagguguucaacgccacccgguucgccagcgucuacgccuggaaccgcaagcggaucuccaacugcguggcggacuacagcgugcuguacaacuccgccagcuucuccacguucaagugcuacggcgucagccccaccaagcucaacgaccugugcuucaccaacguguacgccgacuccuucgugauccgcggggacgagguccggcagaucgcccccggccagaccgggaacaucgccgacuacaacuacaagcugccggacgacuucacgggcugcgugaucgcguggaacagcaacaaccucgacuccaaggucgggggcaacuacaacuaccuguaccgccuguuccgcaagagcaaccucaagcccuucgagcgggacaucuccaccgagaucuaccaggccggcagcacccccugcaacggggugaagggcuucaacugcuacuucccccugcaguccuacggguuccagccgaccuacggcgugggguaccagcccuaccggguggucgugcugagcuucgagcuccugcacgcccccgccacggugugcggccccaagaaguccaccaaccuggucaagaacaagugcgugaacuucaacuucaacggccucaccgggaccggcgugcugaccgagagcaacaagaaguuccugccguuccagcaguucgggcgcgacaucgccgacacgaccgacgcgguccgcgacccccagacccuggagauccucgacaucacccccugcagcuucggcgggguguccgugaucacgccgggcaccaacaccagcaaccaggucgccgugcuguaccagggcgugaacugcaccgagguccccguggccauccacgccgaccagcugacgcccaccuggcggguguacuccaccggcagcaacgucuuccagacccgcgccgggugccucaucggcgcggagcacgugaacaacuccuacgagugcgacauccccaucggggccggcaucugcgccagcuaccagacgcagaccaacuccccgcggcgcgcccggagcguggcgucccagagcaucaucgccuacaccaugucccugggcgccgagaacagcgucgccuacuccaacaacagcaucgccauccccaccaacuucacgaucuccgugaccaccgagauccugcccgugagcaugaccaagacgagcgucgacugcaccauguacaucugcggggacuccaccgagugcagcaaccuccugcugcaguacggcuccuucugcacccagcucaaccgcgcgcugacggggaucgccguggagcaggacaagaacacccaggagguguucgcccaggucaagcagaucuacaagacgcccccgaucaaggacuucggcggguucaacuucagccagauccugcccgaccccuccaagcccagcaagcgguccuucaucgaggaccuccuguucaacaaggugacccuggccgacgccggcuucaucaagcaguacggcgacugccucggggacaucgcggcccgcgaccugaucugcgcccagaaguucaacggccugaccgugcucccgccccugcugaccgacgagaugaucgcccaguacaccagcgcccuccuggcggggaccaucacguccggcuggaccuucggggccggcgccgcccugcagauccccuucgcgaugcagauggccuaccgguucaacggcaucggggucacccagaacgugcucuacgagaaccagaagcugaucgccaaccaguucaacagcgccaucggcaagauccaggacucccugagcuccaccgccagcgcgcucgggaagcugcaggacguggucaaccagaacgcccaggcccugaacacgcucgugaagcagcuguccagcaacuucggcgccaucuccagcgugcugaacgacauccucucccgccuggacccgcccgaggccgaggugcagaucgaccggcugaucaccgggcgccuccagagccugcagaccuacgugacccagcagcugauccgggcggccgagauccgcgccagcgccaaccucgccgcgaccaagauguccgagugcguccugggccagagcaagcggguggacuucugcggcaagggguaccaccugauguccuucccccagagcgccccgcacggcguggucuuccuccacgugacguacguccccgcccaggagaagaacuucaccaccgcccccgcgaucugccacgacgggaaggcccacuucccccgcgagggcguguucguguccaacgggacccacugguucgucacgcagcggaacuucuacgagccgcagaucaucaccaccgacaacaccuucgugagcggcaacugcgacguggucaucggcaucgugaacaacacgguguacgacccccugcagcccgagcuggacuccuucaaggaggagcucgacaaguacuucaagaaccacaccagccccgacgucgaccugggggacaucuccggcaucaacgccagcguggugaacauccagaaggagaucgaccgccugaacgaggucgccaagaaccucaacgagucccugaucgaccugcaggagcucgggaaguacgagcaguacaucaaguggccgugguacaucuggcugggcuucaucgccggccugaucgcgaucgugauggugaccaucaugcucugcugcaugaccagcugcugcuccugccugaaggggugcugcagcugcggcuccugcugcaaguucgacgaggacgacagcgagcccguccugaagggggugaagcuccacuacacgugaggacuaguguccaccugucccuccugggcugcuggauugucucguuuuccugccaaauaaacaggaucagcgcuuuacagaucuaaaaaaaaaaaaaaaaaaaaaaaaaaaaaaaaaaaaaaaaaaaaaaaaaaaaaaaaaaaaaaaaaaaaaaaaaaaaaaaaaaaaaaaaaaaaaaaaaaaa

SEQ ID NO: 25291 - RNA, 4096 nt, Artificial Sequence
  SARS-CoV-2/Wuhan/WIV05/2019__EPI_ISL_402128 spike protein mRNA gc (1-1273)(K986P_V987P_K986P_V987P_L18F_D80A_D215G_L242del_A243del_ L244del_R246I_K417N_E484K_N501Y_D614G_A701V)
aggagacccgugacccggaaguuguacggcuacgcgacuuucccucccacaaacccucgcgcccuuccuuuccuacuugggcccggcagaaagcuuaccauguucguguuccugguccuccugccccuggugagcucccagugcgugaacuucaccacccgcacgcagcugccgcccgccuacaccaacagcuucacccggggcgucuacuaccccgacaagguguuccgcuccagcgugcugcacuccacccaggaccucuuccugcccuucuucagcaacgucacgugguuccacgccauccacguguccgggaccaacggcaccaagcgguucgccaacccggugcugcccuucaacgacggggucuacuucgcgagcaccgagaaguccaacaucauccgcggcuggaucuucgggacgacccucgacagcaagacccagucccugcugaucgugaacaacgccaccaacguggucaucaaggugugcgaguuccaguucugcaacgaccccuuccucggcguguacuaccacaagaacaacaagagcuggauggaguccgaguuccgggucuacagcuccgccaacaacugcacguucgaguacgugagccagcccuuccugauggaccuggagggcaagcaggggaacuucaagaaccuccgcgaguucguguucaagaacaucgacggcuacuucaagaucuacuccaagcacaccccgaucaaccugguccggggccugccccagggguucagcgcccucgagccccugguggaccugcccaucggcaucaacaucacccgcuuccagacccuccacaucuccuaccucacgccgggggacagcagcuccggcuggaccgcgggcgccgccgccuacuacgugggguaccugcagccccgcaccuuccugcucaaguacaacgagaacggcaccaucacggacgcggucgacugcgcccuggacccccugagcgagaccaagugcacccucaaguccuucaccguggagaaggggaucuaccagacgagcaacuuccgggugcagcccaccgaguccaucguccgcuucccgaacaucaccaaccugugccccuucggcgagguguucaacgccacccgguucgccagcgucuacgccuggaaccgcaagcggaucuccaacugcguggcggacuacagcgugcuguacaacuccgccagcuucuccacguucaagugcuacggcgucagccccaccaagcucaacgaccugugcuucaccaacguguacgccgacuccuucgugauccgcggggacgagguccggcagaucgcccccggccagaccgggaacaucgccgacuacaacuacaagcugccggacgacuucacgggcugcgugaucgcguggaacagcaacaaccucgacuccaaggucgggggcaacuacaacuaccuguaccgccuguuccgcaagagcaaccucaagcccuucgagcgggacaucuccaccgagaucuaccaggccggcagcacccccugcaacggggugaagggcuucaacugcuacuucccccugcaguccuacggguuccagccgaccuacggcgugggguaccagcccuaccggguggucgugcugagcuucgagcuccugcacgcccccgccacggugugcggccccaagaaguccaccaaccuggucaagaacaagugcgugaacuucaacuucaacggccucaccgggaccggcgugcugaccgagagcaacaagaaguuccugccguuccagcaguucgggcgcgacaucgccgacacgaccgacgcgguccgcgacccccagacccuggagauccucgacaucacccccugcagcuucggcgggguguccgugaucacgccgggcaccaacaccagcaaccaggucgccgugcuguaccagggcgugaacugcaccgagguccccguggccauccacgccgaccagcugacgcccaccuggcggguguacuccaccggcagcaacgucuuccagacccgcgccgggugccucaucggcgcggagcacgugaacaacuccuacgagugcgacauccccaucggggccggcaucugcgccagcuaccagacgcagaccaacuccccgcggcgcgcccggagcguggcgucccagagcaucaucgccuacaccaugucccugggcguggagaacagcgucgccuacuccaacaacagcaucgccauccccaccaacuucacgaucuccgugaccaccgagauccugcccgugagcaugaccaagacgagcgucgacugcaccauguacaucugcggggacuccaccgagugcagcaaccuccugcugcaguacggcuccuucugcacccagcucaaccgcgcgcugacggggaucgccguggagcaggacaagaacacccaggagguguucgcccaggucaagcagaucuacaagacgcccccgaucaaggacuucggcggguucaacuucagccagauccugcccgaccccuccaagcccagcaagcgguccuucaucgaggaccuccuguucaacaaggugacccuggccgacgccggcuucaucaagcaguacggcgacugccucggggacaucgcggcccgcgaccugaucugcgcccagaaguucaacggccugaccgugcucccgccccugcugaccgacgagaugaucgcccaguacaccagcgcccuccuggcggggaccaucacguccggcuggaccuucggggccggcgccgcccugcagauccccuucgcgaugcagauggccuaccgguucaacggcaucggggucacccagaacgugcucuacgagaaccagaagcugaucgccaaccaguucaacagcgccaucggcaagauccaggacucccugagcuccaccgccagcgcgcucgggaagcugcaggacguggucaaccagaacgcccaggcccugaacacgcucgugaagcagcuguccagcaacuucggcgccaucuccagcgugcugaacgacauccucucccgccuggacccgcccgaggccgaggugcagaucgaccggcugaucaccgggcgccuccagagccugcagaccuacgugacccagcagcugauccgggcggccgagauccgcgccagcgccaaccucgccgcgaccaagauguccgagugcguccugggccagagcaagcggguggacuucugcggcaagggguaccaccugauguccuucccccagagcgccccgcacggcguggucuuccuccacgugacguacguccccgcccaggagaagaacuucaccaccgcccccgcgaucugccacgacgggaaggcccacuucccccgcgagggcguguucguguccaacgggacccacugguucgucacgcagcggaacuucuacgagccgcagaucaucaccaccgacaacaccuucgugagcggcaacugcgacguggucaucggcaucgugaacaacacgguguacgacccccugcagcccgagcuggacuccuucaaggaggagcucgacaaguacuucaagaaccacaccagccccgacgucgaccugggggacaucuccggcaucaacgccagcguggugaacauccagaaggagaucgaccgccugaacgaggucgccaagaaccucaacgagucccugaucgaccugcaggagcucgggaaguacgagcaguacaucaaguggccgugguacaucuggcugggcuucaucgccggccugaucgcgaucgugauggugaccaucaugcucugcugcaugaccagcugcugcuccugccugaaggggugcugcagcugcggcuccugcugcaaguucgacgaggacgacagcgagcccguccugaagggggugaagcuccacuacacgugaggacuaguguccaccugucccuccugggcugcuggauugucucguuuuccugccaaauaaacaggaucagcgcuuuacagaucuaaaaaaaaaaaaaaaaaaaaaaaaaaaaaaaaaaaaaaaaaaaaaaaaaaaaaaaaaaaaaaaaaaaaaaaaaaaaaaaaaaaaaaaaaaaaaaaaaaaa

SEQ ID NO: 25292 - RNA, 4105 nt, Artificial Sequence
  SARS-CoV-2/Wuhan/WIV05/2019__EPI_ISL_402128 spike protein mRNA gc (1-1273)(K986P_V987P_K986P_V987P_E484K_D614G)
aggagacccgugacccggaaguuguacggcuacgcgacuuucccucccacaaacccucgcgcccuuccuuuccuacuugggcccggcagaaagcuuaccauguucguguuccugguccuccugccccuggugagcucccagugcgugaaccucaccacccgcacgcagcugccgcccgccuacaccaacagcuucacccggggcgucuacuaccccgacaagguguuccgcuccagcgugcugcacuccacccaggaccucuuccugcccuucuucagcaacgucacgugguuccacgccauccacguguccgggaccaacggcaccaagcgguucgacaacccggugcugcccuucaacgacggggucuacuucgcgagcaccgagaaguccaacaucauccgcggcuggaucuucgggacgacccucgacagcaagacccagucccugcugaucgugaacaacgccaccaacguggucaucaaggugugcgaguuccaguucugcaacgaccccuuccucggcguguacuaccacaagaacaacaagagcuggauggaguccgaguuccgggucuacagcuccgccaacaacugcacguucgaguacgugagccagcccuuccugauggaccuggagggcaagcaggggaacuucaagaaccuccgcgaguucguguucaagaacaucgacggcuacuucaagaucuacuccaagcacaccccgaucaaccugguccgggaccugccccagggguucagcgcccucgagccccugguggaccugcccaucggcaucaacaucacccgcuuccagacccuccuggcccugcaccgguccuaccucacgccgggggacagcagcuccggcuggaccgcgggcgccgccgccuacuacgugggguaccugcagccccgcaccuuccugcucaaguacaacgagaacggcaccaucacggacgcggucgacugcgcccuggacccccugagcgagaccaagugcacccucaaguccuucaccguggagaaggggaucuaccagacgagcaacuuccgggugcagcccaccgaguccaucguccgcuucccgaacaucaccaaccugugccccuucggcgagguguucaacgccacccgguucgccagcgucuacgccuggaaccgcaagcggaucuccaacugcguggcggacuacagcgugcuguacaacuccgccagcuucuccacguucaagugcuacggcgucagccccaccaagcucaacgaccugugcuucaccaacguguacgccgacuccuucgugauccgcggggacgagguccggcagaucgcccccggccagaccgggaagaucgccgacuacaacuacaagcugccggacgacuucacgggcugcgugaucgcguggaacagcaacaaccucgacuccaaggucgggggcaacuacaacuaccuguaccgccuguuccgcaagagcaaccucaagcccuucgagcgggacaucuccaccgagaucuaccaggccggcagcacccccugcaacggggugaagggcuucaacugcuacuucccccugcaguccuacggguuccagccgaccaacggcgugggguaccagcccuaccggguggucgugcugagcuucgagcuccugcacgcccccgccacggugugcggccccaagaaguccaccaaccuggucaagaacaagugcgugaacuucaacuucaacggccucaccgggaccggcgugcugaccgagagcaacaagaaguuccugccguuccagcaguucgggcgcgacaucgccgacacgaccgacgcgguccgcgacccccagacccuggagauccucgacaucacccccugcagcuucggcgggguguccgugaucacgccgggcaccaacaccagcaaccaggucgccgugcuguaccagggcgugaacugcaccgagguccccguggccauccacgccgaccagcugacgcccaccuggcggguguacuccaccggcagcaacgucuuccagacccgcgccgggugccucaucggcgcggagcacgugaacaacuccuacgagugcgacauccccaucggggccggcaucugcgccagcuaccagacgcagaccaacuccccgcggcgcgcccggagcguggcgucccagagcaucaucgccuacaccaugucccugggcgccgagaacagcgucgccuacuccaacaacagcaucgccauccccaccaacuucacgaucuccgugaccaccgagauccugcccgugagcaugaccaagacgagcgucgacugcaccauguacaucugcggggacuccaccgagugcagcaaccuccugcugcaguacggcuccuucugcacccagcucaaccgcgcgcugacggggaucgccguggagcaggacaagaacacccaggagguguucgcccaggucaagcagaucuacaagacgcccccgaucaaggacuucggcggguucaacuucagccagauccugcccgaccccuccaagcccagcaagcgguccuucaucgaggaccuccuguucaacaaggugacccuggccgacgccggcuucaucaagcaguacggcgacugccucggggacaucgcggcccgcgaccugaucugcgcccagaaguucaacggccugaccgugcucccgccccugcugaccgacgagaugaucgcccaguacaccagcgcccuccuggcggggaccaucacguccggcuggaccuucggggccggcgccgcccugcagauccccuucgcgaugcagauggccuaccgguucaacggcaucggggucacccagaacgugcucuacgagaaccagaagcugaucgccaaccaguucaacagcgccaucggcaagauccaggacucccugagcuccaccgccagcgcgcucgggaagcugcaggacguggucaaccagaacgcccaggcccugaacacgcucgugaagcagcuguccagcaacuucggcgccaucuccagcgugcugaacgacauccucucccgccuggacccgcccgaggccgaggugcagaucgaccggcugaucaccgggcgccuccagagccugcagaccuacgugacccagcagcugauccgggcggccgagauccgcgccagcgccaaccucgccgcgaccaagauguccgagugcguccugggccagagcaagcggguggacuucugcggcaagggguaccaccugauguccuucccccagagcgccccgcacggcguggucuuccuccacgugacguacguccccgcccaggagaagaacuucaccaccgcccccgcgaucugccacgacgggaaggcccacuucccccgcgagggcguguucguguccaacgggacccacugguucgucacgcagcggaacuucuacgagccgcagaucaucaccaccgacaacaccuucgugagcggcaacugcgacguggucaucggcaucgugaacaacacgguguacgacccccugcagcccgagcuggacuccuucaaggaggagcucgacaaguacuucaagaaccacaccagccccgacgucgaccugggggacaucuccggcaucaacgccagcguggugaacauccagaaggagaucgaccgccugaacgaggucgccaagaaccucaacgagucccugaucgaccugcaggagcucgggaaguacgagcaguacaucaaguggccgugguacaucuggcugggcuucaucgccggccugaucgcgaucgugauggugaccaucaugcucugcugcaugaccagcugcugcuccugccugaaggggugcugcagcugcggcuccugcugcaaguucgacgaggacgacagcgagcccguccugaagggggugaagcuccacuacacgugaggacuaguguccaccugucccuccugggcugcuggauugucucguuuuccugccaaauaaacaggaucagcgcuuuacagaucuaaaaaaaaaaaaaaaaaaaaaaaaaaaaaaaaaaaaaaaaaaaaaaaaaaaaaaaaaaaaaaaaaaaaaaaaaaaaaaaaaaaaaaaaaaaaaaaaaaaa

SEQ ID NO: 25293 - RNA, 4105 nt, Artificial Sequence
  SARS-CoV-2/Wuhan/WIV05/2019__EPI_ISL_402128 spike protein mRNA gc (1-1273)(K986P_V987P_K986P_V987P_L18F_T20N_P26S_D138Y_R190S_K417T _E484K_N501Y_D614G_H655Y_T1027I)
aggagacccgugacccggaaguuguacggcuacgcgacuuucccucccacaaacccucgcgcccuuccuuuccuacuugggcccggcagaaagcuuaccauguucguguuccugguccuccugccccuggugagcucccagugcgugaacuucaccaaccgcacgcagcugccgagcgccuacaccaacagcuucacccggggcgucuacuaccccgacaagguguuccgcuccagcgugcugcacuccacccaggaccucuuccugcccuucuucagcaacgucacgugguuccacgccauccacguguccgggaccaacggcaccaagcgguucgacaacccggugcugcccuucaacgacggggucuacuucgcgagcaccgagaaguccaacaucauccgcggcuggaucuucgggacgacccucgacagcaagacccagucccugcugaucgugaacaacgccaccaacguggucaucaaggugugcgaguuccaguucugcaacuaccccuuccucggcguguacuaccacaagaacaacaagagcuggauggaguccgaguuccgggucuacagcuccgccaacaacugcacguucgaguacgugagccagcccuuccugauggaccuggagggcaagcaggggaacuucaagaaccucagcgaguucguguucaagaacaucgacggcuacuucaagaucuacuccaagcacaccccgaucaaccugguccgggaccugccccagggguucagcgcccucgagccccugguggaccugcccaucggcaucaacaucacccgcuuccagacccuccuggcccugcaccgguccuaccucacgccgggggacagcagcuccggcuggaccgcgggcgccgccgccuacuacgugggguaccugcagccccgcaccuuccugcucaaguacaacgagaacggcaccaucacggacgcggucgacugcgcccuggacccccugagcgagaccaagugcacccucaaguccuucaccguggagaaggggaucuaccagacgagcaacuuccgggugcagcccaccgaguccaucguccgcuucccgaacaucaccaaccugugccccuucggcgagguguucaacgccacccgguucgccagcgucuacgccuggaaccgcaagcggaucuccaacugcguggcggacuacagcgugcuguacaacuccgccagcuucuccacguucaagugcuacggcgucagccccaccaagcucaacgaccugugcuucaccaacguguacgccgacuccuucgugauccgcggggacgagguccggcagaucgcccccggccagaccgggaccaucgccgacuacaacuacaagcugccggacgacuucacgggcugcgugaucgcguggaacagcaacaaccucgacuccaaggucgggggcaacuacaacuaccuguaccgccuguuccgcaagagcaaccucaagcccuucgagcgggacaucuccaccgagaucuaccaggccggcagcacccccugcaacggggugaagggcuucaacugcuacuucccccugcaguccuacggguuccagccgaccuacggcgugggguaccagcccuaccggguggucgugcugagcuucgagcuccugcacgcccccgccacggugugcggccccaagaaguccaccaaccuggucaagaacaagugcgugaacuucaacuucaacggccucaccgggaccggcgugcugaccgagagcaacaagaaguuccugccguuccagcaguucgggcgcgacaucgccgacacgaccgacgcgguccgcgacccccagacccuggagauccucgacaucacccccugcagcuucggcgggguguccgugaucacgccgggcaccaacaccagcaaccaggucgccgugcuguaccagggcgugaacugcaccgagguccccguggccauccacgccgaccagcugacgcccaccuggcggguguacuccaccggcagcaacgucuuccagacccgcgccgggugccucaucggcgcggaguacgugaacaacuccuacgagugcgacauccccaucggggccggcaucugcgccagcuaccagacgcagaccaacuccccgcggcgcgcccggagcguggcgucccagagcaucaucgccuacaccaugucccugggcgccgagaacagcgucgccuacuccaacaacagcaucgccauccccaccaacuucacgaucuccgugaccaccgagauccugcccgugagcaugaccaagacgagcgucgacugcaccauguacaucugcggggacuccaccgagugcagcaaccuccugcugcaguacggcuccuucugcacccagcucaaccgcgcgcugacggggaucgccguggagcaggacaagaacacccaggagguguucgcccaggucaagcagaucuacaagacgcccccgaucaaggacuucggcggguucaacuucagccagauccugcccgaccccuccaagcccagcaagcgguccuucaucgaggaccuccuguucaacaaggugacccuggccgacgccggcuucaucaagcaguacggcgacugccucggggacaucgcggcccgcgaccugaucugcgcccagaaguucaacggccugaccgugcucccgccccugcugaccgacgagaugaucgcccaguacaccagcgcccuccuggcggggaccaucacguccggcuggaccuucggggccggcgccgcccugcagauccccuucgcgaugcagauggccuaccgguucaacggcaucggggucacccagaacgugcucuacgagaaccagaagcugaucgccaaccaguucaacagcgccaucggcaagauccaggacucccugagcuccaccgccagcgcgcucgggaagcugcaggacguggucaaccagaacgcccaggcccugaacacgcucgugaagcagcuguccagcaacuucggcgccaucuccagcgugcugaacgacauccucucccgccuggacccgcccgaggccgaggugcagaucgaccggcugaucaccgggcgccuccagagccugcagaccuacgugacccagcagcugauccgggcggccgagauccgcgccagcgccaaccucgccgcgaucaagauguccgagugcguccugggccagagcaagcggguggacuucugcggcaagggguaccaccugauguccuucccccagagcgccccgcacggcguggucuuccuccacgugacguacguccccgcccaggagaagaacuucaccaccgcccccgcgaucugccacgacgggaaggcccacuucccccgcgagggcguguucguguccaacgggacccacugguucgucacgcagcggaacuucuacgagccgcagaucaucaccaccgacaacaccuucgugagcggcaacugcgacguggucaucggcaucgugaacaacacgguguacgacccccugcagcccgagcuggacuccuucaaggaggagcucgacaaguacuucaagaaccacaccagccccgacgucgaccugggggacaucuccggcaucaacgccagcguggugaacauccagaaggagaucgaccgccugaacgaggucgccaagaaccucaacgagucccugaucgaccugcaggagcucgggaaguacgagcaguacaucaaguggccgugguacaucuggcugggcuucaucgccggccugaucgcgaucgugauggugaccaucaugcucugcugcaugaccagcugcugcuccugccugaaggggugcugcagcugcggcuccugcugcaaguucgacgaggacgacagcgagcccguccugaagggggugaagcuccacuacacgugaggacuaguguccaccugucccuccugggcugcuggauugucucguuuuccugccaaauaaacaggaucagcgcuuuacagaucuaaaaaaaaaaaaaaaaaaaaaaaaaaaaaaaaaaaaaaaaaaaaaaaaaaaaaaaaaaaaaaaaaaaaaaaaaaaaaaaaaaaaaaaaaaaaaaaaaaaa

SEQ ID NO: 25294 - RNA, 4105 nt, Artificial Sequence
  SARS-CoV-2/Wuhan/WIV05/2019__EPI_ISL_402128 spike protein mRNA gc (1-1273)(K986P_V987P_K986P_V987P_S13I_W152C_L452R_D614G)
aggagacccgugacccggaaguuguacggcuacgcgacuuucccucccacaaacccucgcgcccuuccuuuccuacuugggcccggcagaaagcuuaccauguucguguuccugguccuccugccccuggugagcauccagugcgugaaccucaccacccgcacgcagcugccgcccgccuacaccaacagcuucacccggggcgucuacuaccccgacaagguguuccgcuccagcgugcugcacuccacccaggaccucuuccugcccuucuucagcaacgucacgugguuccacgccauccacguguccgggaccaacggcaccaagcgguucgacaacccggugcugcccuucaacgacggggucuacuucgcgagcaccgagaaguccaacaucauccgcggcuggaucuucgggacgacccucgacagcaagacccagucccugcugaucgugaacaacgccaccaacguggucaucaaggugugcgaguuccaguucugcaacgaccccuuccucggcguguacuaccacaagaacaacaagagcugcauggaguccgaguuccgggucuacagcuccgccaacaacugcacguucgaguacgugagccagcccuuccugauggaccuggagggcaagcaggggaacuucaagaaccuccgcgaguucguguucaagaacaucgacggcuacuucaagaucuacuccaagcacaccccgaucaaccugguccgggaccugccccagggguucagcgcccucgagccccugguggaccugcccaucggcaucaacaucacccgcuuccagacccuccuggcccugcaccgguccuaccucacgccgggggacagcagcuccggcuggaccgcgggcgccgccgccuacuacgugggguaccugcagccccgcaccuuccugcucaaguacaacgagaacggcaccaucacggacgcggucgacugcgcccuggacccccugagcgagaccaagugcacccucaaguccuucaccguggagaaggggaucuaccagacgagcaacuuccgggugcagcccaccgaguccaucguccgcuucccgaacaucaccaaccugugccccuucggcgagguguucaacgccacccgguucgccagcgucuacgccuggaaccgcaagcggaucuccaacugcguggcggacuacagcgugcuguacaacuccgccagcuucuccacguucaagugcuacggcgucagccccaccaagcucaacgaccugugcuucaccaacguguacgccgacuccuucgugauccgcggggacgagguccggcagaucgcccccggccagaccgggaagaucgccgacuacaacuacaagcugccggacgacuucacgggcugcgugaucgcguggaacagcaacaaccucgacuccaaggucgggggcaacuacaacuaccgcuaccgccuguuccgcaagagcaaccucaagcccuucgagcgggacaucuccaccgagaucuaccaggccggcagcacccccugcaacgggguggagggcuucaacugcuacuucccccugcaguccuacggguuccagccgaccaacggcgugggguaccagcccuaccggguggucgugcugagcuucgagcuccugcacgcccccgccacggugugcggccccaagaaguccaccaaccuggucaagaacaagugcgugaacuucaacuucaacggccucaccgggaccggcgugcugaccgagagcaacaagaaguuccugccguuccagcaguucgggcgcgacaucgccgacacgaccgacgcgguccgcgacccccagacccuggagauccucgacaucacccccugcagcuucggcgggguguccgugaucacgccgggcaccaacaccagcaaccaggucgccgugcuguaccagggcgugaacugcaccgagguccccguggccauccacgccgaccagcugacgcccaccuggcggguguacuccaccggcagcaacgucuuccagacccgcgccgggugccucaucggcgcggagcacgugaacaacuccuacgagugcgacauccccaucggggccggcaucugcgccagcuaccagacgcagaccaacuccccgcggcgcgcccggagcguggcgucccagagcaucaucgccuacaccaugucccugggcgccgagaacagcgucgccuacuccaacaacagcaucgccauccccaccaacuucacgaucuccgugaccaccgagauccugcccgugagcaugaccaagacgagcgucgacugcaccauguacaucugcggggacuccaccgagugcagcaaccuccugcugcaguacggcuccuucugcacccagcucaaccgcgcgcugacggggaucgccguggagcaggacaagaacacccaggagguguucgcccaggucaagcagaucuacaagacgcccccgaucaaggacuucggcggguucaacuucagccagauccugcccgaccccuccaagcccagcaagcgguccuucaucgaggaccuccuguucaacaaggugacccuggccgacgccggcuucaucaagcaguacggcgacugccucggggacaucgcggcccgcgaccugaucugcgcccagaaguucaacggccugaccgugcucccgccccugcugaccgacgagaugaucgcccaguacaccagcgcccuccuggcggggaccaucacguccggcuggaccuucggggccggcgccgcccugcagauccccuucgcgaugcagauggccuaccgguucaacggcaucggggucacccagaacgugcucuacgagaaccagaagcugaucgccaaccaguucaacagcgccaucggcaagauccaggacucccugagcuccaccgccagcgcgcucgggaagcugcaggacguggucaaccagaacgcccaggcccugaacacgcucgugaagcagcuguccagcaacuucggcgccaucuccagcgugcugaacgacauccucucccgccuggacccgcccgaggccgaggugcagaucgaccggcugaucaccgggcgccuccagagccugcagaccuacgugacccagcagcugauccgggcggccgagauccgcgccagcgccaaccucgccgcgaccaagauguccgagugcguccugggccagagcaagcggguggacuucugcggcaagggguaccaccugauguccuucccccagagcgccccgcacggcguggucuuccuccacgugacguacguccccgcccaggagaagaacuucaccaccgcccccgcgaucugccacgacgggaaggcccacuucccccgcgagggcguguucguguccaacgggacccacugguucgucacgcagcggaacuucuacgagccgcagaucaucaccaccgacaacaccuucgugagcggcaacugcgacguggucaucggcaucgugaacaacacgguguacgacccccugcagcccgagcuggacuccuucaaggaggagcucgacaaguacuucaagaaccacaccagccccgacgucgaccugggggacaucuccggcaucaacgccagcguggugaacauccagaaggagaucgaccgccugaacgaggucgccaagaaccucaacgagucccugaucgaccugcaggagcucgggaaguacgagcaguacaucaaguggccgugguacaucuggcugggcuucaucgccggccugaucgcgaucgugauggugaccaucaugcucugcugcaugaccagcugcugcuccugccugaaggggugcugcagcugcggcuccugcugcaaguucgacgaggacgacagcgagcccguccugaagggggugaagcuccacuacacgugaggacuaguguccaccugucccuccugggcugcuggauugucucguuuuccugccaaauaaacaggaucagcgcuuuacagaucuaaaaaaaaaaaaaaaaaaaaaaaaaaaaaaaaaaaaaaaaaaaaaaaaaaaaaaaaaaaaaaaaaaaaaaaaaaaaaaaaaaaaaaaaaaaaaaaaaaaa

SEQ ID NO: 25295 - RNA, 4105 nt, Artificial Sequence
  SARS-CoV-2/Wuhan/WIV05/2019__EPI_ISL_402128 spike protein mRNA gc (1-1273)(K986P_V987P)
aggagacccgugacccggaaguuguacggcuacgcgacuuucccucccacaaacccucgcgcccuuccuuuccuacuugggcccggcagaaagcuuaccauguucguguuccugguccuccugccccuggugagcucccagugcgugaaccucaccacccgcacgcagcugccgcccgccuacaccaacagcuucacccggggcgucuacuaccccgacaagguguuccgcuccagcgugcugcacuccacccaggaccucuuccugcccuucuucagcaacgucacgugguuccacgccauccacguguccgggaccaacggcaccaagcgguucgacaacccggugcugcccuucaacgacggggucuacuucgcgagcaccgagaaguccaacaucauccgcggcuggaucuucgggacgacccucgacagcaagacccagucccugcugaucgugaacaacgccaccaacguggucaucaaggugugcgaguuccaguucugcaacgaccccuuccucggcguguacuaccacaagaacaacaagagcuggauggaguccgaguuccgggucuacagcuccgccaacaacugcacguucgaguacgugagccagcccuuccugauggaccuggagggcaagcaggggaacuucaagaaccuccgcgaguucguguucaagaacaucgacggcuacuucaagaucuacuccaagcacaccccgaucaaccugguccgggaccugccccagggguucagcgcccucgagccccugguggaccugcccaucggcaucaacaucacccgcuuccagacccuccuggcccugcaccgguccuaccucacgccgggggacagcagcuccggcuggaccgcgggcgccgccgccuacuacgugggguaccugcagccccgcaccuuccugcucaaguacaacgagaacggcaccaucacggacgcggucgacugcgcccuggacccccugagcgagaccaagugcacccucaaguccuucaccguggagaaggggaucuaccagacgagcaacuuccgggugcagcccaccgaguccaucguccgcuucccgaacaucaccaaccugugccccuucggcgagguguucaacgccacccgguucgccagcgucuacgccuggaaccgcaagcggaucuccaacugcguggcggacuacagcgugcuguacaacuccgccagcuucuccacguucaagugcuacggcgucagccccaccaagcucaacgaccugugcuucaccaacguguacgccgacuccuucgugauccgcggggacgagguccggcagaucgcccccggccagaccgggaagaucgccgacuacaacuacaagcugccggacgacuucacgggcugcgugaucgcguggaacagcaacaaccucgacuccaaggucgggggcaacuacaacuaccuguaccgccuguuccgcaagagcaaccucaagcccuucgagcgggacaucuccaccgagaucuaccaggccggcagcacccccugcaacgggguggagggcuucaacugcuacuucccccugcaguccuacggguuccagccgaccaacggcgugggguaccagcccuaccggguggucgugcugagcuucgagcuccugcacgcccccgccacggugugcggccccaagaaguccaccaaccuggucaagaacaagugcgugaacuucaacuucaacggccucaccgggaccggcgugcugaccgagagcaacaagaaguuccugccguuccagcaguucgggcgcgacaucgccgacacgaccgacgcgguccgcgacccccagacccuggagauccucgacaucacccccugcagcuucggcgggguguccgugaucacgccgggcaccaacaccagcaaccaggucgccgugcuguaccaggacgugaacugcaccgagguccccguggccauccacgccgaccagcugacgcccaccuggcggguguacuccaccggcagcaacgucuuccagacccgcgccgggugccucaucggcgcggagcacgugaacaacuccuacgagugcgacauccccaucggggccggcaucugcgccagcuaccagacgcagaccaacuccccgcggcgcgcccggagcguggcgucccagagcaucaucgccuacaccaugucccugggcgccgagaacagcgucgccuacuccaacaacagcaucgccauccccaccaacuucacgaucuccgugaccaccgagauccugcccgugagcaugaccaagacgagcgucgacugcaccauguacaucugcggggacuccaccgagugcagcaaccuccugcugcaguacggcuccuucugcacccagcucaaccgcgcgcugacggggaucgccguggagcaggacaagaacacccaggagguguucgcccaggucaagcagaucuacaagacgcccccgaucaaggacuucggcggguucaacuucagccagauccugcccgaccccuccaagcccagcaagcgguccuucaucgaggaccuccuguucaacaaggugacccuggccgacgccggcuucaucaagcaguacggcgacugccucggggacaucgcggcccgcgaccugaucugcgcccagaaguucaacggccugaccgugcucccgccccugcugaccgacgagaugaucgcccaguacaccagcgcccuccuggcggggaccaucacguccggcuggaccuucggggccggcgccgcccugcagauccccuucgcgaugcagauggccuaccgguucaacggcaucggggucacccagaacgugcucuacgagaaccagaagcugaucgccaaccaguucaacagcgccaucggcaagauccaggacucccugagcuccaccgccagcgcgcucgggaagcugcaggacguggucaaccagaacgcccaggcccugaacacgcucgugaagcagcuguccagcaacuucggcgccaucuccagcgugcugaacgacauccucucccgccuggacccgcccgaggccgagguccagaucgaccggcugaucaccgggcgccuccagagccugcagaccuacgugacccagcagcugauccgggcggccgagauccgcgccagcgccaaccucgccgcgaccaagauguccgagugcgugcugggccagagcaagcgggucgacuucugcggcaagggguaccaccugauguccuucccccagagcgcgccccacggcgugguguuccuccacgucacguacgugcccgcccaggagaagaacuucaccaccgccccggccaucugccacgacgggaaggcccacuucccccgcgagggcgucuucguguccaacgggacccacugguucgugacgcagcggaacuucuacgagccccagaucaucaccaccgacaacaccuucgucagcggcaacugcgacguggugaucggcaucgucaacaacacgguguacgacccccugcagccggagcuggacuccuucaaggaggagcucgacaaguacuucaagaaccacaccagccccgacguggaccugggggacaucuccggcaucaacgccagcgucgugaacauccagaaggagaucgaccgccugaacgagguggccaagaaccucaacgagucccugaucgaccugcaggagcucgggaaguacgagcaguacaucaaguggcccugguacaucuggcugggcuucaucgccggccugaucgcgaucgucauggugaccaucaugcucugcugcaugaccagcugcugcuccugccugaaggggugcugcagcugcggcuccugcugcaaguucgacgaggacgacagcgagccggugcugaagggggucaagcuccacuacacgugaggacuaguguccaccugucccuccugggcugcuggauugucucguuuuccugccaaauaaacaggaucagcgcuuuacagaucuaaaaaaaaaaaaaaaaaaaaaaaaaaaaaaaaaaaaaaaaaaaaaaaaaaaaaaaaaaaaaaaaaaaaaaaaaaaaaaaaaaaaaaaaaaaaaaaaaaaa

SEQ ID NO: 25296 - RNA, 4105 nt, Artificial Sequence
  SARS-CoV-2/Wuhan/WIV05/2019__EPI_ISL_402128 spike protein mRNA gc (1-1273)(K986P_V987P_ D614G)
aggagacccgugacccggaaguuguacggcuacgcgacuuucccucccacaaacccucgcgcccuuccuuuccuacuugggcccggcagaaagcuuaccauguucguguuccugguccuccugccccuggugagcucccagugcgugaaccucaccacccgcacgcagcugccgcccgccuacaccaacagcuucacccggggcgucuacuaccccgacaagguguuccgcuccagcgugcugcacuccacccaggaccucuuccugcccuucuucagcaacgucacgugguuccacgccauccacguguccgggaccaacggcaccaagcgguucgacaacccggugcugcccuucaacgacggggucuacuucgcgagcaccgagaaguccaacaucauccgcggcuggaucuucgggacgacccucgacagcaagacccagucccugcugaucgugaacaacgccaccaacguggucaucaaggugugcgaguuccaguucugcaacgaccccuuccucggcguguacuaccacaagaacaacaagagcuggauggaguccgaguuccgggucuacagcuccgccaacaacugcacguucgaguacgugagccagcccuuccugauggaccuggagggcaagcaggggaacuucaagaaccuccgcgaguucguguucaagaacaucgacggcuacuucaagaucuacuccaagcacaccccgaucaaccugguccgggaccugccccagggguucagcgcccucgagccccugguggaccugcccaucggcaucaacaucacccgcuuccagacccuccuggcccugcaccgguccuaccucacgccgggggacagcagcuccggcuggaccgcgggcgccgccgccuacuacgugggguaccugcagccccgcaccuuccugcucaaguacaacgagaacggcaccaucacggacgcggucgacugcgcccuggacccccugagcgagaccaagugcacccucaaguccuucaccguggagaaggggaucuaccagacgagcaacuuccgggugcagcccaccgaguccaucguccgcuucccgaacaucaccaaccugugccccuucggcgagguguucaacgccacccgguucgccagcgucuacgccuggaaccgcaagcggaucuccaacugcguggcggacuacagcgugcuguacaacuccgccagcuucuccacguucaagugcuacggcgucagccccaccaagcucaacgaccugugcuucaccaacguguacgccgacuccuucgugauccgcggggacgagguccggcagaucgcccccggccagaccgggaagaucgccgacuacaacuacaagcugccggacgacuucacgggcugcgugaucgcguggaacagcaacaaccucgacuccaaggucgggggcaacuacaacuaccuguaccgccuguuccgcaagagcaaccucaagcccuucgagcgggacaucuccaccgagaucuaccaggccggcagcacccccugcaacgggguggagggcuucaacugcuacuucccccugcaguccuacggguuccagccgaccaacggcgugggguaccagcccuaccggguggucgugcugagcuucgagcuccugcacgcccccgccacggugugcggccccaagaaguccaccaaccuggucaagaacaagugcgugaacuucaacuucaacggccucaccgggaccggcgugcugaccgagagcaacaagaaguuccugccguuccagcaguucgggcgcgacaucgccgacacgaccgacgcgguccgcgacccccagacccuggagauccucgacaucacccccugcagcuucggcgggguguccgugaucacgccgggcaccaacaccagcaaccaggucgccgugcuguaccagggcgugaacugcaccgagguccccguggccauccacgccgaccagcugacgcccaccuggcggguguacuccaccgggagcaacgucuuccagacccgcgccggcugccucaucggggcggagcacgugaacaacuccuacgagugcgacauccccaucggcgccggcaucugcgccagcuaccagacgcagaccaacuccccgcggcgcgcccggagcguggcgucccagagcaucaucgccuacaccaugucccugggggccgagaacagcgucgccuacuccaacaacagcaucgccauccccaccaacuucacgaucuccgugaccaccgagauccugcccgugagcaugaccaagacgagcgucgacugcaccauguacaucugcggcgacuccaccgagugcagcaaccuccugcugcaguacggguccuucugcacccagcucaaccgcgcgcugacgggcaucgccguggagcaggacaagaacacccaggagguguucgcccaggucaagcagaucuacaagacgcccccgaucaaggacuucgggggcuucaacuucagccagauccugcccgaccccuccaagcccagcaagcgguccuucaucgaggaccuccuguucaacaaggugacccuggccgacgccggcuucaucaagcaguacggggacugccucggcgacaucgcggcccgcgaccugaucugcgcccagaaguucaacgggcugaccgugcucccgccccugcugaccgacgagaugaucgcccaguacaccagcgcccuccuggcgggcaccaucacguccggguggaccuucggcgccggcgccgcccugcagauccccuucgcgaugcagauggccuaccgguucaacgggaucggcgucacccagaacgugcucuacgagaaccagaagcugaucgccaaccaguucaacagcgccaucgggaagauccaggacucccugagcuccaccgccagcgcgcucggcaagcugcaggacguggucaaccagaacgcccaggcccugaacacgcucgugaagcagcuguccagcaacuucggggccaucuccagcgugcugaacgacauccucucccgccuggacccgcccgaggccgagguccagaucgaccggcugaucaccggccgccuccagagccugcagaccuacgugacccagcagcugauccgggcggccgagauccgcgccagcgccaaccucgccgcgaccaagauguccgagugcgugcugggccagagcaagcgggucgacuucugcgggaagggcuaccaccugauguccuucccccagagcgcgccccacggggugguguuccuccacgucacguacgugcccgcccaggagaagaacuucaccaccgccccggccaucugccacgacggcaaggcccacuucccccgcgagggggucuucguguccaacggcacccacugguucgugacgcagcggaacuucuacgagccccagaucaucaccaccgacaacaccuucgucagcggcaacugcgacguggugaucgggaucgucaacaacacgguguacgacccccugcagccggagcuggacuccuucaaggaggagcucgacaaguacuucaagaaccacaccagccccgacguggaccugggcgacaucuccgggaucaacgccagcgucgugaacauccagaaggagaucgaccgccugaacgagguggccaagaaccucaacgagucccugaucgaccugcaggagcucggcaaguacgagcaguacaucaaguggcccugguacaucuggcugggcuucaucgccgggcugaucgcgaucgucauggugaccaucaugcucugcugcaugaccagcugcugcuccugccugaagggcugcugcagcugcggguccugcugcaaguucgacgaggacgacagcgagccggugcugaagggcgucaagcuccacuacacgugaggacuaguguccaccugucccuccugggcugcuggauugucucguuuuccugccaaauaaacaggaucagcgcuuuacagaucuaaaaaaaaaaaaaaaaaaaaaaaaaaaaaaaaaaaaaaaaaaaaaaaaaaaaaaaaaaaaaaaaaaaaaaaaaaaaaaaaaaaaaaaaaaaaaaaaaaaa

SEQ ID NO: 25297 - RNA, 4105 nt, Artificial Sequence
  SARS-CoV-2/Wuhan/WIV05/2019__EPI_ISL_402128 spike protein mRNA gc (1-1273)(K986P_V987P_A222V_D614G)
aggagacccgugacccggaaguuguacggcuacgcgacuuucccucccacaaacccucgcgcccuuccuuuccuacuugggcccggcagaaagcuuaccauguucguguuccugguccuccugccccuggugagcucccagugcgugaaccucaccacccgcacgcagcugccgcccgccuacaccaacagcuucacccggggcgucuacuaccccgacaagguguuccgcuccagcgugcugcacuccacccaggaccucuuccugcccuucuucagcaacgucacgugguuccacgccauccacguguccgggaccaacggcaccaagcgguucgacaacccggugcugcccuucaacgacggggucuacuucgcgagcaccgagaaguccaacaucauccgcggcuggaucuucgggacgacccucgacagcaagacccagucccugcugaucgugaacaacgccaccaacguggucaucaaggugugcgaguuccaguucugcaacgaccccuuccucggcguguacuaccacaagaacaacaagagcuggauggaguccgaguuccgggucuacagcuccgccaacaacugcacguucgaguacgugagccagcccuuccugauggaccuggagggcaagcaggggaacuucaagaaccuccgcgaguucguguucaagaacaucgacggcuacuucaagaucuacuccaagcacaccccgaucaaccugguccgggaccugccccagggguucagcgugcucgagccccugguggaccugcccaucggcaucaacaucacccgcuuccagacccuccuggcccugcaccgguccuaccucacgccgggggacagcagcuccggcuggaccgccggcgcggccgccuacuacgucggguaccugcagccccgcaccuuccugcucaaguacaacgagaacggcaccaucacggacgccguggacugcgcgcuggacccccugagcgagaccaagugcacccucaaguccuucaccguggagaaggggaucuaccagacgagcaacuuccggguccagcccaccgaguccaucgugcgcuucccgaacaucaccaaccugugccccuucggcgaggucuucaacgccacccgguucgccagcguguacgccuggaaccgcaagcggaucuccaacugcguggccgacuacagcguccuguacaacuccgcgagcuucuccacguucaagugcuacggcgugagccccaccaagcucaacgaccugugcuucaccaacguguacgccgacuccuucgucauccgcggggacgaggugcggcagaucgcccccggccagaccgggaagaucgccgacuacaacuacaagcugccggacgacuucacgggcugcgugaucgccuggaacagcaacaaccucgacuccaaggucgggggcaacuacaacuaccuguaccgccuguuccgcaagagcaaccucaagcccuucgagcgggacaucuccaccgagaucuaccaggcgggcagcacccccugcaacgggguggagggcuucaacugcuacuucccccugcaguccuacggguuccagccgaccaacggcgugggguaccagcccuaccgggucguggugcugagcuucgagcuccugcacgcccccgccacggucugcggccccaagaaguccaccaaccuggugaagaacaagugcgugaacuucaacuucaacggccucaccgggaccggcguccugaccgagagcaacaagaaguuccugccguuccagcaguucgggcgcgacaucgccgacacgaccgacgccgugcgcgacccccagacccuggagauccucgacaucacccccugcagcuucggcgggguguccgucaucacgccgggcaccaacaccagcaaccagguggcggugcuguaccagggcgucaacugcaccgaggugcccguggccauccacgccgaccagcugacgcccaccuggcgggucuacuccaccgggagcaacguguuccagacccgcgccggcugccucaucggggccgagcacgugaacaacuccuacgagugcgacauccccaucggcgcgggcaucugcgccagcuaccagacgcagaccaacuccccgcggcgcgcccggagcgucgccucccagagcaucaucgcguacaccaugucccugggggccgagaacagcguggccuacuccaacaacagcaucgccauccccaccaacuucacgaucuccgugaccaccgagauccugcccgucagcaugaccaagacgagcguggacugcaccauguacaucugcggcgacuccaccgagugcagcaaccuccugcugcaguacggguccuucugcacccagcucaaccgcgcccugacgggcaucgcgguggagcaggacaagaacacccaggaggucuucgcccaggugaagcagaucuacaagacgcccccgaucaaggacuucgggggcuucaacuucagccagauccugcccgaccccuccaagcccagcaagcgguccuucaucgaggaccuccuguucaacaaggugacccuggccgacgccggcuucaucaagcaguacggggacugccucggcgacaucgccgcgcgcgaccugaucugcgcccagaaguucaacgggcugaccguccucccgccccugcugaccgacgagaugaucgcccaguacaccagcgcccuccuggccggcaccaucacguccggguggaccuucggcgcgggcgccgcccugcagauccccuucgccaugcagauggcguaccgguucaacgggaucggcgugacccagaacgugcucuacgagaaccagaagcugaucgccaaccaguucaacagcgccaucgggaagauccaggacucccugagcuccaccgccagcgcccucggcaagcugcaggacgucgugaaccagaacgcgcaggcccugaacacgcucgugaagcagcuguccagcaacuucggggccaucuccagcguccugaacgacauccucucccgccuggacccgcccgaggccgaggugcagaucgaccggcugaucaccggccgccuccagagccugcagaccuacgugacccagcagcugauccgggccgcggagauccgcgccagcgccaaccucgccgccaccaagauguccgagugcguccugggccagagcaagcggguggacuucugcgggaagggcuaccaccugauguccuucccccagagcgcgccccacgggguggucuuccuccacgugacguacguccccgcccaggagaagaacuucaccaccgccccggccaucugccacgacggcaaggcgcacuucccccgcgaggggguguucguguccaacggcacccacugguucgucacgcagcggaacuucuacgagccccagaucaucaccaccgacaacaccuucgugagcggcaacugcgacguggucaucgggaucgugaacaacacgguguacgacccccugcagccggagcuggacuccuucaaggaggagcucgacaaguacuucaagaaccacaccagccccgacgucgaccugggcgacaucuccgggaucaacgccagcguggugaacauccagaaggagaucgaccgccugaacgaggucgccaagaaccucaacgagucccugaucgaccugcaggagcucggcaaguacgagcaguacaucaaguggcccugguacaucuggcugggcuucaucgccgggcugaucgccaucgugauggugaccaucaugcucugcugcaugaccagcugcugcuccugccugaagggcugcugcagcugcggguccugcugcaaguucgacgaggacgacagcgagccgguccugaagggcgugaagcuccacuacacgugaggacuaguguccaccugucccuccugggcugcuggauugucucguuuuccugccaaauaaacaggaucagcgcuuuacagaucuaaaaaaaaaaaaaaaaaaaaaaaaaaaaaaaaaaaaaaaaaaaaaaaaaaaaaaaaaaaaaaaaaaaaaaaaaaaaaaaaaaaaaaaaaaaaaaaaaaaa

SEQ ID NO: 25298 - RNA, 4105 nt, Artificial Sequence
  SARS-CoV-2/Wuhan/WIV05/2019__EPI_ISL_402128 spike protein mRNA gc (1-1273)(K986P_V987P_N439K_D614G)
aggagacccgugacccggaaguuguacggcuacgcgacuuucccucccacaaacccucgcgcccuuccuuuccuacuugggcccggcagaaagcuuaccauguucguguuccugguccuccugccccuggugagcucccagugcgugaaccucaccacccgcacgcagcugccgcccgccuacaccaacagcuucacccggggcgucuacuaccccgacaagguguuccgcuccagcgugcugcacuccacccaggaccucuuccugcccuucuucagcaacgucacgugguuccacgccauccacguguccgggaccaacggcaccaagcgguucgacaacccggugcugcccuucaacgacggggucuacuucgcgagcaccgagaaguccaacaucauccgcggcuggaucuucgggacgacccucgacagcaagacccagucccugcugaucgugaacaacgccaccaacguggucaucaaggugugcgaguuccaguucugcaacgaccccuuccucggcguguacuaccacaagaacaacaagagcuggauggaguccgaguuccgggucuacagcuccgccaacaacugcacguucgaguacgugagccagcccuuccugauggaccuggagggcaagcaggggaacuucaagaaccuccgcgaguucguguucaagaacaucgacggcuacuucaagaucuacuccaagcacaccccgaucaaccugguccgggaccugccccagggguucagcgcccucgagccccugguggaccugcccaucggcaucaacaucacccgcuuccagacccuccuggcccugcaccgguccuaccucacgccgggggacagcagcuccggcuggaccgcgggcgccgccgccuacuacgugggguaccugcagccccgcaccuuccugcucaaguacaacgagaacggcaccaucacggacgcggucgacugcgcccuggacccccugagcgagaccaagugcacccucaaguccuucaccguggagaaggggaucuaccagacgagcaacuuccgggugcagcccaccgaguccaucguccgcuucccgaacaucaccaaccugugccccuucggcgagguguucaacgccacccgguucgccagcgucuacgccuggaaccgcaagcggaucuccaacugcguggcggacuacagcgugcuguacaacuccgccagcuucuccacguucaagugcuacggcgucagccccaccaagcucaacgaccugugcuucaccaacguguacgccgacuccuucgugauccgcggggacgagguccggcagaucgcccccggccagaccgggaagaucgccgacuacaacuacaagcugccggacgacuucacgggcugcgugaucgcguggaacagcaagaaccucgacuccaaggucgggggcaacuacaacuaccuguaccgccuguuccgcaagagcaaccucaagcccuucgagcgggacaucuccaccgagaucuaccaggccggcagcacccccugcaacgggguggagggcuucaacugcuacuucccccugcaguccuacggguuccagccgaccaacggcgugggguaccagcccuaccggguggucgugcugagcuucgagcuccugcacgcccccgccacggugugcggccccaagaaguccaccaaccuggucaagaacaagugcgugaacuucaacuucaacggccucaccgggaccggcgugcugaccgagagcaacaagaaguuccugccguuccagcaguucgggcgcgacaucgccgacacgaccgacgcgguccgcgacccccagacccuggagauccucgacaucacccccugcagcuucggcgggguguccgugaucacgccgggcaccaacaccagcaaccaggucgccgugcuguaccagggcgugaacugcaccgagguccccguggccauccacgccgaccagcugacgcccaccuggcggguguacuccaccgggagcaacgucuuccagacccgcgccggcugccucaucggggcggagcacgugaacaacuccuacgagugcgacauccccaucggcgccggcaucugcgccagcuaccagacgcagaccaacuccccgcggcgcgcccggagcguggcgucccagagcaucaucgccuacaccaugucccugggggccgagaacagcgucgccuacuccaacaacagcaucgccauccccaccaacuucacgaucuccgugaccaccgagauccugcccgugagcaugaccaagacgagcgucgacugcaccauguacaucugcggcgacuccaccgagugcagcaaccuccugcugcaguacggguccuucugcacccagcucaaccgcgcgcugacgggcaucgccguggagcaggacaagaacacccaggagguguucgcccaggucaagcagaucuacaagacgcccccgaucaaggacuucgggggcuucaacuucagccagauccugcccgaccccuccaagcccagcaagcgguccuucaucgaggaccuccuguucaacaaggugacccuggccgacgccggcuucaucaagcaguacggggacugccucggcgacaucgcggcccgcgaccugaucugcgcccagaaguucaacgggcugaccgugcucccgccccugcugaccgacgagaugaucgcccaguacaccagcgcccuccuggcgggcaccaucacguccggguggaccuucggcgccggcgccgcccugcagauccccuucgcgaugcagauggccuaccgguucaacgggaucggcgucacccagaacgugcucuacgagaaccagaagcugaucgccaaccaguucaacagcgccaucgggaagauccaggacucccugagcuccaccgccagcgcgcucggcaagcugcaggacguggucaaccagaacgcccaggcccugaacacgcucgugaagcagcuguccagcaacuucggggccaucuccagcgugcugaacgacauccucucccgccuggacccgcccgaggccgagguccagaucgaccggcugaucaccggccgccuccagagccugcagaccuacgugacccagcagcugauccgggcggccgagauccgcgccagcgccaaccucgccgcgaccaagauguccgagugcgugcugggccagagcaagcgggucgacuucugcgggaagggcuaccaccugauguccuucccccagagcgcgccccacggggugguguuccuccacgucacguacgugcccgcccaggagaagaacuucaccaccgccccggccaucugccacgacggcaaggcccacuucccccgcgagggggucuucguguccaacggcacccacugguucgugacgcagcggaacuucuacgagccccagaucaucaccaccgacaacaccuucgucagcggcaacugcgacguggugaucgggaucgucaacaacacgguguacgacccccugcagccggagcuggacuccuucaaggaggagcucgacaaguacuucaagaaccacaccagccccgacguggaccugggcgacaucuccgggaucaacgccagcgucgugaacauccagaaggagaucgaccgccugaacgagguggccaagaaccucaacgagucccugaucgaccugcaggagcucggcaaguacgagcaguacaucaaguggcccugguacaucuggcugggcuucaucgccgggcugaucgcgaucgucauggugaccaucaugcucugcugcaugaccagcugcugcuccugccugaagggcugcugcagcugcggguccugcugcaaguucgacgaggacgacagcgagccggugcugaagggcgucaagcuccacuacacgugaggacuaguguccaccugucccuccugggcugcuggauugucucguuuuccugccaaauaaacaggaucagcgcuuuacagaucuaaaaaaaaaaaaaaaaaaaaaaaaaaaaaaaaaaaaaaaaaaaaaaaaaaaaaaaaaaaaaaaaaaaaaaaaaaaaaaaaaaaaaaaaaaaaaaaaaaaa

SEQ ID NO: 25299 - RNA, 4105 nt, Artificial Sequence
  SARS-CoV-2/Wuhan/WIV05/2019__EPI_ISL_402128 spike protein mRNA gc (1-1273)(K986P_V987P_S477N_D614G)
aggagacccgugacccggaaguuguacggcuacgcgacuuucccucccacaaacccucgcgcccuuccuuuccuacuugggcccggcagaaagcuuaccauguucguguuccugguccuccugccccuggugagcucccagugcgugaaccucaccacccgcacgcagcugccgcccgccuacaccaacagcuucacccggggcgucuacuaccccgacaagguguuccgcuccagcgugcugcacuccacccaggaccucuuccugcccuucuucagcaacgucacgugguuccacgccauccacguguccgggaccaacggcaccaagcgguucgacaacccggugcugcccuucaacgacggggucuacuucgcgagcaccgagaaguccaacaucauccgcggcuggaucuucgggacgacccucgacagcaagacccagucccugcugaucgugaacaacgccaccaacguggucaucaaggugugcgaguuccaguucugcaacgaccccuuccucggcguguacuaccacaagaacaacaagagcuggauggaguccgaguuccgggucuacagcuccgccaacaacugcacguucgaguacgugagccagcccuuccugauggaccuggagggcaagcaggggaacuucaagaaccuccgcgaguucguguucaagaacaucgacggcuacuucaagaucuacuccaagcacaccccgaucaaccugguccgggaccugccccagggguucagcgcccucgagccccugguggaccugcccaucggcaucaacaucacccgcuuccagacccuccuggcccugcaccgguccuaccucacgccgggggacagcagcuccggcuggaccgcgggcgccgccgccuacuacgugggguaccugcagccccgcaccuuccugcucaaguacaacgagaacggcaccaucacggacgcggucgacugcgcccuggacccccugagcgagaccaagugcacccucaaguccuucaccguggagaaggggaucuaccagacgagcaacuuccgggugcagcccaccgaguccaucguccgcuucccgaacaucaccaaccugugccccuucggcgagguguucaacgccacccgguucgccagcgucuacgccuggaaccgcaagcggaucuccaacugcguggcggacuacagcgugcuguacaacuccgccagcuucuccacguucaagugcuacggcgucagccccaccaagcucaacgaccugugcuucaccaacguguacgccgacuccuucgugauccgcggggacgagguccggcagaucgcccccggccagaccgggaagaucgccgacuacaacuacaagcugccggacgacuucacgggcugcgugaucgcguggaacagcaacaaccucgacuccaaggucgggggcaacuacaacuaccuguaccgccuguuccgcaagagcaaccucaagcccuucgagcgggacaucuccaccgagaucuaccaggccggcaacacccccugcaacgggguggagggcuucaacugcuacuucccccugcagagcuacggguuccagccgaccaacggcgugggguaccagcccuaccggguggucgugcuguccuucgagcuccugcacgcccccgccacggugugcggccccaagaaguccaccaaccuggucaagaacaagugcgugaacuucaacuucaacggccucaccgggaccggcgugcugaccgagagcaacaagaaguuccugccguuccagcaguucgggcgcgacaucgccgacacgaccgacgcgguccgcgacccccagacccuggagauccucgacaucacccccugcagcuucggcggggugagcgugaucacgccgggcaccaacaccuccaaccaggucgccgugcuguaccagggcgugaacugcaccgagguccccguggccauccacgccgaccagcugacgcccaccuggcggguguacagcaccggguccaacgucuuccagacccgcgccggcugccucaucggggcggagcacgugaacaacagcuacgagugcgacauccccaucggcgccggcaucugcgccuccuaccagacgcagaccaacagcccgcggcgcgcccgguccguggcgagccaguccaucaucgccuacaccaugagccugggggccgagaacuccgucgccuacagcaacaacuccaucgccauccccaccaacuucacgaucagcgugaccaccgagauccugcccguguccaugaccaagacgagcgucgacugcaccauguacaucugcggcgacagcaccgagugcuccaaccuccugcugcaguacgggagcuucugcacccagcucaaccgcgcgcugacgggcaucgccguggagcaggacaagaacacccaggagguguucgcccaggucaagcagaucuacaagacgcccccgaucaaggacuucgggggcuucaacuucucccagauccugcccgaccccagcaagcccuccaagcggagcuucaucgaggaccuccuguucaacaaggugacccuggccgacgccggcuucaucaagcaguacggggacugccucggcgacaucgcggcccgcgaccugaucugcgcccagaaguucaacgggcugaccgugcucccgccccugcugaccgacgagaugaucgcccaguacaccuccgcccuccuggcgggcaccaucacgagcggguggaccuucggcgccggcgccgcccugcagauccccuucgcgaugcagauggccuaccgguucaacgggaucggcgucacccagaacgugcucuacgagaaccagaagcugaucgccaaccaguucaacuccgccaucgggaagauccaggacagccuguccagcaccgccuccgcgcucggcaagcugcaggacguggucaaccagaacgcccaggcccugaacacgcucgugaagcagcugagcuccaacuucggggccaucagcuccgugcugaacgacauccucagccgccuggacccgcccgaggccgagguccagaucgaccggcugaucaccggccgccuccagucccugcagaccuacgugacccagcagcugauccgggcggccgagauccgcgccagcgccaaccucgccgcgaccaagaugagcgagugcgugcugggccaguccaagcgggucgacuucugcgggaagggcuaccaccugaugagcuucccccaguccgcgccccacggggugguguuccuccacgucacguacgugcccgcccaggagaagaacuucaccaccgccccggccaucugccacgacggcaaggcccacuucccccgcgagggggucuucgugagcaacggcacccacugguucgugacgcagcggaacuucuacgagccccagaucaucaccaccgacaacaccuucgucuccggcaacugcgacguggugaucgggaucgucaacaacacgguguacgacccccugcagccggagcuggacagcuucaaggaggagcucgacaaguacuucaagaaccacaccucccccgacguggaccugggcgacaucagcgggaucaacgccuccgucgugaacauccagaaggagaucgaccgccugaacgagguggccaagaaccucaacgagagccugaucgaccugcaggagcucggcaaguacgagcaguacaucaaguggcccugguacaucuggcugggcuucaucgccgggcugaucgcgaucgucauggugaccaucaugcucugcugcaugaccuccugcugcagcugccugaagggcugcugcuccugcgggagcugcugcaaguucgacgaggacgacuccgagccggugcugaagggcgucaagcuccacuacacgugaggacuaguguccaccugucccuccugggcugcuggauugucucguuuuccugccaaauaaacaggaucagcgcuuuacagaucuaaaaaaaaaaaaaaaaaaaaaaaaaaaaaaaaaaaaaaaaaaaaaaaaaaaaaaaaaaaaaaaaaaaaaaaaaaaaaaaaaaaaaaaaaaaaaaaaaaaa

SEQ ID NO: 25300 - RNA, 4105 nt, Artificial Sequence
  SARS-CoV-2/Wuhan/WIV05/2019__EPI_ISL_402128 spike protein mRNA gc (1-1273)(K986P_V987P_N501Y_D614G)
aggagacccgugacccggaaguuguacggcuacgcgacuuucccucccacaaacccucgcgcccuuccuuuccuacuugggcccggcagaaagcuuaccauguucguguuccugguccuccugccccuggugagcucccagugcgugaaccucaccacccgcacgcagcugccgcccgccuacaccaacagcuucacccggggcgucuacuaccccgacaagguguuccgcuccagcgugcugcacuccacccaggaccucuuccugcccuucuucagcaacgucacgugguuccacgccauccacguguccgggaccaacggcaccaagcgguucgacaacccggugcugcccuucaacgacggggucuacuucgcgagcaccgagaaguccaacaucauccgcggcuggaucuucgggacgacccucgacagcaagacccagucccugcugaucgugaacaacgccaccaacguggucaucaaggugugcgaguuccaguucugcaacgaccccuuccucggcguguacuaccacaagaacaacaagagcuggauggaguccgaguuccgggucuacagcuccgccaacaacugcacguucgaguacgugagccagcccuuccugauggaccuggagggcaagcaggggaacuucaagaaccuccgcgaguucguguucaagaacaucgacggcuacuucaagaucuacuccaagcacaccccgaucaaccugguccgggaccugccccagggguucagcgcccucgagccccugguggaccugcccaucggcaucaacaucacccgcuuccagacccuccuggcccugcaccgguccuaccucacgccgggggacagcagcuccggcuggaccgcgggcgccgccgccuacuacgugggguaccugcagccccgcaccuuccugcucaaguacaacgagaacggcaccaucacggacgcggucgacugcgcccuggacccccugagcgagaccaagugcacccucaaguccuucaccguggagaaggggaucuaccagacgagcaacuuccgggugcagcccaccgaguccaucguccgcuucccgaacaucaccaaccugugccccuucggcgagguguucaacgccacccgguucgccagcgucuacgccuggaaccgcaagcggaucuccaacugcguggcggacuacagcgugcuguacaacuccgccagcuucuccacguucaagugcuacggcgucagccccaccaagcucaacgaccugugcuucaccaacguguacgccgacuccuucgugauccgcggggacgagguccggcagaucgcccccggccagaccgggaagaucgccgacuacaacuacaagcugccggacgacuucacgggcugcgugaucgcguggaacagcaacaaccucgacuccaaggucgggggcaacuacaacuaccuguaccgccuguuccgcaagagcaaccucaagcccuucgagcgggacaucuccaccgagaucuaccaggccggcagcacccccugcaacgggguggagggcuucaacugcuacuucccccugcaguccuacggguuccagccgaccuacggcgugggguaccagcccuaccggguggucgugcugagcuucgagcuccugcacgcccccgccacggugugcggccccaagaaguccaccaaccuggucaagaacaagugcgugaacuucaacuucaacggccucaccgggaccggcgugcugaccgagagcaacaagaaguuccugccguuccagcaguucgggcgcgacaucgccgacacgaccgacgcgguccgcgacccccagacccuggagauccucgacaucacccccugcagcuucggcgggguguccgugaucacgccgggcaccaacaccagcaaccaggucgccgugcuguaccagggcgugaacugcaccgagguccccguggccauccacgccgaccagcugacgcccaccuggcggguguacuccaccgggagcaacgucuuccagacccgcgccggcugccucaucggggcggagcacgugaacaacuccuacgagugcgacauccccaucggcgccggcaucugcgccagcuaccagacgcagaccaacuccccgcggcgcgcccggagcguggcgucccagagcaucaucgccuacaccaugucccugggggccgagaacagcgucgccuacuccaacaacagcaucgccauccccaccaacuucacgaucuccgugaccaccgagauccugcccgugagcaugaccaagacgagcgucgacugcaccauguacaucugcggcgacuccaccgagugcagcaaccuccugcugcaguacggguccuucugcacccagcucaaccgcgcgcugacgggcaucgccguggagcaggacaagaacacccaggagguguucgcccaggucaagcagaucuacaagacgcccccgaucaaggacuucgggggcuucaacuucagccagauccugcccgaccccuccaagcccagcaagcgguccuucaucgaggaccuccuguucaacaaggugacccuggccgacgccggcuucaucaagcaguacggggacugccucggcgacaucgcggcccgcgaccugaucugcgcccagaaguucaacgggcugaccgugcucccgccccugcugaccgacgagaugaucgcccaguacaccagcgcccuccuggcgggcaccaucacguccggguggaccuucggcgccggcgccgcccugcagauccccuucgcgaugcagauggccuaccgguucaacgggaucggcgucacccagaacgugcucuacgagaaccagaagcugaucgccaaccaguucaacagcgccaucgggaagauccaggacucccugagcuccaccgccagcgcgcucggcaagcugcaggacguggucaaccagaacgcccaggcccugaacacgcucgugaagcagcuguccagcaacuucggggccaucuccagcgugcugaacgacauccucucccgccuggacccgcccgaggccgagguccagaucgaccggcugaucaccggccgccuccagagccugcagaccuacgugacccagcagcugauccgggcggccgagauccgcgccagcgccaaccucgccgcgaccaagauguccgagugcgugcugggccagagcaagcgggucgacuucugcgggaagggcuaccaccugauguccuucccccagagcgcgccccacggggugguguuccuccacgucacguacgugcccgcccaggagaagaacuucaccaccgccccggccaucugccacgacggcaaggcccacuucccccgcgagggggucuucguguccaacggcacccacugguucgugacgcagcggaacuucuacgagccccagaucaucaccaccgacaacaccuucgucagcggcaacugcgacguggugaucgggaucgucaacaacacgguguacgacccccugcagccggagcuggacuccuucaaggaggagcucgacaaguacuucaagaaccacaccagccccgacguggaccugggcgacaucuccgggaucaacgccagcgucgugaacauccagaaggagaucgaccgccugaacgagguggccaagaaccucaacgagucccugaucgaccugcaggagcucggcaaguacgagcaguacaucaaguggcccugguacaucuggcugggcuucaucgccgggcugaucgcgaucgucauggugaccaucaugcucugcugcaugaccagcugcugcuccugccugaagggcugcugcagcugcggguccugcugcaaguucgacgaggacgacagcgagccggugcugaagggcgucaagcuccacuacacgugaggacuaguguccaccugucccuccugggcugcuggauugucucguuuuccugccaaauaaacaggaucagcgcuuuacagaucuaaaaaaaaaaaaaaaaaaaaaaaaaaaaaaaaaaaaaaaaaaaaaaaaaaaaaaaaaaaaaaaaaaaaaaaaaaaaaaaaaaaaaaaaaaaaaaaaaaaa

SEQ ID NO: 25301 - RNA, 4099 nt, Artificial Sequence
  SARS-CoV-2/Wuhan/WIV05/2019__EPI_ISL_402128 spike protein mRNA gc (1-1273)(K986P_V987P_H69del_V70del_D614G)
aggagacccgugacccggaaguuguacggcuacgcgacuuucccucccacaaacccucgcgcccuuccuuuccuacuugggcccggcagaaagcuuaccauguucguguuccugguccuccugccccuggugagcucccagugcgugaaccucaccacccgcacgcagcugccgcccgccuacaccaacagcuucacccggggcgucuacuaccccgacaagguguuccgcuccagcgugcugcacuccacccaggaccucuuccugcccuucuucagcaacgucacgugguuccacgccaucuccgggaccaacggcaccaagcgguucgacaacccggugcugcccuucaacgacgggguguacuucgcgagcaccgagaaguccaacaucauccgcggcuggaucuucgggacgacccucgacagcaagacccagucccugcugaucgucaacaacgccaccaacguggugaucaaggucugcgaguuccaguucugcaacgaccccuuccucggcguguacuaccacaagaacaacaagagcuggauggaguccgaguuccggguguacagcuccgccaacaacugcacguucgaguacgucagccagcccuuccugauggaccuggagggcaagcaggggaacuucaagaaccuccgcgaguucguguucaagaacaucgacggcuacuucaagaucuacuccaagcacaccccgaucaaccuggugcgggaccugccccagggguucagcgcccucgagccccuggucgaccugcccaucggcaucaacaucacccgcuuccagacccuccuggcccugcaccgguccuaccucacgccgggggacagcagcuccggcuggaccgcgggcgccgccgccuacuacgugggguaccugcagccccgcaccuuccugcucaaguacaacgagaacggcaccaucacggacgcgguggacugcgcccuggacccccugagcgagaccaagugcacccucaaguccuucaccgucgagaaggggaucuaccagacgagcaacuuccgggugcagcccaccgaguccaucgugcgcuucccgaacaucaccaaccugugccccuucggcgaggucuucaacgccacccgguucgccagcguguacgccuggaaccgcaagcggaucuccaacugcgucgcggacuacagcgugcuguacaacuccgccagcuucuccacguucaagugcuacggcgugagccccaccaagcucaacgaccugugcuucaccaacgucuacgccgacuccuucgugauccgcggggacgaggugcggcagaucgcccccggccagaccgggaagaucgccgacuacaacuacaagcugccggacgacuucacgggcugcgucaucgcguggaacagcaacaaccucgacuccaaggucgggggcaacuacaacuaccuguaccgccuguuccgcaagagcaaccucaagcccuucgagcgggacaucuccaccgagaucuaccaggccggcagcacccccugcaacgggguggagggcuucaacugcuacuucccccugcaguccuacggguuccagccgaccaacggcgugggguaccagcccuaccggguggugguccugagcuucgagcuccugcacgcccccgccacggugugcggccccaagaaguccaccaaccuggugaagaacaagugcgucaacuucaacuucaacggccucaccgggaccggcgugcugaccgagagcaacaagaaguuccugccguuccagcaguucgggcgcgacaucgccgacacgaccgacgcggugcgcgacccccagacccuggagauccucgacaucacccccugcagcuucggcggggucuccgugaucacgccgggcaccaacaccagcaaccagguggccguccuguaccagggcgugaacugcaccgaggugcccgucgccauccacgccgaccagcugacgcccaccuggcggguguacuccaccgggagcaacguguuccagacccgcgccggcugccucaucggggcggagcacgucaacaacuccuacgagugcgacauccccaucggcgccggcaucugcgccagcuaccagacgcagaccaacuccccgcggcgcgcccggagcguggcgucccagagcaucaucgccuacaccaugucccugggggccgagaacagcguggccuacuccaacaacagcaucgccauccccaccaacuucacgaucuccgucaccaccgagauccugcccgugagcaugaccaagacgagcguggacugcaccauguacaucugcggcgacuccaccgagugcagcaaccuccugcugcaguacggguccuucugcacccagcucaaccgcgcgcugacgggcaucgccgucgagcaggacaagaacacccaggagguguucgcccaggugaagcagaucuacaagacgcccccgaucaaggacuucgggggcuucaacuucagccagauccugcccgaccccuccaagcccagcaagcgguccuucaucgaggaccuccuguucaacaaggucacccuggccgacgccggcuucaucaagcaguacggggacugccucggcgacaucgcggcccgcgaccugaucugcgcccagaaguucaacgggcugaccgugcucccgccccugcugaccgacgagaugaucgcccaguacaccagcgcccuccuggcgggcaccaucacguccggguggaccuucggcgccggcgccgcccugcagauccccuucgcgaugcagauggccuaccgguucaacgggaucggcgugacccagaacguccucuacgagaaccagaagcugaucgccaaccaguucaacagcgccaucgggaagauccaggacucccugagcuccaccgccagcgcgcucggcaagcugcaggacguggugaaccagaacgcccaggcccugaacacgcucgucaagcagcuguccagcaacuucggggccaucuccagcgugcugaacgacauccucucccgccuggacccgcccgaggccgaggugcagaucgaccggcugaucaccggccgccuccagagccugcagaccuacgucacccagcagcugauccgggcggccgagauccgcgccagcgccaaccucgccgcgaccaagauguccgagugcgugcugggccagagcaagcggguggacuucugcgggaagggcuaccaccugauguccuucccccagagcgcgccccacggggucguguuccuccacgugacguacguccccgcccaggagaagaacuucaccaccgccccggccaucugccacgacggcaaggcccacuucccccgcgaggggguguucgucuccaacggcacccacugguucgugacgcagcggaacuucuacgagccccagaucaucaccaccgacaacaccuucgugagcggcaacugcgacgucgugaucgggaucgugaacaacacggucuacgacccccugcagccggagcuggacuccuucaaggaggagcucgacaaguacuucaagaaccacaccagccccgacguggaccugggcgacaucuccgggaucaacgccagcguggucaacauccagaaggagaucgaccgccugaacgagguggccaagaaccucaacgagucccugaucgaccugcaggagcucggcaaguacgagcaguacaucaaguggcccugguacaucuggcugggcuucaucgccgggcugaucgcgaucgugauggucaccaucaugcucugcugcaugaccagcugcugcuccugccugaagggcugcugcagcugcggguccugcugcaaguucgacgaggacgacagcgagccggugcugaagggcgugaagcuccacuacacgugaggacuaguguccaccugucccuccugggcugcuggauugucucguuuuccugccaaauaaacaggaucagcgcuuuacagaucuaaaaaaaaaaaaaaaaaaaaaaaaaaaaaaaaaaaaaaaaaaaaaaaaaaaaaaaaaaaaaaaaaaaaaaaaaaaaaaaaaaaaaaaaaaaaaaaaaaaa

SEQ ID NO: 25302 - RNA, 4105 nt, Artificial Sequence
  SARS-CoV-2/Wuhan/WIV05/2019__EPI_ISL_402128 spike protein mRNA gc (1-1273)(K986P_V987P_Y453F_D614G)
aggagacccgugacccggaaguuguacggcuacgcgacuuucccucccacaaacccucgcgcccuuccuuuccuacuugggcccggcagaaagcuuaccauguucguguuccugguccuccugccccuggugagcucccagugcgugaaccucaccacccgcacgcagcugccgcccgccuacaccaacagcuucacccggggcgucuacuaccccgacaagguguuccgcuccagcgugcugcacuccacccaggaccucuuccugcccuucuucagcaacgucacgugguuccacgccauccacguguccgggaccaacggcaccaagcgguucgacaacccggugcugcccuucaacgacggggucuacuucgcgagcaccgagaaguccaacaucauccgcggcuggaucuucgggacgacccucgacagcaagacccagucccugcugaucgugaacaacgccaccaacguggucaucaaggugugcgaguuccaguucugcaacgaccccuuccucggcguguacuaccacaagaacaacaagagcuggauggaguccgaguuccgggucuacagcuccgccaacaacugcacguucgaguacgugagccagcccuuccugauggaccuggagggcaagcaggggaacuucaagaaccuccgcgaguucguguucaagaacaucgacggcuacuucaagaucuacuccaagcacaccccgaucaaccugguccgggaccugccccagggguucagcgcccucgagccccugguggaccugcccaucggcaucaacaucacccgcuuccagacccuccuggcccugcaccgguccuaccucacgccgggggacagcagcuccggcuggaccgcgggcgccgccgccuacuacgugggguaccugcagccccgcaccuuccugcucaaguacaacgagaacggcaccaucacggacgcggucgacugcgcccuggacccccugagcgagaccaagugcacccucaaguccuucaccguggagaaggggaucuaccagacgagcaacuuccgggugcagcccaccgaguccaucguccgcuucccgaacaucaccaaccugugccccuucggcgagguguucaacgccacccgguucgccagcgucuacgccuggaaccgcaagcggaucuccaacugcguggcggacuacagcgugcuguacaacuccgccagcuucuccacguucaagugcuacggcgucagccccaccaagcucaacgaccugugcuucaccaacguguacgccgacuccuucgugauccgcggggacgagguccggcagaucgcccccggccagaccgggaagaucgccgacuacaacuacaagcugccggacgacuucacgggcugcgugaucgcguggaacagcaacaaccucgacuccaaggucgggggcaacuacaacuaccuguuccgccuguuccgcaagagcaaccucaagcccuucgagcgggacaucuccaccgagaucuaccaggccggcagcacccccugcaacgggguggagggcuucaacugcuacuucccccugcaguccuacggguuccagccgaccaacggcgugggguaccagcccuaccggguggucgugcugagcuucgagcuccugcacgcccccgccacggugugcggccccaagaaguccaccaaccuggucaagaacaagugcgugaacuucaacuucaacggccucaccgggaccggcgugcugaccgagagcaacaagaaguuccugccguuccagcaguucgggcgcgacaucgccgacacgaccgacgcgguccgcgacccccagacccuggagauccucgacaucacccccugcagcuucggcgggguguccgugaucacgccgggcaccaacaccagcaaccaggucgccgugcuguaccagggcgugaacugcaccgagguccccguggccauccacgccgaccagcugacgcccaccuggcggguguacuccaccgggagcaacgucuuccagacccgcgccggcugccucaucggggcggagcacgugaacaacuccuacgagugcgacauccccaucggcgccggcaucugcgccagcuaccagacgcagaccaacuccccgcggcgcgcccggagcguggcgucccagagcaucaucgccuacaccaugucccugggggccgagaacagcgucgccuacuccaacaacagcaucgccauccccaccaacuucacgaucuccgugaccaccgagauccugcccgugagcaugaccaagacgagcgucgacugcaccauguacaucugcggcgacuccaccgagugcagcaaccuccugcugcaguacggguccuucugcacccagcucaaccgcgcgcugacgggcaucgccguggagcaggacaagaacacccaggagguguucgcccaggucaagcagaucuacaagacgcccccgaucaaggacuucgggggcuucaacuucagccagauccugcccgaccccuccaagcccagcaagcgguccuucaucgaggaccuccuguucaacaaggugacccuggccgacgccggcuucaucaagcaguacggggacugccucggcgacaucgcggcccgcgaccugaucugcgcccagaaguucaacgggcugaccgugcucccgccccugcugaccgacgagaugaucgcccaguacaccagcgcccuccuggcgggcaccaucacguccggguggaccuucggcgccggcgccgcccugcagauccccuucgcgaugcagauggccuaccgguucaacgggaucggcgucacccagaacgugcucuacgagaaccagaagcugaucgccaaccaguucaacagcgccaucgggaagauccaggacucccugagcuccaccgccagcgcgcucggcaagcugcaggacguggucaaccagaacgcccaggcccugaacacgcucgugaagcagcuguccagcaacuucggggccaucuccagcgugcugaacgacauccucucccgccuggacccgcccgaggccgagguccagaucgaccggcugaucaccggccgccuccagagccugcagaccuacgugacccagcagcugauccgggcggccgagauccgcgccagcgccaaccucgccgcgaccaagauguccgagugcgugcugggccagagcaagcgggucgacuucugcgggaagggcuaccaccugauguccuucccccagagcgcgccccacggggugguguuccuccacgucacguacgugcccgcccaggagaagaacuucaccaccgccccggccaucugccacgacggcaaggcccacuucccccgcgagggggucuucguguccaacggcacccacugguucgugacgcagcggaacuucuacgagccccagaucaucaccaccgacaacaccuucgucagcggcaacugcgacguggugaucgggaucgucaacaacacgguguacgacccccugcagccggagcuggacuccuucaaggaggagcucgacaaguacuucaagaaccacaccagccccgacguggaccugggcgacaucuccgggaucaacgccagcgucgugaacauccagaaggagaucgaccgccugaacgagguggccaagaaccucaacgagucccugaucgaccugcaggagcucggcaaguacgagcaguacaucaaguggcccugguacaucuggcugggcuucaucgccgggcugaucgcgaucgucauggugaccaucaugcucugcugcaugaccagcugcugcuccugccugaagggcugcugcagcugcggguccugcugcaaguucgacgaggacgacagcgagccggugcugaagggcgucaagcuccacuacacgugaggacuaguguccaccugucccuccugggcugcuggauugucucguuuuccugccaaauaaacaggaucagcgcuuuacagaucuaaaaaaaaaaaaaaaaaaaaaaaaaaaaaaaaaaaaaaaaaaaaaaaaaaaaaaaaaaaaaaaaaaaaaaaaaaaaaaaaaaaaaaaaaaaaaaaaaaaa

SEQ ID NO: 25303 - RNA, 4105 nt, Artificial Sequence
  SARS-CoV-2/Wuhan/WIV05/2019__EPI_ISL_402128 spike protein mRNA gc (1-1273)(K986P_V987P_D614G_I692V)
aggagacccgugacccggaaguuguacggcuacgcgacuuucccucccacaaacccucgcgcccuuccuuuccuacuugggcccggcagaaagcuuaccauguucguguuccugguccuccugccccuggugagcucccagugcgugaaccucaccacccgcacgcagcugccgcccgccuacaccaacagcuucacccggggcgucuacuaccccgacaagguguuccgcuccagcgugcugcacuccacccaggaccucuuccugcccuucuucagcaacgucacgugguuccacgccauccacguguccgggaccaacggcaccaagcgguucgacaacccggugcugcccuucaacgacggggucuacuucgcgagcaccgagaaguccaacaucauccgcggcuggaucuucgggacgacccucgacagcaagacccagucccugcugaucgugaacaacgccaccaacguggucaucaaggugugcgaguuccaguucugcaacgaccccuuccucggcguguacuaccacaagaacaacaagagcuggauggaguccgaguuccgggucuacagcuccgccaacaacugcacguucgaguacgugagccagcccuuccugauggaccuggagggcaagcaggggaacuucaagaaccuccgcgaguucguguucaagaacaucgacggcuacuucaagaucuacuccaagcacaccccgaucaaccugguccgggaccugccccagggguucagcgcccucgagccccugguggaccugcccaucggcaucaacaucacccgcuuccagacccuccuggcccugcaccgguccuaccucacgccgggggacagcagcuccggcuggaccgcgggcgccgccgccuacuacgugggguaccugcagccccgcaccuuccugcucaaguacaacgagaacggcaccaucacggacgcggucgacugcgcccuggacccccugagcgagaccaagugcacccucaaguccuucaccguggagaaggggaucuaccagacgagcaacuuccgggugcagcccaccgaguccaucguccgcuucccgaacaucaccaaccugugccccuucggcgagguguucaacgccacccgguucgccagcgucuacgccuggaaccgcaagcggaucuccaacugcguggcggacuacagcgugcuguacaacuccgccagcuucuccacguucaagugcuacggcgucagccccaccaagcucaacgaccugugcuucaccaacguguacgccgacuccuucgugauccgcggggacgagguccggcagaucgcccccggccagaccgggaagaucgccgacuacaacuacaagcugccggacgacuucacgggcugcgugaucgcguggaacagcaacaaccucgacuccaaggucgggggcaacuacaacuaccuguaccgccuguuccgcaagagcaaccucaagcccuucgagcgggacaucuccaccgagaucuaccaggccggcagcacccccugcaacgggguggagggcuucaacugcuacuucccccugcaguccuacggguuccagccgaccaacggcgugggguaccagcccuaccggguggucgugcugagcuucgagcuccugcacgcccccgccacggugugcggccccaagaaguccaccaaccuggucaagaacaagugcgugaacuucaacuucaacggccucaccgggaccggcgugcugaccgagagcaacaagaaguuccugccguuccagcaguucgggcgcgacaucgccgacacgaccgacgcgguccgcgacccccagacccuggagauccucgacaucacccccugcagcuucggcgggguguccgugaucacgccgggcaccaacaccagcaaccaggucgccgugcuguaccagggcgugaacugcaccgagguccccguggccauccacgccgaccagcugacgcccaccuggcggguguacuccaccgggagcaacgucuuccagacccgcgccggcugccucaucggggcggagcacgugaacaacuccuacgagugcgacauccccaucggcgccggcaucugcgccagcuaccagacgcagaccaacuccccgcggcgcgcccggagcguggcgucccagagcgucaucgccuacaccaugucccugggggccgagaacagcguggccuacuccaacaacagcaucgccauccccaccaacuucacgaucuccgugaccaccgagauccugcccgucagcaugaccaagacgagcguggacugcaccauguacaucugcggcgacuccaccgagugcagcaaccuccugcugcaguacggguccuucugcacccagcucaaccgcgcgcugacgggcaucgccguggagcaggacaagaacacccaggaggucuucgcccaggugaagcagaucuacaagacgcccccgaucaaggacuucgggggcuucaacuucagccagauccugcccgaccccuccaagcccagcaagcgguccuucaucgaggaccuccuguucaacaaggugacccuggccgacgccggcuucaucaagcaguacggggacugccucggcgacaucgcggcccgcgaccugaucugcgcccagaaguucaacgggcugaccguccucccgccccugcugaccgacgagaugaucgcccaguacaccagcgcccuccuggcgggcaccaucacguccggguggaccuucggcgccggcgccgcccugcagauccccuucgcgaugcagauggccuaccgguucaacgggaucggcgugacccagaacgugcucuacgagaaccagaagcugaucgccaaccaguucaacagcgccaucgggaagauccaggacucccugagcuccaccgccagcgcgcucggcaagcugcaggacgucgugaaccagaacgcccaggcccugaacacgcucgugaagcagcuguccagcaacuucggggccaucuccagcguccugaacgacauccucucccgccuggacccgcccgaggccgaggugcagaucgaccggcugaucaccggccgccuccagagccugcagaccuacgugacccagcagcugauccgggcggccgagauccgcgccagcgccaaccucgccgcgaccaagauguccgagugcguccugggccagagcaagcggguggacuucugcgggaagggcuaccaccugauguccuucccccagagcgcgccccacgggguggucuuccuccacgugacguacguccccgcccaggagaagaacuucaccaccgccccggccaucugccacgacggcaaggcccacuucccccgcgaggggguguucguguccaacggcacccacugguucgucacgcagcggaacuucuacgagccccagaucaucaccaccgacaacaccuucgugagcggcaacugcgacguggucaucgggaucgugaacaacacgguguacgacccccugcagccggagcuggacuccuucaaggaggagcucgacaaguacuucaagaaccacaccagccccgacgucgaccugggcgacaucuccgggaucaacgccagcguggugaacauccagaaggagaucgaccgccugaacgaggucgccaagaaccucaacgagucccugaucgaccugcaggagcucggcaaguacgagcaguacaucaaguggcccugguacaucuggcugggcuucaucgccgggcugaucgcgaucgugauggugaccaucaugcucugcugcaugaccagcugcugcuccugccugaagggcugcugcagcugcggguccugcugcaaguucgacgaggacgacagcgagccgguccugaagggcgugaagcuccacuacacgugaggacuaguguccaccugucccuccugggcugcuggauugucucguuuuccugccaaauaaacaggaucagcgcuuuacagaucuaaaaaaaaaaaaaaaaaaaaaaaaaaaaaaaaaaaaaaaaaaaaaaaaaaaaaaaaaaaaaaaaaaaaaaaaaaaaaaaaaaaaaaaaaaaaaaaaaaaa

SEQ ID NO: 25304 - RNA, 4105 nt, Artificial Sequence
  SARS-CoV-2/Wuhan/WIV05/2019__EPI_ISL_402128 spike protein mRNA gc (1-1273)(K986P_V987P_D614G_M1229I)
aggagacccgugacccggaaguuguacggcuacgcgacuuucccucccacaaacccucgcgcccuuccuuuccuacuugggcccggcagaaagcuuaccauguucguguuccugguccuccugccccuggugagcucccagugcgugaaccucaccacccgcacgcagcugccgcccgccuacaccaacagcuucacccggggcgucuacuaccccgacaagguguuccgcuccagcgugcugcacuccacccaggaccucuuccugcccuucuucagcaacgucacgugguuccacgccauccacguguccgggaccaacggcaccaagcgguucgacaacccggugcugcccuucaacgacggggucuacuucgcgagcaccgagaaguccaacaucauccgcggcuggaucuucgggacgacccucgacagcaagacccagucccugcugaucgugaacaacgccaccaacguggucaucaaggugugcgaguuccaguucugcaacgaccccuuccucggcguguacuaccacaagaacaacaagagcuggauggaguccgaguuccgggucuacagcuccgccaacaacugcacguucgaguacgugagccagcccuuccugauggaccuggagggcaagcaggggaacuucaagaaccuccgcgaguucguguucaagaacaucgacggcuacuucaagaucuacuccaagcacaccccgaucaaccugguccgggaccugccccagggguucagcgcccucgagccccugguggaccugcccaucggcaucaacaucacccgcuuccagacccuccuggcccugcaccgguccuaccucacgccgggggacagcagcuccggcuggaccgcgggcgccgccgccuacuacgugggguaccugcagccccgcaccuuccugcucaaguacaacgagaacggcaccaucacggacgcggucgacugcgcccuggacccccugagcgagaccaagugcacccucaaguccuucaccguggagaaggggaucuaccagacgagcaacuuccgggugcagcccaccgaguccaucguccgcuucccgaacaucaccaaccugugccccuucggcgagguguucaacgccacccgguucgccagcgucuacgccuggaaccgcaagcggaucuccaacugcguggcggacuacagcgugcuguacaacuccgccagcuucuccacguucaagugcuacggcgucagccccaccaagcucaacgaccugugcuucaccaacguguacgccgacuccuucgugauccgcggggacgagguccggcagaucgcccccggccagaccgggaagaucgccgacuacaacuacaagcugccggacgacuucacgggcugcgugaucgcguggaacagcaacaaccucgacuccaaggucgggggcaacuacaacuaccuguaccgccuguuccgcaagagcaaccucaagcccuucgagcgggacaucuccaccgagaucuaccaggccggcagcacccccugcaacgggguggagggcuucaacugcuacuucccccugcaguccuacggguuccagccgaccaacggcgugggguaccagcccuaccggguggucgugcugagcuucgagcuccugcacgcccccgccacggugugcggccccaagaaguccaccaaccuggucaagaacaagugcgugaacuucaacuucaacggccucaccgggaccggcgugcugaccgagagcaacaagaaguuccugccguuccagcaguucgggcgcgacaucgccgacacgaccgacgcgguccgcgacccccagacccuggagauccucgacaucacccccugcagcuucggcgggguguccgugaucacgccgggcaccaacaccagcaaccaggucgccgugcuguaccagggcgugaacugcaccgagguccccguggccauccacgccgaccagcugacgcccaccuggcggguguacuccaccgggagcaacgucuuccagacccgcgccggcugccucaucggggcggagcacgugaacaacuccuacgagugcgacauccccaucggcgccggcaucugcgccagcuaccagacgcagaccaacuccccgcggcgcgcccggagcguggcgucccagagcaucaucgccuacaccaugucccugggggccgagaacagcgucgccuacuccaacaacagcaucgccauccccaccaacuucacgaucuccgugaccaccgagauccugcccgugagcaugaccaagacgagcgucgacugcaccauguacaucugcggcgacuccaccgagugcagcaaccuccugcugcaguacggguccuucugcacccagcucaaccgcgcgcugacgggcaucgccguggagcaggacaagaacacccaggagguguucgcccaggucaagcagaucuacaagacgcccccgaucaaggacuucgggggcuucaacuucagccagauccugcccgaccccuccaagcccagcaagcgguccuucaucgaggaccuccuguucaacaaggugacccuggccgacgccggcuucaucaagcaguacggggacugccucggcgacaucgcggcccgcgaccugaucugcgcccagaaguucaacgggcugaccgugcucccgccccugcugaccgacgagaugaucgcccaguacaccagcgcccuccuggcgggcaccaucacguccggguggaccuucggcgccggcgccgcccugcagauccccuucgcgaugcagauggccuaccgguucaacgggaucggcgucacccagaacgugcucuacgagaaccagaagcugaucgccaaccaguucaacagcgccaucgggaagauccaggacucccugagcuccaccgccagcgcgcucggcaagcugcaggacguggucaaccagaacgcccaggcccugaacacgcucgugaagcagcuguccagcaacuucggggccaucuccagcgugcugaacgacauccucucccgccuggacccgcccgaggccgagguccagaucgaccggcugaucaccggccgccuccagagccugcagaccuacgugacccagcagcugauccgggcggccgagauccgcgccagcgccaaccucgccgcgaccaagauguccgagugcgugcugggccagagcaagcgggucgacuucugcgggaagggcuaccaccugauguccuucccccagagcgcgccccacggggugguguuccuccacgucacguacgugcccgcccaggagaagaacuucaccaccgccccggccaucugccacgacggcaaggcccacuucccccgcgagggggucuucguguccaacggcacccacugguucgugacgcagcggaacuucuacgagccccagaucaucaccaccgacaacaccuucgucagcggcaacugcgacguggugaucgggaucgucaacaacacgguguacgacccccugcagccggagcuggacuccuucaaggaggagcucgacaaguacuucaagaaccacaccagccccgacguggaccugggcgacaucuccgggaucaacgccagcgucgugaacauccagaaggagaucgaccgccugaacgagguggccaagaaccucaacgagucccugaucgaccugcaggagcucggcaaguacgagcaguacaucaaguggcccugguacaucuggcugggcuucaucgccgggcugaucgcgaucgucaucgugaccaucaugcucugcugcaugaccagcugcugcuccugccugaagggcugcugcagcugcggguccugcugcaaguucgacgaggacgacagcgagccggugcugaagggcgucaagcuccacuacacgugaggacuaguguccaccugucccuccugggcugcuggauugucucguuuuccugccaaauaaacaggaucagcgcuuuacagaucuaaaaaaaaaaaaaaaaaaaaaaaaaaaaaaaaaaaaaaaaaaaaaaaaaaaaaaaaaaaaaaaaaaaaaaaaaaaaaaaaaaaaaaaaaaaaaaaaaaaa

SEQ ID NO: 25305 - RNA, 4099 nt, Artificial Sequence
  SARS-CoV-2/Wuhan/WIV05/2019__EPI_ISL_402128 spike protein mRNA gc (1-1273)(K986P_V987P_H69del_V70del_A222V_Y453F_S477N_D614G_I692V)
aggagacccgugacccggaaguuguacggcuacgcgacuuucccucccacaaacccucgcgcccuuccuuuccuacuugggcccggcagaaagcuuaccauguucguguuccugguccuccugccccuggugagcucccagugcgugaaccucaccacccgcacgcagcugccgcccgccuacaccaacagcuucacccggggcgucuacuaccccgacaagguguuccgcuccagcgugcugcacuccacccaggaccucuuccugcccuucuucagcaacgucacgugguuccacgccaucuccgggaccaacggcaccaagcgguucgacaacccggugcugcccuucaacgacgggguguacuucgcgagcaccgagaaguccaacaucauccgcggcuggaucuucgggacgacccucgacagcaagacccagucccugcugaucgucaacaacgccaccaacguggugaucaaggucugcgaguuccaguucugcaacgaccccuuccucggcguguacuaccacaagaacaacaagagcuggauggaguccgaguuccggguguacagcuccgccaacaacugcacguucgaguacgucagccagcccuuccugauggaccuggagggcaagcaggggaacuucaagaaccuccgcgaguucguguucaagaacaucgacggcuacuucaagaucuacuccaagcacaccccgaucaaccuggugcgggaccugccccagggguucagcguccucgagccccugguggaccugcccaucggcaucaacaucacccgcuuccagacccuccuggcccugcaccgguccuaccucacgccgggggacagcagcuccggcuggaccgccggcgcggccgccuacuacgugggguaccugcagccccgcaccuuccugcucaaguacaacgagaacggcaccaucacggacgccgucgacugcgcgcuggacccccugagcgagaccaagugcacccucaaguccuucaccguggagaaggggaucuaccagacgagcaacuuccgggugcagcccaccgaguccaucguccgcuucccgaacaucaccaaccugugccccuucggcgagguguucaacgccacccgguucgccagcgucuacgccuggaaccgcaagcggaucuccaacugcguggccgacuacagcgugcuguacaacuccgcgagcuucuccacguucaagugcuacggcgucagccccaccaagcucaacgaccugugcuucaccaacguguacgccgacuccuucgugauccgcggggacgagguccggcagaucgcccccggccagaccgggaagaucgccgacuacaacuacaagcugccggacgacuucacgggcugcgugaucgccuggaacagcaacaaccucgacuccaaggucgggggcaacuacaacuaccuguuccgccuguuccgcaagagcaaccucaagcccuucgagcgggacaucuccaccgagaucuaccaggcgggcaacacccccugcaacgggguggagggcuucaacugcuacuucccccugcagagcuacggguuccagccgaccaacggcgugggguaccagcccuaccggguggucgugcuguccuucgagcuccugcacgcccccgccacggugugcggccccaagaaguccaccaaccuggucaagaacaagugcgugaacuucaacuucaacggccucaccgggaccggcgugcugaccgagagcaacaagaaguuccugccguuccagcaguucgggcgcgacaucgccgacacgaccgacgccguccgcgacccccagacccuggagauccucgacaucacccccugcagcuucggcggggugagcgugaucacgccgggcaccaacaccuccaaccaggucgcggugcuguaccagggcgugaacugcaccgagguccccguggccauccacgccgaccagcugacgcccaccuggcggguguacagcaccggguccaacgucuuccagacccgcgccggcugccucaucggggccgagcacgugaacaacagcuacgagugcgacauccccaucggcgcgggcaucugcgccuccuaccagacgcagaccaacagcccgcggcgcgcccgguccguggccagccaguccgucaucgcguacaccaugagccugggggccgagaacuccguggccuacagcaacaacuccaucgccauccccaccaacuucacgaucagcgugaccaccgagauccugcccgucuccaugaccaagacgagcguggacugcaccauguacaucugcggcgacagcaccgagugcuccaaccuccugcugcaguacgggagcuucugcacccagcucaaccgcgcccugacgggcaucgcgguggagcaggacaagaacacccaggaggucuucgcccaggugaagcagaucuacaagacgcccccgaucaaggacuucgggggcuucaacuucucccagauccugcccgaccccagcaagcccuccaagcggagcuucaucgaggaccuccuguucaacaaggugacccuggccgacgccggcuucaucaagcaguacggggacugccucggcgacaucgccgcgcgcgaccugaucugcgcccagaaguucaacgggcugaccguccucccgccccugcugaccgacgagaugaucgcccaguacaccuccgcccuccuggccggcaccaucacgagcggguggaccuucggcgcgggcgccgcccugcagauccccuucgccaugcagauggcguaccgguucaacgggaucggcgugacccagaacgugcucuacgagaaccagaagcugaucgccaaccaguucaacuccgccaucgggaagauccaggacagccuguccagcaccgccuccgcccucggcaagcugcaggacgucgugaaccagaacgcgcaggcccugaacacgcucgugaagcagcugagcuccaacuucggggccaucagcuccguccugaacgacauccucagccgccuggacccgcccgaggccgaggugcagaucgaccggcugaucaccggccgccuccagucccugcagaccuacgugacccagcagcugauccgggccgcggagauccgcgccagcgccaaccucgccgccaccaagaugagcgagugcguccugggccaguccaagcggguggacuucugcgggaagggcuaccaccugaugagcuucccccaguccgcgccccacgggguggucuuccuccacgugacguacguccccgcccaggagaagaacuucaccaccgccccggccaucugccacgacggcaaggcgcacuucccccgcgaggggguguucgugagcaacggcacccacugguucgucacgcagcggaacuucuacgagccccagaucaucaccaccgacaacaccuucguguccggcaacugcgacguggucaucgggaucgugaacaacacgguguacgacccccugcagccggagcuggacagcuucaaggaggagcucgacaaguacuucaagaaccacaccucccccgacgucgaccugggcgacaucagcgggaucaacgccuccguggugaacauccagaaggagaucgaccgccugaacgaggucgccaagaaccucaacgagagccugaucgaccugcaggagcucggcaaguacgagcaguacaucaaguggcccugguacaucuggcugggcuucaucgccgggcugaucgccaucgugauggugaccaucaugcucugcugcaugaccuccugcugcagcugccugaagggcugcugcuccugcgggagcugcugcaaguucgacgaggacgacuccgagccgguccugaagggcgugaagcuccacuacacgugaggacuaguguccaccugucccuccugggcugcuggauugucucguuuuccugccaaauaaacaggaucagcgcuuuacagaucuaaaaaaaaaaaaaaaaaaaaaaaaaaaaaaaaaaaaaaaaaaaaaaaaaaaaaaaaaaaaaaaaaaaaaaaaaaaaaaaaaaaaaaaaaaaaaaaaaaaa

SEQ ID NO: 25306 - RNA, 4099 nt, Artificial Sequence
  SARS-CoV-2/Wuhan/WIV05/2019__EPI_ISL_402128 spike protein mRNA gc (1-1273)(K986P_V987P_H69del_V70del_Y453F_D614G_I692V_M1229I)
aggagacccgugacccggaaguuguacggcuacgcgacuuucccucccacaaacccucgcgcccuuccuuuccuacuugggcccggcagaaagcuuaccauguucguguuccugguccuccugccccuggugagcucccagugcgugaaccucaccacccgcacgcagcugccgcccgccuacaccaacagcuucacccggggcgucuacuaccccgacaagguguuccgcuccagcgugcugcacuccacccaggaccucuuccugcccuucuucagcaacgucacgugguuccacgccaucuccgggaccaacggcaccaagcgguucgacaacccggugcugcccuucaacgacgggguguacuucgcgagcaccgagaaguccaacaucauccgcggcuggaucuucgggacgacccucgacagcaagacccagucccugcugaucgucaacaacgccaccaacguggugaucaaggucugcgaguuccaguucugcaacgaccccuuccucggcguguacuaccacaagaacaacaagagcuggauggaguccgaguuccggguguacagcuccgccaacaacugcacguucgaguacgucagccagcccuuccugauggaccuggagggcaagcaggggaacuucaagaaccuccgcgaguucguguucaagaacaucgacggcuacuucaagaucuacuccaagcacaccccgaucaaccuggugcgggaccugccccagggguucagcgcccucgagccccuggucgaccugcccaucggcaucaacaucacccgcuuccagacccuccuggcccugcaccgguccuaccucacgccgggggacagcagcuccggcuggaccgcgggcgccgccgccuacuacgugggguaccugcagccccgcaccuuccugcucaaguacaacgagaacggcaccaucacggacgcgguggacugcgcccuggacccccugagcgagaccaagugcacccucaaguccuucaccgucgagaaggggaucuaccagacgagcaacuuccgggugcagcccaccgaguccaucgugcgcuucccgaacaucaccaaccugugccccuucggcgaggucuucaacgccacccgguucgccagcguguacgccuggaaccgcaagcggaucuccaacugcgucgcggacuacagcgugcuguacaacuccgccagcuucuccacguucaagugcuacggcgugagccccaccaagcucaacgaccugugcuucaccaacgucuacgccgacuccuucgugauccgcggggacgaggugcggcagaucgcccccggccagaccgggaagaucgccgacuacaacuacaagcugccggacgacuucacgggcugcgucaucgcguggaacagcaacaaccucgacuccaaggucgggggcaacuacaacuaccuguuccgccuguuccgcaagagcaaccucaagcccuucgagcgggacaucuccaccgagaucuaccaggccggcagcacccccugcaacgggguggagggcuucaacugcuacuucccccugcaguccuacggguuccagccgaccaacggcgugggguaccagcccuaccggguggugguccugagcuucgagcuccugcacgcccccgccacggugugcggccccaagaaguccaccaaccuggugaagaacaagugcgucaacuucaacuucaacggccucaccgggaccggcgugcugaccgagagcaacaagaaguuccugccguuccagcaguucgggcgcgacaucgccgacacgaccgacgcggugcgcgacccccagacccuggagauccucgacaucacccccugcagcuucggcggggucuccgugaucacgccgggcaccaacaccagcaaccagguggccguccuguaccagggcgugaacugcaccgaggugcccgucgccauccacgccgaccagcugacgcccaccuggcggguguacuccaccgggagcaacguguuccagacccgcgccggcugccucaucggggcggagcacgucaacaacuccuacgagugcgacauccccaucggcgccggcaucugcgccagcuaccagacgcagaccaacuccccgcggcgcgcccggagcguggcgucccagagcgugaucgccuacaccaugucccugggggccgagaacagcgucgccuacuccaacaacagcaucgccauccccaccaacuucacgaucuccgugaccaccgagauccugcccgugagcaugaccaagacgagcgucgacugcaccauguacaucugcggcgacuccaccgagugcagcaaccuccugcugcaguacggguccuucugcacccagcucaaccgcgcgcugacgggcaucgccguggagcaggacaagaacacccaggagguguucgcccaggucaagcagaucuacaagacgcccccgaucaaggacuucgggggcuucaacuucagccagauccugcccgaccccuccaagcccagcaagcgguccuucaucgaggaccuccuguucaacaaggugacccuggccgacgccggcuucaucaagcaguacggggacugccucggcgacaucgcggcccgcgaccugaucugcgcccagaaguucaacgggcugaccgugcucccgccccugcugaccgacgagaugaucgcccaguacaccagcgcccuccuggcgggcaccaucacguccggguggaccuucggcgccggcgccgcccugcagauccccuucgcgaugcagauggccuaccgguucaacgggaucggcgucacccagaacgugcucuacgagaaccagaagcugaucgccaaccaguucaacagcgccaucgggaagauccaggacucccugagcuccaccgccagcgcgcucggcaagcugcaggacguggucaaccagaacgcccaggcccugaacacgcucgugaagcagcuguccagcaacuucggggccaucuccagcgugcugaacgacauccucucccgccuggacccgcccgaggccgagguccagaucgaccggcugaucaccggccgccuccagagccugcagaccuacgugacccagcagcugauccgggcggccgagauccgcgccagcgccaaccucgccgcgaccaagauguccgagugcgugcugggccagagcaagcgggucgacuucugcgggaagggcuaccaccugauguccuucccccagagcgcgccccacggggugguguuccuccacgucacguacgugcccgcccaggagaagaacuucaccaccgccccggccaucugccacgacggcaaggcccacuucccccgcgagggggucuucguguccaacggcacccacugguucgugacgcagcggaacuucuacgagccccagaucaucaccaccgacaacaccuucgucagcggcaacugcgacguggugaucgggaucgucaacaacacgguguacgacccccugcagccggagcuggacuccuucaaggaggagcucgacaaguacuucaagaaccacaccagccccgacguggaccugggcgacaucuccgggaucaacgccagcgucgugaacauccagaaggagaucgaccgccugaacgagguggccaagaaccucaacgagucccugaucgaccugcaggagcucggcaaguacgagcaguacaucaaguggcccugguacaucuggcugggcuucaucgccgggcugaucgcgaucgucaucgugaccaucaugcucugcugcaugaccagcugcugcuccugccugaagggcugcugcagcugcggguccugcugcaaguucgacgaggacgacagcgagccggugcugaagggcgucaagcuccacuacacgugaggacuaguguccaccugucccuccugggcugcuggauugucucguuuuccugccaaauaaacaggaucagcgcuuuacagaucuaaaaaaaaaaaaaaaaaaaaaaaaaaaaaaaaaaaaaaaaaaaaaaaaaaaaaaaaaaaaaaaaaaaaaaaaaaaaaaaaaaaaaaaaaaaaaaaaaaaa

SEQ ID NO: 25307 - RNA, 4096 nt, Artificial Sequence
  SARS-CoV-2/Wuhan/WIV05/2019__EPI_ISL_402128 spike protein mRNA gc (1-1273)(K986P_V987P_K986P_V987P_H69del_V70del_Y144del_N501Y_A570 D_D614G_P681H_T716I_S982A_D1118H)
aggagacccgugacccggaaguuguacggcuacgcgacuuucccucccacaaacccucgcgcccuuccuuuccuacuugggcccggcagaaagcuuaccauguucguguuccugguccuccugccccuggugagcucccagugcgugaaccucaccacccgcacgcagcugccgcccgccuacaccaacagcuucacccggggcgucuacuaccccgacaagguguuccgcuccagcgugcugcacuccacccaggaccucuuccugcccuucuucagcaacgucacgugguuccacgccaucuccgggaccaacggcaccaagcgguucgacaacccggugcugcccuucaacgacgggguguacuucgcgagcaccgagaaguccaacaucauccgcggcuggaucuucgggacgacccucgacagcaagacccagucccugcugaucgucaacaacgccaccaacguggugaucaaggucugcgaguuccaguucugcaacgaccccuuccucggcguguaccacaagaacaacaagagcuggauggaguccgaguuccggguguacagcuccgccaacaacugcacguucgaguacgucagccagcccuuccugauggaccuggagggcaagcaggggaacuucaagaaccuccgcgaguucguguucaagaacaucgacggcuacuucaagaucuacuccaagcacaccccgaucaaccuggugcgggaccugccccagggguucagcgcccucgagccccuggucgaccugcccaucggcaucaacaucacccgcuuccagacccuccuggcccugcaccgguccuaccucacgccgggggacagcagcuccggcuggaccgcgggcgccgccgccuacuacgugggguaccugcagccccgcaccuuccugcucaaguacaacgagaacggcaccaucacggacgcgguggacugcgcccuggacccccugagcgagaccaagugcacccucaaguccuucaccgucgagaaggggaucuaccagacgagcaacuuccgggugcagcccaccgaguccaucgugcgcuucccgaacaucaccaaccugugccccuucggcgaggucuucaacgccacccgguucgccagcguguacgccuggaaccgcaagcggaucuccaacugcgucgcggacuacagcgugcuguacaacuccgccagcuucuccacguucaagugcuacggcgugagccccaccaagcucaacgaccugugcuucaccaacgucuacgccgacuccuucgugauccgcggggacgaggugcggcagaucgcccccggccagaccgggaagaucgccgacuacaacuacaagcugccggacgacuucacgggcugcgucaucgcguggaacagcaacaaccucgacuccaaggucgggggcaacuacaacuaccuguaccgccuguuccgcaagagcaaccucaagcccuucgagcgggacaucuccaccgagaucuaccaggccggcagcacccccugcaacgggguggagggcuucaacugcuacuucccccugcaguccuacggguuccagccgaccuacggcgugggguaccagcccuaccggguggugguccugagcuucgagcuccugcacgcccccgccacggugugcggccccaagaaguccaccaaccuggugaagaacaagugcgucaacuucaacuucaacggccucaccgggaccggcgugcugaccgagagcaacaagaaguuccugccguuccagcaguucgggcgcgacaucgacgacacgaccgacgccgugcgcgacccccagacccuggagauccucgacaucacccccugcagcuucggcggggucuccgugaucacgccgggcaccaacaccagcaaccagguggcgguccuguaccagggcgugaacugcaccgaggugcccgucgccauccacgccgaccagcugacgcccaccuggcggguguacuccaccgggagcaacguguuccagacccgcgccggcugccucaucggggccgagcacgucaacaacuccuacgagugcgacauccccaucggcgcgggcaucugcgccagcuaccagacgcagaccaacucccaccggcgcgcccggagcguggccucccagagcaucaucgcguacaccaugucccugggggccgagaacagcguggccuacuccaacaacagcaucgccaucccgaucaacuucaccaucuccgucacgaccgagauccugcccgugagcaugaccaagaccagcguggacugcacgauguacaucugcggcgacuccaccgagugcagcaaccuccugcugcaguacggguccuucugcacccagcucaaccgcgcccugaccggcaucgcggucgagcaggacaagaacacgcaggagguguucgcccaggugaagcagaucuacaagaccccgcccaucaaggacuucgggggcuucaacuucagccagauccugcccgaccccuccaagcccagcaagcgguccuucaucgaggaccuccuguucaacaaggucacccuggccgacgccggcuucaucaagcaguacggggacugccucggcgacaucgccgcgcgcgaccugaucugcgcccagaaguucaacgggcugaccgugcugcccccgcuccugacggacgagaugaucgcccaguacaccagcgcccuccuggccggcaccaucaccuccggguggacguucggcgcgggcgccgcccugcagauccccuucgccaugcagauggcguaccgguucaacgggaucggcgugacccagaacguccucuacgagaaccagaagcugaucgccaaccaguucaacagcgccaucgggaagauccaggacucccugagcuccaccgccagcgcccucggcaagcugcaggacguggugaaccagaacgcgcaggcccugaacacccucgucaagcagcuguccagcaacuucggggccaucuccagcgugcugaacgacauccucgcccgccuggacccgcccgaggccgaggugcagaucgaccggcugaucacgggccgccuccagucccugcagaccuacgucacccagcagcugauccgggcggccgagauccgcgccagcgccaaccucgccgcgaccaagaugagcgagugcgugcugggccaguccaagcggguggacuucugcgggaagggcuaccaccugaugagcuucccccaguccgcgccccacggggucguguuccuccacgugaccuacguccccgcccaggagaagaacuucacgaccgcccccgccaucugccacgacggcaaggcccacuucccgcgcgaggggguguucgucagcaacggcacccacugguucgugacccagcggaacuucuacgagccccagaucaucacgacccacaacaccuucguguccggcaacugcgacgucgugaucgggaucgugaacaacaccgucuacgacccccugcagcccgagcuggacagcuucaaggaggagcucgacaaguacuucaagaaccacacguccccggacguggaccugggcgacaucagcgggaucaacgccuccguggucaacauccagaaggagaucgaccgccugaacgagguggccaagaaccucaacgagagccugaucgaccugcaggagcucggcaaguacgagcaguacaucaaguggcccugguacaucuggcugggcuucaucgccgggcugaucgcgaucgugauggucaccaucaugcucugcugcaugaccuccugcugcagcugccugaagggcugcugcuccugcgggagcugcugcaaguucgacgaggacgacuccgagcccgugcugaagggcgugaagcuccacuacaccugaggacuaguguccaccugucccuccugggcugcuggauugucucguuuuccugccaaauaaacaggaucagcgcuuuacagaucuaaaaaaaaaaaaaaaaaaaaaaaaaaaaaaaaaaaaaaaaaaaaaaaaaaaaaaaaaaaaaaaaaaaaaaaaaaaaaaaaaaaaaaaaaaaaaaaaaaaa

SEQ ID NO: 25308 - RNA, 4105 nt, Artificial Sequence
  SARS-CoV-2/Wuhan/WIV05/2019__EPI_ISL_402128 spike protein mRNA gc (1-1273)(K986P_V987P_K986P_V987P_K417N_E484K_N501Y_D614G)
aggagacccgugacccggaaguuguacggcuacgcgacuuucccucccacaaacccucgcgcccuuccuuuccuacuugggcccggcagaaagcuuaccauguucguguuccugguccuccugccccuggugagcucccagugcgugaaccucaccacccgcacgcagcugccgcccgccuacaccaacagcuucacccggggcgucuacuaccccgacaagguguuccgcuccagcgugcugcacuccacccaggaccucuuccugcccuucuucagcaacgucacgugguuccacgccauccacguguccgggaccaacggcaccaagcgguucgacaacccggugcugcccuucaacgacggggucuacuucgcgagcaccgagaaguccaacaucauccgcggcuggaucuucgggacgacccucgacagcaagacccagucccugcugaucgugaacaacgccaccaacguggucaucaaggugugcgaguuccaguucugcaacgaccccuuccucggcguguacuaccacaagaacaacaagagcuggauggaguccgaguuccgggucuacagcuccgccaacaacugcacguucgaguacgugagccagcccuuccugauggaccuggagggcaagcaggggaacuucaagaaccuccgcgaguucguguucaagaacaucgacggcuacuucaagaucuacuccaagcacaccccgaucaaccugguccgggaccugccccagggguucagcgcccucgagccccugguggaccugcccaucggcaucaacaucacccgcuuccagacccuccuggcccugcaccgguccuaccucacgccgggggacagcagcuccggcuggaccgcgggcgccgccgccuacuacgugggguaccugcagccccgcaccuuccugcucaaguacaacgagaacggcaccaucacggacgcggucgacugcgcccuggacccccugagcgagaccaagugcacccucaaguccuucaccguggagaaggggaucuaccagacgagcaacuuccgggugcagcccaccgaguccaucguccgcuucccgaacaucaccaaccugugccccuucggcgagguguucaacgccacccgguucgccagcgucuacgccuggaaccgcaagcggaucuccaacugcguggcggacuacagcgugcuguacaacuccgccagcuucuccacguucaagugcuacggcgucagccccaccaagcucaacgaccugugcuucaccaacguguacgccgacuccuucgugauccgcggggacgagguccggcagaucgcccccggccagaccgggaacaucgccgacuacaacuacaagcugccggacgacuucacgggcugcgugaucgcguggaacagcaacaaccucgacuccaaggucgggggcaacuacaacuaccuguaccgccuguuccgcaagagcaaccucaagcccuucgagcgggacaucuccaccgagaucuaccaggccggcagcacccccugcaacggggugaagggcuucaacugcuacuucccccugcaguccuacggguuccagccgaccuacggcgugggguaccagcccuaccggguggucgugcugagcuucgagcuccugcacgcccccgccacggugugcggccccaagaaguccaccaaccuggucaagaacaagugcgugaacuucaacuucaacggccucaccgggaccggcgugcugaccgagagcaacaagaaguuccugccguuccagcaguucgggcgcgacaucgccgacacgaccgacgcgguccgcgacccccagacccuggagauccucgacaucacccccugcagcuucggcgggguguccgugaucacgccgggcaccaacaccagcaaccaggucgccgugcuguaccagggcgugaacugcaccgagguccccguggccauccacgccgaccagcugacgcccaccuggcggguguacuccaccgggagcaacgucuuccagacccgcgccggcugccucaucggggcggagcacgugaacaacuccuacgagugcgacauccccaucggcgccggcaucugcgccagcuaccagacgcagaccaacuccccgcggcgcgcccggagcguggcgucccagagcaucaucgccuacaccaugucccugggggccgagaacagcgucgccuacuccaacaacagcaucgccauccccaccaacuucacgaucuccgugaccaccgagauccugcccgugagcaugaccaagacgagcgucgacugcaccauguacaucugcggcgacuccaccgagugcagcaaccuccugcugcaguacggguccuucugcacccagcucaaccgcgcgcugacgggcaucgccguggagcaggacaagaacacccaggagguguucgcccaggucaagcagaucuacaagacgcccccgaucaaggacuucgggggcuucaacuucagccagauccugcccgaccccuccaagcccagcaagcgguccuucaucgaggaccuccuguucaacaaggugacccuggccgacgccggcuucaucaagcaguacggggacugccucggcgacaucgcggcccgcgaccugaucugcgcccagaaguucaacgggcugaccgugcucccgccccugcugaccgacgagaugaucgcccaguacaccagcgcccuccuggcgggcaccaucacguccggguggaccuucggcgccggcgccgcccugcagauccccuucgcgaugcagauggccuaccgguucaacgggaucggcgucacccagaacgugcucuacgagaaccagaagcugaucgccaaccaguucaacagcgccaucgggaagauccaggacucccugagcuccaccgccagcgcgcucggcaagcugcaggacguggucaaccagaacgcccaggcccugaacacgcucgugaagcagcuguccagcaacuucggggccaucuccagcgugcugaacgacauccucucccgccuggacccgcccgaggccgagguccagaucgaccggcugaucaccggccgccuccagagccugcagaccuacgugacccagcagcugauccgggcggccgagauccgcgccagcgccaaccucgccgcgaccaagauguccgagugcgugcugggccagagcaagcgggucgacuucugcgggaagggcuaccaccugauguccuucccccagagcgcgccccacggggugguguuccuccacgucacguacgugcccgcccaggagaagaacuucaccaccgccccggccaucugccacgacggcaaggcccacuucccccgcgagggggucuucguguccaacggcacccacugguucgugacgcagcggaacuucuacgagccccagaucaucaccaccgacaacaccuucgucagcggcaacugcgacguggugaucgggaucgucaacaacacgguguacgacccccugcagccggagcuggacuccuucaaggaggagcucgacaaguacuucaagaaccacaccagccccgacguggaccugggcgacaucuccgggaucaacgccagcgucgugaacauccagaaggagaucgaccgccugaacgagguggccaagaaccucaacgagucccugaucgaccugcaggagcucggcaaguacgagcaguacaucaaguggcccugguacaucuggcugggcuucaucgccgggcugaucgcgaucgucauggugaccaucaugcucugcugcaugaccagcugcugcuccugccugaagggcugcugcagcugcggguccugcugcaaguucgacgaggacgacagcgagccggugcugaagggcgucaagcuccacuacacgugaggacuaguguccaccugucccuccugggcugcuggauugucucguuuuccugccaaauaaacaggaucagcgcuuuacagaucuaaaaaaaaaaaaaaaaaaaaaaaaaaaaaaaaaaaaaaaaaaaaaaaaaaaaaaaaaaaaaaaaaaaaaaaaaaaaaaaaaaaaaaaaaaaaaaaaaaaa

SEQ ID NO: 25309 - RNA, 4096 nt, Artificial Sequence
  SARS-CoV-2/Wuhan/WIV05/2019__EPI_ISL_402128 spike protein mRNA gc (1-1273)(K986P_V987P_K986P_V987P_L18F_D80A_D215G_L242del_A243del_ L244del_R246I_K417N_E484K_N501Y_D614G_A701V)
aggagacccgugacccggaaguuguacggcuacgcgacuuucccucccacaaacccucgcgcccuuccuuuccuacuugggcccggcagaaagcuuaccauguucguguuccugguccuccugccccuggugagcucccagugcgugaacuucaccacccgcacgcagcucccgcccgccuacaccaacagcuucacccggggcgucuacuaccccgacaagguguuccgcuccagcgugcugcacuccacccaggaccuguuccuccccuucuucagcaacgucacgugguuccacgccauccacguguccgggaccaacggcaccaagcgguucgcgaacccggugcugcccuucaacgacggggucuacuucgccagcaccgagaaguccaacaucauccgcggcuggaucuucgggacgacccuggacagcaagacccagucccuccugaucgugaacaacgccaccaacguggucaucaaggugugcgaguuccaguucugcaacgaccccuuccugggcguguacuaccacaagaacaacaagagcuggauggaguccgaguuccgggucuacagcuccgccaacaacugcacguucgaguacgugagccagcccuuccucauggaccuggagggcaagcaggggaacuucaagaaccugcgcgaguucguguucaagaacaucgacggcuacuucaagaucuacuccaagcacaccccgaucaaccucguccgggggcugccccagggcuucagcgcccuggagccccucguggaccugcccaucgggaucaacaucacccgcuuccagacccugcacaucuccuaccucacgccgggcgacagcagcuccggcuggaccgcgggggccgccgccuacuacgugggcuaccugcagccccggaccuuccugcucaaguacaacgagaacgggaccaucacggacgcggucgacugcgcccuggacccccugagcgagaccaagugcacccucaaguccuucaccguggagaagggcaucuaccagacgagcaacuuccgcgugcagcccaccgaguccaucguccgguucccgaacaucaccaaccugugccccuucggcgagguguucaacgccacccgcuucgccagcgucuacgccuggaaccggaagcgcaucuccaacugcguggcggacuacagcgugcuguacaacuccgccagcuucuccacguucaagugcuacggggucagccccaccaagcucaacgaccugugcuucaccaacguguacgccgacuccuucgugauccggggcgacgagguccgccagaucgcccccgggcagaccggcaacaucgccgacuacaacuacaagcugccggacgacuucacggggugcgugaucgcguggaacagcaacaaccucgacuccaaggugggcggcaacuacaacuaccuguaccggcuguuccgcaagagcaaccucaagcccuucgagcgggacaucuccaccgagaucuaccaggccgggagcacccccugcaacggcgucaagggguucaacugcuacuucccccugcaguccuacggcuuccagccgaccuacggggugggcuaccagcccuaccgcguggucgugcugagcuucgagcuccugcacgcccccgccacggugugcggccccaagaaguccaccaaccuggucaagaacaagugcgugaacuucaacuucaacgggcucaccggcaccggggugcugaccgagagcaacaagaaguuccugccguuccagcaguucggccgggacaucgccgacacgaccgacgcgguccgcgacccccagacccucgagauccuggacaucacccccugcagcuucgggggcguguccgugaucacgccgggcaccaacaccagcaaccaggucgccgugcuguaccagggggugaacugcaccgagguccccguggccauccacgccgaccagcugacgcccaccuggcgcguguacuccaccggcagcaacgucuuccagacccgggccgggugccucaucggcgcggagcacgugaacaacuccuacgagugcgacauccccaucggcgccgggaucugcgccagcuaccagacgcagaccaacuccccgcgccgggcccgcagcguggcgucccagagcaucaucgccuacaccaugucccugggcgucgagaacagcguggccuacuccaacaacagcaucgccauccccaccaacuucacgaucuccgugaccaccgagauccugcccgucagcaugaccaagacgagcguggacugcaccauguacaucugcggggacuccaccgagugcagcaaccuccugcugcaguacggcuccuucugcacccagcucaaccgggcccugacggggaucgcgguggagcaggacaagaacacccaggaggucuucgcccaggugaagcagaucuacaagacgcccccgaucaaggacuucggcggcuucaacuucagccagauccugcccgaccccuccaagcccagcaagcgcuccuucaucgaggaccuccuguucaacaaggugacccuggccgacgccggguucaucaagcaguacggcgacugccucggggacaucgccgcgcgggaccugaucugcgcccagaaguucaacggccugaccguccucccgccccugcugaccgacgagaugaucgcccaguacaccagcgcccuccuggccgggaccaucacguccggcuggaccuucggcgcgggggccgcccugcagauccccuucgccaugcagauggcguaccgcuucaacggcaucggggugacccagaacgugcucuacgagaaccagaagcugaucgccaaccaguucaacagcgccaucggcaagauccaggacucccugagcuccaccgccagcgcccucgggaagcugcaggacgucgugaaccagaacgcgcaggcccugaacacgcucgugaagcagcuguccagcaacuucggcgccaucuccagcguccugaacgacauccucucccggcuggacccgcccgaggccgaggugcagaucgaccgccugaucaccggccggcuccagagccugcagaccuacgugacccagcagcugauccgcgccgcggagauccgggccagcgccaaccucgccgccaccaagauguccgagugcguccuggggcagagcaagcgcguggacuucugcggcaagggguaccaccugauguccuucccccagagcgcgccccacggcguggucuuccuccacgugacguacguccccgcccaggagaagaacuucaccaccgccccggccaucugccacgacgggaaggcgcacuucccccgggagggcguguucguguccaacggcacccacugguucgucacgcagcgcaacuucuacgagccccagaucaucaccaccgacaacaccuucgugagcgggaacugcgacguggucaucggcaucgugaacaacacgguguacgacccccugcagccggagcuggacuccuucaaggaggagcucgacaaguacuucaagaaccacaccagccccgacgucgaccugggggacaucuccggcaucaacgccagcguggugaacauccagaaggagaucgaccggcugaacgaggucgccaagaaccucaacgagucccugaucgaccugcaggagcucggcaaguacgagcaguacaucaaguggcccugguacaucuggcugggguucaucgccggccugaucgccaucgugauggugaccaucaugcucugcugcaugaccagcugcugcuccugccugaaggggugcugcagcugcggcuccugcugcaaguucgacgaggacgacagcgagccgguccugaagggggugaagcuccacuacacgugaggacuaguguccaccugucccuccugggcugcuggauugucucguuuuccugccaaauaaacaggaucagcgcuuuacagaucuaaaaaaaaaaaaaaaaaaaaaaaaaaaaaaaaaaaaaaaaaaaaaaaaaaaaaaaaaaaaaaaaaaaaaaaaaaaaaaaaaaaaaaaaaaaaaaaaaaaa

SEQ ID NO: 25310 - RNA, 4105 nt, Artificial Sequence
  SARS-CoV-2/Wuhan/WIV05/2019__EPI_ISL_402128 spike protein mRNA gc (1-1273)(K986P_V987P_K986P_V987P_E484K_D614G)
aggagacccgugacccggaaguuguacggcuacgcgacuuucccucccacaaacccucgcgcccuuccuuuccuacuugggcccggcagaaagcuuaccauguucguguuccugguccuccugccccuggugagcucccagugcgugaaccucaccacccgcacgcagcugccgcccgccuacaccaacagcuucacccggggcgucuacuaccccgacaagguguuccgcuccagcgugcugcacuccacccaggaccucuuccugcccuucuucagcaacgucacgugguuccacgccauccacguguccgggaccaacggcaccaagcgguucgacaacccggugcugcccuucaacgacggggucuacuucgcgagcaccgagaaguccaacaucauccgcggcuggaucuucgggacgacccucgacagcaagacccagucccugcugaucgugaacaacgccaccaacguggucaucaaggugugcgaguuccaguucugcaacgaccccuuccucggcguguacuaccacaagaacaacaagagcuggauggaguccgaguuccgggucuacagcuccgccaacaacugcacguucgaguacgugagccagcccuuccugauggaccuggagggcaagcaggggaacuucaagaaccuccgcgaguucguguucaagaacaucgacggcuacuucaagaucuacuccaagcacaccccgaucaaccugguccgggaccugccccagggguucagcgcccucgagccccugguggaccugcccaucggcaucaacaucacccgcuuccagacccuccuggcccugcaccgguccuaccucacgccgggggacagcagcuccggcuggaccgcgggcgccgccgccuacuacgugggguaccugcagccccgcaccuuccugcucaaguacaacgagaacggcaccaucacggacgcggucgacugcgcccuggacccccugagcgagaccaagugcacccucaaguccuucaccguggagaaggggaucuaccagacgagcaacuuccgggugcagcccaccgaguccaucguccgcuucccgaacaucaccaaccugugccccuucggcgagguguucaacgccacccgguucgccagcgucuacgccuggaaccgcaagcggaucuccaacugcguggcggacuacagcgugcuguacaacuccgccagcuucuccacguucaagugcuacggcgucagccccaccaagcucaacgaccugugcuucaccaacguguacgccgacuccuucgugauccgcggggacgagguccggcagaucgcccccggccagaccgggaagaucgccgacuacaacuacaagcugccggacgacuucacgggcugcgugaucgcguggaacagcaacaaccucgacuccaaggucgggggcaacuacaacuaccuguaccgccuguuccgcaagagcaaccucaagcccuucgagcgggacaucuccaccgagaucuaccaggccggcagcacccccugcaacggggugaagggcuucaacugcuacuucccccugcaguccuacggguuccagccgaccaacggcgugggguaccagcccuaccggguggucgugcugagcuucgagcuccugcacgcccccgccacggugugcggccccaagaaguccaccaaccuggucaagaacaagugcgugaacuucaacuucaacggccucaccgggaccggcgugcugaccgagagcaacaagaaguuccugccguuccagcaguucgggcgcgacaucgccgacacgaccgacgcgguccgcgacccccagacccuggagauccucgacaucacccccugcagcuucggcgggguguccgugaucacgccgggcaccaacaccagcaaccaggucgccgugcuguaccagggcgugaacugcaccgagguccccguggccauccacgccgaccagcugacgcccaccuggcggguguacuccaccgggagcaacgucuuccagacccgcgccggcugccucaucggggcggagcacgugaacaacuccuacgagugcgacauccccaucggcgccggcaucugcgccagcuaccagacgcagaccaacuccccgcggcgcgcccggagcguggcgucccagagcaucaucgccuacaccaugucccugggggccgagaacagcgucgccuacuccaacaacagcaucgccauccccaccaacuucacgaucuccgugaccaccgagauccugcccgugagcaugaccaagacgagcgucgacugcaccauguacaucugcggcgacuccaccgagugcagcaaccuccugcugcaguacggguccuucugcacccagcucaaccgcgcgcugacgggcaucgccguggagcaggacaagaacacccaggagguguucgcccaggucaagcagaucuacaagacgcccccgaucaaggacuucgggggcuucaacuucagccagauccugcccgaccccuccaagcccagcaagcgguccuucaucgaggaccuccuguucaacaaggugacccuggccgacgccggcuucaucaagcaguacggggacugccucggcgacaucgcggcccgcgaccugaucugcgcccagaaguucaacgggcugaccgugcucccgccccugcugaccgacgagaugaucgcccaguacaccagcgcccuccuggcgggcaccaucacguccggguggaccuucggcgccggcgccgcccugcagauccccuucgcgaugcagauggccuaccgguucaacgggaucggcgucacccagaacgugcucuacgagaaccagaagcugaucgccaaccaguucaacagcgccaucgggaagauccaggacucccugagcuccaccgccagcgcgcucggcaagcugcaggacguggucaaccagaacgcccaggcccugaacacgcucgugaagcagcuguccagcaacuucggggccaucuccagcgugcugaacgacauccucucccgccuggacccgcccgaggccgagguccagaucgaccggcugaucaccggccgccuccagagccugcagaccuacgugacccagcagcugauccgggcggccgagauccgcgccagcgccaaccucgccgcgaccaagauguccgagugcgugcugggccagagcaagcgggucgacuucugcgggaagggcuaccaccugauguccuucccccagagcgcgccccacggggugguguuccuccacgucacguacgugcccgcccaggagaagaacuucaccaccgccccggccaucugccacgacggcaaggcccacuucccccgcgagggggucuucguguccaacggcacccacugguucgugacgcagcggaacuucuacgagccccagaucaucaccaccgacaacaccuucgucagcggcaacugcgacguggugaucgggaucgucaacaacacgguguacgacccccugcagccggagcuggacuccuucaaggaggagcucgacaaguacuucaagaaccacaccagccccgacguggaccugggcgacaucuccgggaucaacgccagcgucgugaacauccagaaggagaucgaccgccugaacgagguggccaagaaccucaacgagucccugaucgaccugcaggagcucggcaaguacgagcaguacaucaaguggcccugguacaucuggcugggcuucaucgccgggcugaucgcgaucgucauggugaccaucaugcucugcugcaugaccagcugcugcuccugccugaagggcugcugcagcugcggguccugcugcaaguucgacgaggacgacagcgagccggugcugaagggcgucaagcuccacuacacgugaggacuaguguccaccugucccuccugggcugcuggauugucucguuuuccugccaaauaaacaggaucagcgcuuuacagaucuaaaaaaaaaaaaaaaaaaaaaaaaaaaaaaaaaaaaaaaaaaaaaaaaaaaaaaaaaaaaaaaaaaaaaaaaaaaaaaaaaaaaaaaaaaaaaaaaaaaa

SEQ ID NO: 25311 - RNA, 4105 nt, Artificial Sequence
  SARS-CoV-2/Wuhan/WIV05/2019__EPI_ISL_402128 spike protein mRNA gc (1-1273)(K986P_V987P_K986P_V987P_L18F_T20N_P26S_D138Y_R190S_K417T _E484K_N501Y_D614G_H655Y_T1027I)
aggagacccgugacccggaaguuguacggcuacgcgacuuucccucccacaaacccucgcgcccuuccuuuccuacuugggcccggcagaaagcuuaccauguucguguuccugguccuccugccccuggugagcucccagugcgugaacuucaccaaccgcacccagcucccgagcgccuacacgaacuccuucacccggggcgucuacuaccccgacaagguguuccgcagcuccgugcugcacagcacccaggaccuguuccuccccuucuucuccaacgucaccugguuccacgccauccacgugagcgggacgaacggcaccaagcgguucgacaaccccgugcugccguucaacgacggggucuacuucgcguccaccgagaaguccaacaucauccgcggcuggaucuucgggaccacgcuggacuccaagacccagagccuccugaucgugaacaacgccaccaacguggucaucaaggugugcgaguuccaguucugcaacuaccccuuccugggcguguacuaccacaagaacaacaaguccuggauggagagcgaguuccgggucuacuccagcgccaacaacugcaccuucgaguacgugucccagcccuuccucauggaccuggagggcaagcaggggaacuucaagaaccugagcgaguucguguucaagaacaucgacggcuacuucaagaucuacuccaagcacacgcccaucaaccucguccgcgaccugccgcagggguucagcgcccuggagccccucguggaccugcccaucggcaucaacaucacccgguuccagacccugcucgcccugcaccgcagcuaccugacccccggggacuccagcuccggcuggacggcgggcgccgccgccuacuacgugggguaccuccagccgcggaccuuccugcugaaguacaacgagaacggcaccaucaccgacgcggucgacugcgcccucgacccccugagcgagacgaagugcacccugaaguccuucaccguggagaaggggaucuaccagaccagcaacuuccgcgugcagcccacggaguccaucguccgguuccccaacaucaccaaccucugcccguucggcgagguguucaacgccacccgcuucgccagcgucuacgccuggaaccggaagcgcaucuccaacugcguggcggacuacagcgugcuguacaacuccgccagcuucuccaccuucaagugcuacggcgucagccccacgaagcugaacgaccucugcuucaccaacguguacgccgacuccuucgugauccgcggggacgagguccggcagaucgcccccggccagaccgggaccaucgccgacuacaacuacaagcugcccgacgacuucacgggcugcgugaucgcguggaacagcaacaaccuggacuccaaggucgggggcaacuacaacuaccucuaccggcuguuccgcaagagcaaccugaagccguucgagcgggacaucuccaccgagaucuaccaggccggcagcacccccugcaacggggugaagggcuucaacugcuacuucccccuccagagcuacggguuccagcccaccuacggcgugggguaccagccguaccgcguggucgugcuguccuucgagcugcuccacgcccccgccacggugugcggccccaagaaguccaccaaccuggucaagaacaagugcgugaacuucaacuucaacggccugaccgggaccggcgugcucaccgagagcaacaagaaguuccugcccuuccagcaguucgggcgggacaucgccgacacgaccgacgcgguccgcgacccgcagacccuggagauccuggacaucacccccugcagcuucggcgggguguccgugaucacgcccggcaccaacaccagcaaccaggucgccgugcucuaccagggcgugaacugcaccgaggucccgguggccauccacgccgaccagcugacgcccaccuggcgcguguacuccaccgggagcaacgucuuccagacccgggccggcugccugaucggggcggaguacgugaacaacuccuacgagugcgacauccccaucggcgccggcaucugcgccagcuaccagacgcagaccaacagcccccgccgggcccgcagcguggcgucccagagcaucaucgccuacaccaugucccucggggccgagaacagcgucgccuacuccaacaacagcaucgccaucccgaccaacuucacgaucagcgugaccaccgagauccugcccguguccaugaccaagacgagcgucgacugcaccauguacaucugcggcgacuccaccgagugcagcaaccugcuccugcaguacggguccuucugcacccagcugaaccgggcgcucacgggcaucgccguggagcaggacaagaacacccaggagguguucgcccaggucaagcagaucuacaagaccccgcccaucaaggacuucgggggcuucaacuucagccagauccugcccgaccccuccaagcccagcaagcgcuccuucaucgaggaccuccuguucaacaaggugacccuggccgacgccggcuucaucaagcaguacggggacugccugggcgacaucgcggcccgggaccucaucugcgcccagaaguucaacgggcugacggugcugcccccgcuccugaccgacgagaugaucgcccaguacaccagcgcccugcucgcgggcaccaucacguccggguggaccuucggcgccggcgccgcccugcagauccccuucgcgaugcagauggccuaccgcuucaacgggaucggcgucacccagaacgugcuguacgagaaccagaagcucaucgccaaccaguucaacagcgccaucgggaagauccaggacucccugagcuccaccgccagcgcgcugggcaagcuccaggacguggucaaccagaacgcccaggcccugaacacgcuggugaagcagcucuccagcaacuucggggccaucuccagcgugcugaacgacauccugagccggcucgacccgcccgaggccgagguccagaucgaccgccugaucaccggccggcugcagucccuccagaccuacgugacccagcagcugauccgcgcggccgagauccgggccagcgccaaccuggccgcgaucaagauguccgagugcgugcucggccagagcaagcgcgucgacuucugcgggaagggcuaccaccugauguccuucccccagagcgcgccccacggggugguguuccugcacgucaccuacgugcccgcccaggagaagaacuucacgaccgcccccgccaucugccacgacggcaaggcccacuucccgcgggagggggucuucguguccaacggcacccacugguucgugacccagcgcaacuucuacgagccccagaucaucacgaccgacaacaccuucgucagcggcaacugcgacguggugaucgggaucgucaacaacaccguguacgacccccuccagcccgagcuggacuccuucaaggaggagcuggacaaguacuucaagaaccacacgagcccggacguggaccucggcgacaucuccgggaucaacgccagcgucgugaacauccagaaggagaucgaccggcugaacgagguggccaagaaccugaacgagucccucaucgaccugcaggagcugggcaaguacgagcaguacaucaaguggcccugguacaucuggcucggcuucaucgccgggcugaucgcgaucgucauggugaccaucaugcugugcugcaugaccagcugcugcuccugccucaagggcugcugcagcugcggguccugcugcaaguucgacgaggacgacagcgagcccgugcugaagggcgucaagcugcacuacaccugaggacuaguguccaccugucccuccugggcugcuggauugucucguuuuccugccaaauaaacaggaucagcgcuuuacagaucuaaaaaaaaaaaaaaaaaaaaaaaaaaaaaaaaaaaaaaaaaaaaaaaaaaaaaaaaaaaaaaaaaaaaaaaaaaaaaaaaaaaaaaaaaaaaaaaaaaaa

SEQ ID NO: 25312 - RNA, 4105 nt, Artificial Sequence
  SARS-CoV-2/Wuhan/WIV05/2019__EPI_ISL_402128 spike protein mRNA gc (1-1273)(K986P_V987P_K986P_V987P_S13I_W152C_L452R_D614G)
aggagacccgugacccggaaguuguacggcuacgcgacuuucccucccacaaacccucgcgcccuuccuuuccuacuugggcccggcagaaagcuuaccauguucguguuccugguccuccugccccuggugagcauccagugcgugaaccucaccacccgcacgcagcugccgcccgccuacaccaacuccuucacccggggcgucuacuaccccgacaagguguuccgcagcuccgugcugcacagcacccaggaccucuuccugcccuucuucuccaacgucacgugguuccacgccauccacgugagcgggaccaacggcaccaagcgguucgacaacccggugcugcccuucaacgacggggucuacuucgcguccaccgagaaguccaacaucauccgcggcuggaucuucgggacgacccucgacagcaagacccagagccugcugaucgugaacaacgccaccaacguggucaucaaggugugcgaguuccaguucugcaacgaccccuuccucggcguguacuaccacaagaacaacaaguccugcauggagagcgaguuccgggucuacuccagcgccaacaacugcacguucgaguacgugucccagcccuuccugauggaccuggagggcaagcaggggaacuucaagaaccuccgcgaguucguguucaagaacaucgacggcuacuucaagaucuacagcaagcacaccccgaucaaccugguccgggaccugccccagggguucuccgcccucgagccccugguggaccugcccaucggcaucaacaucacccgcuuccagacccuccuggcccugcaccggagcuaccucacgccgggggacuccagcagcggcuggaccgcgggcgccgccgccuacuacgugggguaccugcagccccgcaccuuccugcucaaguacaacgagaacggcaccaucacggacgcggucgacugcgcccuggacccccuguccgagaccaagugcacccucaagagcuucaccguggagaaggggaucuaccagacguccaacuuccgggugcagcccaccgagagcaucguccgcuucccgaacaucaccaaccugugccccuucggcgagguguucaacgccacccgguucgccuccgucuacgccuggaaccgcaagcggaucagcaacugcguggcggacuacuccgugcuguacaacagcgccuccuucagcacguucaagugcuacggcgucucccccaccaagcucaacgaccugugcuucaccaacguguacgccgacagcuucgugauccgcggggacgagguccggcagaucgcccccggccagaccgggaagaucgccgacuacaacuacaagcugccggacgacuucacgggcugcgugaucgcguggaacuccaacaaccucgacagcaaggucgggggcaacuacaacuaccgcuaccggcuguuccgcaaguccaaccugaagcccuucgagcgggacaucagcaccgagaucuaccaggccggcuccacccccugcaacgggguggagggcuucaacugcuacuucccccuccagagcuacggguuccagccgaccaacggcgugggguaccagcccuaccgcguggucgugcuguccuucgagcugcuccacgcccccgccacggugugcggccccaagaaguccaccaaccuggucaagaacaagugcgugaacuucaacuucaacggccugaccgggaccggcgugcucaccgagagcaacaagaaguuccugccguuccagcaguucgggcgcgacaucgccgacacgaccgacgcgguccgggacccccagacccuggagauccuggacaucacccccugcagcuucggcggggugagcgugaucacgccgggcaccaacaccuccaaccaggucgccgugcucuaccagggcgugaacugcaccgagguccccguggccauccacgccgaccagcugacgcccaccuggcgcguguacagcaccggguccaacgucuuccagacccgggccggcugccugaucggggcggagcacgugaacaacagcuacgagugcgacauccccaucggcgccggcaucugcgccuccuaccagacgcagaccaacagcccgcgccgggcccgcuccguggcgagccaguccaucaucgccuacaccaugagccucggggccgagaacuccgucgccuacagcaacaacuccaucgccauccccaccaacuucacgaucagcgugaccaccgagauccugcccguguccaugaccaagacgagcgucgacugcaccauguacaucugcggcgacagcaccgagugcuccaaccugcuccugcaguacgggagcuucugcacccagcugaaccgggcgcucacgggcaucgccguggagcaggacaagaacacccaggagguguucgcccaggucaagcagaucuacaagacgcccccgaucaaggacuucgggggcuucaacuucucccagauccugcccgaccccagcaagcccuccaagcgcagcuucaucgaggaccuccuguucaacaaggugacccuggccgacgccggcuucaucaagcaguacggggacugccugggcgacaucgcggcccgggaccucaucugcgcccagaaguucaacgggcugaccgugcugccgccccuccugaccgacgagaugaucgcccaguacaccuccgcccugcucgcgggcaccaucacgagcggguggaccuucggcgccggcgccgcccugcagauccccuucgcgaugcagauggccuaccgcuucaacgggaucggcgucacccagaacgugcuguacgagaaccagaagcucaucgccaaccaguucaacuccgccaucgggaagauccaggacagccuguccagcaccgccuccgcgcugggcaagcuccaggacguggucaaccagaacgcccaggcccugaacacgcuggugaagcagcucagcuccaacuucggggccaucagcuccgugcugaacgacauccugagccggcucgacccgcccgaggccgagguccagaucgaccgccugaucaccggccggcugcagucccuccagaccuacgugacccagcagcugauccgcgcggccgagauccgggccagcgccaaccuggccgcgaccaagaugagcgagugcgugcucggccaguccaagcgcgucgacuucugcgggaagggcuaccaccugaugagcuucccccaguccgcgccccacggggugguguuccugcacgucacguacgugcccgcccaggagaagaacuucaccaccgccccggccaucugccacgacggcaaggcccacuucccccgggagggggucuucgugagcaacggcacccacugguucgugacgcagcgcaacuucuacgagccccagaucaucaccaccgacaacaccuucgucuccggcaacugcgacguggugaucgggaucgucaacaacacgguguacgacccccuccagccggagcuggacagcuucaaggaggagcuggacaaguacuucaagaaccacaccucccccgacguggaccucggcgacaucagcgggaucaacgccuccgucgugaacauccagaaggagaucgaccggcugaacgagguggccaagaaccugaacgagagccucaucgaccugcaggagcugggcaaguacgagcaguacaucaaguggcccugguacaucuggcucggcuucaucgccgggcugaucgcgaucgucauggugaccaucaugcugugcugcaugaccuccugcugcagcugccucaagggcugcugcuccugcgggagcugcugcaaguucgacgaggacgacuccgagccggugcugaagggcgucaagcugcacuacacgugaggacuaguguccaccugucccuccugggcugcuggauugucucguuuuccugccaaauaaacaggaucagcgcuuuacagaucuaaaaaaaaaaaaaaaaaaaaaaaaaaaaaaaaaaaaaaaaaaaaaaaaaaaaaaaaaaaaaaaaaaaaaaaaaaaaaaaaaaaaaaaaaaaaaaaaaaaa

SEQ ID NO: 25313 - RNA, 4105 nt, Artificial Sequence
  SARS-CoV-2/Wuhan/WIV05/2019__EPI_ISL_402128 spike protein mRNA gc (1-1273)(K986P_V987P)
aggagacccgugacccggaaguuguacggcuacgcgacuuucccucccacaaacccucgcgcccuuccuuuccuacuugggcccggcagaaagcuuaccauguucguguuccuggugcugcugccccuggugagcagccagugcgugaaccugaccacccggacccagcugccaccagccuacaccaacagcuucacccggggcgucuacuaccccgacaagguguuccggagcagcguccugcacagcacccaggaccuguuccugcccuucuucagcaacgugaccugguuccacgccauccacgugagcggcaccaacggcaccaagcgguucgacaaccccgugcugcccuucaacgacggcguguacuucgccagcaccgagaagagcaacaucauccggggcuggaucuucggcaccacccuggacagcaagacccagagccugcugaucgugaauaacgccaccaacguggugaucaaggugugcgaguuccaguucugcaacgaccccuuccugggcguguacuaccacaagaacaacaagagcuggauggagagcgaguuccggguguacagcagcgccaacaacugcaccuucgaguacgugagccagcccuuccugauggaccuggagggcaagcagggcaacuucaagaaccugcgggaguucguguucaagaacaucgacggcuacuucaagaucuacagcaagcacaccccaaucaaccuggugcgggaucugccccagggcuucucagcccuggagccccugguggaccugcccaucggcaucaacaucacccgguuccagacccugcuggcccugcaccggagcuaccugaccccaggcgacagcagcagcggguggacagcaggcgcggcugcuuacuacgugggcuaccugcagccccggaccuuccugcugaaguacaacgagaacggcaccaucaccgacgccguggacugcgcccuggacccucugagcgagaccaagugcacccugaagagcuucaccguggagaagggcaucuaccagaccagcaacuuccgggugcagcccaccgagagcaucgugcgguuccccaacaucaccaaccugugccccuucggcgagguguucaacgccacccgguucgccagcguguacgccuggaaccggaagcggaucagcaacugcguggccgacuacagcgugcuguacaacagcgccagcuucagcaccuucaagugcuacggcgugagccccaccaagcugaacgaccugugcuucaccaacguguacgccgacagcuucgugauccguggcgacgaggugcggcagaucgcacccggccagacaggcaagaucgccgacuacaacuacaagcugcccgacgacuucaccggcugcgugaucgccuggaacagcaacaaccucgacagcaaggugggcggcaacuacaacuaccuguaccggcuguuccggaagagcaaccugaagcccuucgagcgggacaucagcaccgagaucuaccaagccggcuccaccccuugcaacggcguggagggcuucaacugcuacuucccucugcagagcuacggcuuccagcccaccaacggcgugggcuaccagcccuaccgggugguggugcugagcuucgagcugcugcacgccccagccaccguguguggccccaagaagagcaccaaccuggugaagaacaagugcgugaacuucaacuucaacggccuuaccggcaccggcgugcugaccgagagcaacaagaaauuccugcccuuucagcaguucggccgggacaucgccgacaccaccgacgcugugcgggauccccagacccuggagauccuggacaucaccccuugcagcuucggcggcgugagcgugaucaccccaggcaccaacaccagcaaccagguggccgugcuguaccaggacgugaacugcaccgaggugcccguggccauccacgccgaccagcugacacccaccuggcgggucuacagcaccggcagcaacguguuccagacccgggccgguugccugaucggcgccgagcacgugaacaacagcuacgagugcgacauccccaucggcgccggcaucugugccagcuaccagacccagaccaauucaccccggagggcaaggagcguggccagccagagcaucaucgccuacaccaugagccugggcgccgagaacagcguggccuacagcaacaacagcaucgccauccccaccaacuucaccaucagcgugaccaccgagauucugcccgugagcaugaccaagaccagcguggacugcaccauguacaucugcggcgacagcaccgagugcagcaaccugcugcugcaguacggcagcuucugcacccagcugaaccgggcccugaccggcaucgccguggagcaggacaagaacacccaggagguguucgcccaggugaagcagaucuacaagaccccucccaucaaggacuucggcggcuucaacuucagccagauccugcccgaccccagcaagcccagcaagcggagcuucaucgaggaccugcuguucaacaaggugacccuagccgacgccggcuucaucaagcaguacggcgacugccucggcgacauagccgcccgggaccugaucugcgcccagaaguucaacggccugaccgugcugccuccccugcugaccgacgagaugaucgcccaguacaccagcgcccuguuagccggaaccaucaccagcggcuggacuuucggcgcuggagccgcucugcagauccccuucgccaugcagauggccuaccgguucaacggcaucggcgugacccagaacgugcuguacgagaaccagaagcugaucgccaaccaguucaacagcgccaucggcaagauccaggacagccugagcagcaccgcuagcgcccugggcaagcugcaggacguggugaaccagaacgcccaggcccugaacacccuggugaagcagcugagcagcaacuucggcgccaucagcagcgugcugaacgacauccugagccggcuggacccucccgaggccgaggugcagaucgaccggcugaucacuggccggcugcagagccugcagaccuacgugacccagcagcugauccgggccgccgagauucgggccagcgccaaccuggccgccaccaagaugagcgagugcgugcugggccagagcaagcggguggacuucugcggcaagggcuaccaccugaugagcuuuccccagagcgcaccccacggagugguguuccugcacgugaccuacgugcccgcccaggagaagaacuucaccaccgccccagccaucugccacgacggcaaggcccacuuuccccgggagggcguguucgugagcaacggcacccacugguucgugacccagcggaacuucuacgagccccagaucaucaccaccgacaacaccuucgugagcggcaacugcgacguggugaucggcaucgugaacaacaccguguacgauccccugcagcccgagcuggacagcuucaaggaggagcuggacaaguacuucaagaaucacaccagccccgacguggaccugggcgacaucagcggcaucaacgccagcguggugaacauccagaaggagaucgaucggcugaacgagguggccaagaaccugaacgagagccugaucgaccugcaggagcugggcaaguacgagcaguacaucaaguggcccugguacaucuggcugggcuucaucgccggccugaucgccaucgugauggugaccaucaugcugugcugcaugaccagcugcugcagcugccugaagggcuguugcagcugcggcagcugcugcaaguucgacgaggacgacagcgagcccgugcugaagggcgugaagcugcacuacaccugaggacuaguguccaccugucccuccugggcugcuggauugucucguuuuccugccaaauaaacaggaucagcgcuuuacagaucuaaaaaaaaaaaaaaaaaaaaaaaaaaaaaaaaaaaaaaaaaaaaaaaaaaaaaaaaaaaaaaaaaaaaaaaaaaaaaaaaaaaaaaaaaaaaaaaaaaaa

SEQ ID NO: 25314 - RNA, 4105 nt, Artificial Sequence
  SARS-CoV-2/Wuhan/WIV05/2019__EPI_ISL_402128 spike protein mRNA gc (1-1273)(K986P_V987P_ D614G)
aggagacccgugacccggaaguuguacggcuacgcgacuuucccucccacaaacccucgcgcccuuccuuuccuacuugggcccggcagaaagcuuaccauguucguguuccuggugcugcugccccuggugagcagccagugcgugaaccugaccacccggacccagcugccaccagccuacaccaacagcuucacccggggcgucuacuaccccgacaagguguuccggagcagcguccugcacagcacccaggaccuguuccugcccuucuucagcaacgugaccugguuccacgccauccacgugagcggcaccaacggcaccaagcgguucgacaaccccgugcugcccuucaacgacggcguguacuucgccagcaccgagaagagcaacaucauccggggcuggaucuucggcaccacccuggacagcaagacccagagccugcugaucgugaauaacgccaccaacguggugaucaaggugugcgaguuccaguucugcaacgaccccuuccugggcguguacuaccacaagaacaacaagagcuggauggagagcgaguuccggguguacagcagcgccaacaacugcaccuucgaguacgugagccagcccuuccugauggaccuggagggcaagcagggcaacuucaagaaccugcgggaguucguguucaagaacaucgacggcuacuucaagaucuacagcaagcacaccccaaucaaccuggugcgggaucugccccagggcuucucagcccuggagccccugguggaccugcccaucggcaucaacaucacccgguuccagacccugcuggcccugcaccggagcuaccugaccccaggcgacagcagcagcggguggacagcaggcgcggcugcuuacuacgugggcuaccugcagccccggaccuuccugcugaaguacaacgagaacggcaccaucaccgacgccguggacugcgcccuggacccucugagcgagaccaagugcacccugaagagcuucaccguggagaagggcaucuaccagaccagcaacuuccgggugcagcccaccgagagcaucgugcgguuccccaacaucaccaaccugugccccuucggcgagguguucaacgccacccgguucgccagcguguacgccuggaaccggaagcggaucagcaacugcguggccgacuacagcgugcuguacaacagcgccagcuucagcaccuucaagugcuacggcgugagccccaccaagcugaacgaccugugcuucaccaacguguacgccgacagcuucgugauccguggcgacgaggugcggcagaucgcacccggccagacaggcaagaucgccgacuacaacuacaagcugcccgacgacuucaccggcugcgugaucgccuggaacagcaacaaccucgacagcaaggugggcggcaacuacaacuaccuguaccggcuguuccggaagagcaaccugaagcccuucgagcgggacaucagcaccgagaucuaccaagccggcuccaccccuugcaacggcguggagggcuucaacugcuacuucccucugcagagcuacggcuuccagcccaccaacggcgugggcuaccagcccuaccgggugguggugcugagcuucgagcugcugcacgccccagccaccguguguggccccaagaagagcaccaaccuggugaagaacaagugcgugaacuucaacuucaacggccuuaccggcaccggcgugcugaccgagagcaacaagaaauuccugcccuuucagcaguucggccgggacaucgccgacaccaccgacgcugugcgggauccccagacccuggagauccuggacaucaccccuugcagcuucggcggcgugagcgugaucaccccaggcaccaacaccagcaaccagguggccgugcuguaccagggcgugaacugcaccgaggugcccguggccauccacgccgaccagcugacacccaccuggcgggucuacagcaccggcagcaacguguuccagacccgggccgguugccugaucggcgccgagcacgugaacaacagcuacgagugcgacauccccaucggcgccggcaucugugccagcuaccagacccagaccaauucaccccggagggcaaggagcguggccagccagagcaucaucgccuacaccaugagccugggcgccgagaacagcguggccuacagcaacaacagcaucgccauccccaccaacuucaccaucagcgugaccaccgagauucugcccgugagcaugaccaagaccagcguggacugcaccauguacaucugcggcgacagcaccgagugcagcaaccugcugcugcaguacggcagcuucugcacccagcugaaccgggcccugaccggcaucgccguggagcaggacaagaacacccaggagguguucgcccaggugaagcagaucuacaagaccccucccaucaaggacuucggcggcuucaacuucagccagauccugcccgaccccagcaagcccagcaagcggagcuucaucgaggaccugcuguucaacaaggugacccuagccgacgccggcuucaucaagcaguacggcgacugccucggcgacauagccgcccgggaccugaucugcgcccagaaguucaacggccugaccgugcugccuccccugcugaccgacgagaugaucgcccaguacaccagcgcccuguuagccggaaccaucaccagcggcuggacuuucggcgcuggagccgcucugcagauccccuucgccaugcagauggccuaccgguucaacggcaucggcgugacccagaacgugcuguacgagaaccagaagcugaucgccaaccaguucaacagcgccaucggcaagauccaggacagccugagcagcaccgcuagcgcccugggcaagcugcaggacguggugaaccagaacgcccaggcccugaacacccuggugaagcagcugagcagcaacuucggcgccaucagcagcgugcugaacgacauccugagccggcuggacccucccgaggccgaggugcagaucgaccggcugaucacuggccggcugcagagccugcagaccuacgugacccagcagcugauccgggccgccgagauucgggccagcgccaaccuggccgccaccaagaugagcgagugcgugcugggccagagcaagcggguggacuucugcggcaagggcuaccaccugaugagcuuuccccagagcgcaccccacggagugguguuccugcacgugaccuacgugcccgcccaggagaagaacuucaccaccgccccagccaucugccacgacggcaaggcccacuuuccccgggagggcguguucgugagcaacggcacccacugguucgugacccagcggaacuucuacgagccccagaucaucaccaccgacaacaccuucgugagcggcaacugcgacguggugaucggcaucgugaacaacaccguguacgauccccugcagcccgagcuggacagcuucaaggaggagcuggacaaguacuucaagaaucacaccagccccgacguggaccugggcgacaucagcggcaucaacgccagcguggugaacauccagaaggagaucgaucggcugaacgagguggccaagaaccugaacgagagccugaucgaccugcaggagcugggcaaguacgagcaguacaucaaguggcccugguacaucuggcugggcuucaucgccggccugaucgccaucgugauggugaccaucaugcugugcugcaugaccagcugcugcagcugccugaagggcuguugcagcugcggcagcugcugcaaguucgacgaggacgacagcgagcccgugcugaagggcgugaagcugcacuacaccugaggacuaguguccaccugucccuccugggcugcuggauugucucguuuuccugccaaauaaacaggaucagcgcuuuacagaucuaaaaaaaaaaaaaaaaaaaaaaaaaaaaaaaaaaaaaaaaaaaaaaaaaaaaaaaaaaaaaaaaaaaaaaaaaaaaaaaaaaaaaaaaaaaaaaaaaaaa

SEQ ID NO: 25315 - RNA, 4105 nt, Artificial Sequence
  SARS-CoV-2/Wuhan/WIV05/2019__EPI_ISL_402128 spike protein mRNA gc (1-1273)(K986P_V987P_A222V_D614G)
aggagacccgugacccggaaguuguacggcuacgcgacuuucccucccacaaacccucgcgcccuuccuuuccuacuugggcccggcagaaagcuuaccauguucguguuccuggugcugcugccccuggugagcagccagugcgugaaccugaccacccggacccagcugccaccagccuacaccaacagcuucacccggggcgucuacuaccccgacaagguguuccggagcagcguccugcacagcacccaggaccuguuccugcccuucuucagcaacgugaccugguuccacgccauccacgugagcggcaccaacggcaccaagcgguucgacaaccccgugcugcccuucaacgacggcguguacuucgccagcaccgagaagagcaacaucauccggggcuggaucuucggcaccacccuggacagcaagacccagagccugcugaucgugaauaacgccaccaacguggugaucaaggugugcgaguuccaguucugcaacgaccccuuccugggcguguacuaccacaagaacaacaagagcuggauggagagcgaguuccggguguacagcagcgccaacaacugcaccuucgaguacgugagccagcccuuccugauggaccuggagggcaagcagggcaacuucaagaaccugcgggaguucguguucaagaacaucgacggcuacuucaagaucuacagcaagcacaccccaaucaaccuggugcgggaucugccccagggcuucucagugcuggagccccugguggaccugcccaucggcaucaacaucacccgguuccagacccugcuggcccugcaccggagcuaccugaccccaggcgacagcagcagcggguggacagcaggcgcggcugcuuacuacgugggcuaccugcagccccggaccuuccugcugaaguacaacgagaacggcaccaucaccgacgccguggacugcgcccuggacccucugagcgagaccaagugcacccugaagagcuucaccguggagaagggcaucuaccagaccagcaacuuccgggugcagcccaccgagagcaucgugcgguuccccaacaucaccaaccugugccccuucggcgagguguucaacgccacccgguucgccagcguguacgccuggaaccggaagcggaucagcaacugcguggccgacuacagcgugcuguacaacagcgccagcuucagcaccuucaagugcuacggcgugagccccaccaagcugaacgaccugugcuucaccaacguguacgccgacagcuucgugauccguggcgacgaggugcggcagaucgcacccggccagacaggcaagaucgccgacuacaacuacaagcugcccgacgacuucaccggcugcgugaucgccuggaacagcaacaaccucgacagcaaggugggcggcaacuacaacuaccuguaccggcuguuccggaagagcaaccugaagcccuucgagcgggacaucagcaccgagaucuaccaagccggcuccaccccuugcaacggcguggagggcuucaacugcuacuucccucugcagagcuacggcuuccagcccaccaacggcgugggcuaccagcccuaccgggugguggugcugagcuucgagcugcugcacgccccagccaccguguguggccccaagaagagcaccaaccuggugaagaacaagugcgugaacuucaacuucaacggccuuaccggcaccggcgugcugaccgagagcaacaagaaauuccugcccuuucagcaguucggccgggacaucgccgacaccaccgacgcugugcgggauccccagacccuggagauccuggacaucaccccuugcagcuucggcggcgugagcgugaucaccccaggcaccaacaccagcaaccagguggccgugcuguaccagggcgugaacugcaccgaggugcccguggccauccacgccgaccagcugacacccaccuggcgggucuacagcaccggcagcaacguguuccagacccgggccgguugccugaucggcgccgagcacgugaacaacagcuacgagugcgacauccccaucggcgccggcaucugugccagcuaccagacccagaccaauucaccccggagggcaaggagcguggccagccagagcaucaucgccuacaccaugagccugggcgccgagaacagcguggccuacagcaacaacagcaucgccauccccaccaacuucaccaucagcgugaccaccgagauucugcccgugagcaugaccaagaccagcguggacugcaccauguacaucugcggcgacagcaccgagugcagcaaccugcugcugcaguacggcagcuucugcacccagcugaaccgggcccugaccggcaucgccguggagcaggacaagaacacccaggagguguucgcccaggugaagcagaucuacaagaccccucccaucaaggacuucggcggcuucaacuucagccagauccugcccgaccccagcaagcccagcaagcggagcuucaucgaggaccugcuguucaacaaggugacccuagccgacgccggcuucaucaagcaguacggcgacugccucggcgacauagccgcccgggaccugaucugcgcccagaaguucaacggccugaccgugcugccuccccugcugaccgacgagaugaucgcccaguacaccagcgcccuguuagccggaaccaucaccagcggcuggacuuucggcgcuggagccgcucugcagauccccuucgccaugcagauggccuaccgguucaacggcaucggcgugacccagaacgugcuguacgagaaccagaagcugaucgccaaccaguucaacagcgccaucggcaagauccaggacagccugagcagcaccgcuagcgcccugggcaagcugcaggacguggugaaccagaacgcccaggcccugaacacccuggugaagcagcugagcagcaacuucggcgccaucagcagcgugcugaacgacauccugagccggcuggacccucccgaggccgaggugcagaucgaccggcugaucacuggccggcugcagagccugcagaccuacgugacccagcagcugauccgggccgccgagauucgggccagcgccaaccuggccgccaccaagaugagcgagugcgugcugggccagagcaagcggguggacuucugcggcaagggcuaccaccugaugagcuuuccccagagcgcaccccacggagugguguuccugcacgugaccuacgugcccgcccaggagaagaacuucaccaccgccccagccaucugccacgacggcaaggcccacuuuccccgggagggcguguucgugagcaacggcacccacugguucgugacccagcggaacuucuacgagccccagaucaucaccaccgacaacaccuucgugagcggcaacugcgacguggugaucggcaucgugaacaacaccguguacgauccccugcagcccgagcuggacagcuucaaggaggagcuggacaaguacuucaagaaucacaccagccccgacguggaccugggcgacaucagcggcaucaacgccagcguggugaacauccagaaggagaucgaucggcugaacgagguggccaagaaccugaacgagagccugaucgaccugcaggagcugggcaaguacgagcaguacaucaaguggcccugguacaucuggcugggcuucaucgccggccugaucgccaucgugauggugaccaucaugcugugcugcaugaccagcugcugcagcugccugaagggcuguugcagcugcggcagcugcugcaaguucgacgaggacgacagcgagcccgugcugaagggcgugaagcugcacuacaccugaggacuaguguccaccugucccuccugggcugcuggauugucucguuuuccugccaaauaaacaggaucagcgcuuuacagaucuaaaaaaaaaaaaaaaaaaaaaaaaaaaaaaaaaaaaaaaaaaaaaaaaaaaaaaaaaaaaaaaaaaaaaaaaaaaaaaaaaaaaaaaaaaaaaaaaaaaa

SEQ ID NO: 25316 - RNA, 4105 nt, Artificial Sequence
  SARS-CoV-2/Wuhan/WIV05/2019__EPI_ISL_402128 spike protein mRNA gc (1-1273)(K986P_V987P_N439K_D614G)
aggagacccgugacccggaaguuguacggcuacgcgacuuucccucccacaaacccucgcgcccuuccuuuccuacuugggcccggcagaaagcuuaccauguucguguuccuggugcugcugccccuggugagcagccagugcgugaaccugaccacccggacccagcugccaccagccuacaccaacagcuucacccggggcgucuacuaccccgacaagguguuccggagcagcguccugcacagcacccaggaccuguuccugcccuucuucagcaacgugaccugguuccacgccauccacgugagcggcaccaacggcaccaagcgguucgacaaccccgugcugcccuucaacgacggcguguacuucgccagcaccgagaagagcaacaucauccggggcuggaucuucggcaccacccuggacagcaagacccagagccugcugaucgugaauaacgccaccaacguggugaucaaggugugcgaguuccaguucugcaacgaccccuuccugggcguguacuaccacaagaacaacaagagcuggauggagagcgaguuccggguguacagcagcgccaacaacugcaccuucgaguacgugagccagcccuuccugauggaccuggagggcaagcagggcaacuucaagaaccugcgggaguucguguucaagaacaucgacggcuacuucaagaucuacagcaagcacaccccaaucaaccuggugcgggaucugccccagggcuucucagcccuggagccccugguggaccugcccaucggcaucaacaucacccgguuccagacccugcuggcccugcaccggagcuaccugaccccaggcgacagcagcagcggguggacagcaggcgcggcugcuuacuacgugggcuaccugcagccccggaccuuccugcugaaguacaacgagaacggcaccaucaccgacgccguggacugcgcccuggacccucugagcgagaccaagugcacccugaagagcuucaccguggagaagggcaucuaccagaccagcaacuuccgggugcagcccaccgagagcaucgugcgguuccccaacaucaccaaccugugccccuucggcgagguguucaacgccacccgguucgccagcguguacgccuggaaccggaagcggaucagcaacugcguggccgacuacagcgugcuguacaacagcgccagcuucagcaccuucaagugcuacggcgugagccccaccaagcugaacgaccugugcuucaccaacguguacgccgacagcuucgugauccguggcgacgaggugcggcagaucgcacccggccagacaggcaagaucgccgacuacaacuacaagcugcccgacgacuucaccggcugcgugaucgccuggaacagcaagaaccucgacagcaaggugggcggcaacuacaacuaccuguaccggcuguuccggaagagcaaccugaagcccuucgagcgggacaucagcaccgagaucuaccaagccggcuccaccccuugcaacggcguggagggcuucaacugcuacuucccucugcagagcuacggcuuccagcccaccaacggcgugggcuaccagcccuaccgggugguggugcugagcuucgagcugcugcacgccccagccaccguguguggccccaagaagagcaccaaccuggugaagaacaagugcgugaacuucaacuucaacggccuuaccggcaccggcgugcugaccgagagcaacaagaaauuccugcccuuucagcaguucggccgggacaucgccgacaccaccgacgcugugcgggauccccagacccuggagauccuggacaucaccccuugcagcuucggcggcgugagcgugaucaccccaggcaccaacaccagcaaccagguggccgugcuguaccagggcgugaacugcaccgaggugcccguggccauccacgccgaccagcugacacccaccuggcgggucuacagcaccggcagcaacguguuccagacccgggccgguugccugaucggcgccgagcacgugaacaacagcuacgagugcgacauccccaucggcgccggcaucugugccagcuaccagacccagaccaauucaccccggagggcaaggagcguggccagccagagcaucaucgccuacaccaugagccugggcgccgagaacagcguggccuacagcaacaacagcaucgccauccccaccaacuucaccaucagcgugaccaccgagauucugcccgugagcaugaccaagaccagcguggacugcaccauguacaucugcggcgacagcaccgagugcagcaaccugcugcugcaguacggcagcuucugcacccagcugaaccgggcccugaccggcaucgccguggagcaggacaagaacacccaggagguguucgcccaggugaagcagaucuacaagaccccucccaucaaggacuucggcggcuucaacuucagccagauccugcccgaccccagcaagcccagcaagcggagcuucaucgaggaccugcuguucaacaaggugacccuagccgacgccggcuucaucaagcaguacggcgacugccucggcgacauagccgcccgggaccugaucugcgcccagaaguucaacggccugaccgugcugccuccccugcugaccgacgagaugaucgcccaguacaccagcgcccuguuagccggaaccaucaccagcggcuggacuuucggcgcuggagccgcucugcagauccccuucgccaugcagauggccuaccgguucaacggcaucggcgugacccagaacgugcuguacgagaaccagaagcugaucgccaaccaguucaacagcgccaucggcaagauccaggacagccugagcagcaccgcuagcgcccugggcaagcugcaggacguggugaaccagaacgcccaggcccugaacacccuggugaagcagcugagcagcaacuucggcgccaucagcagcgugcugaacgacauccugagccggcuggacccucccgaggccgaggugcagaucgaccggcugaucacuggccggcugcagagccugcagaccuacgugacccagcagcugauccgggccgccgagauucgggccagcgccaaccuggccgccaccaagaugagcgagugcgugcugggccagagcaagcggguggacuucugcggcaagggcuaccaccugaugagcuuuccccagagcgcaccccacggagugguguuccugcacgugaccuacgugcccgcccaggagaagaacuucaccaccgccccagccaucugccacgacggcaaggcccacuuuccccgggagggcguguucgugagcaacggcacccacugguucgugacccagcggaacuucuacgagccccagaucaucaccaccgacaacaccuucgugagcggcaacugcgacguggugaucggcaucgugaacaacaccguguacgauccccugcagcccgagcuggacagcuucaaggaggagcuggacaaguacuucaagaaucacaccagccccgacguggaccugggcgacaucagcggcaucaacgccagcguggugaacauccagaaggagaucgaucggcugaacgagguggccaagaaccugaacgagagccugaucgaccugcaggagcugggcaaguacgagcaguacaucaaguggcccugguacaucuggcugggcuucaucgccggccugaucgccaucgugauggugaccaucaugcugugcugcaugaccagcugcugcagcugccugaagggcuguugcagcugcggcagcugcugcaaguucgacgaggacgacagcgagcccgugcugaagggcgugaagcugcacuacaccugaggacuaguguccaccugucccuccugggcugcuggauugucucguuuuccugccaaauaaacaggaucagcgcuuuacagaucuaaaaaaaaaaaaaaaaaaaaaaaaaaaaaaaaaaaaaaaaaaaaaaaaaaaaaaaaaaaaaaaaaaaaaaaaaaaaaaaaaaaaaaaaaaaaaaaaaaaa

SEQ ID NO: 25317 - RNA, 4105 nt, Artificial Sequence
  SARS-CoV-2/Wuhan/WIV05/2019__EPI_ISL_402128 spike protein mRNA gc (1-1273)(K986P_V987P_S477N_D614G)
aggagacccgugacccggaaguuguacggcuacgcgacuuucccucccacaaacccucgcgcccuuccuuuccuacuugggcccggcagaaagcuuaccauguucguguuccuggugcugcugccccuggugagcagccagugcgugaaccugaccacccggacccagcugccaccagccuacaccaacagcuucacccggggcgucuacuaccccgacaagguguuccggagcagcguccugcacagcacccaggaccuguuccugcccuucuucagcaacgugaccugguuccacgccauccacgugagcggcaccaacggcaccaagcgguucgacaaccccgugcugcccuucaacgacggcguguacuucgccagcaccgagaagagcaacaucauccggggcuggaucuucggcaccacccuggacagcaagacccagagccugcugaucgugaauaacgccaccaacguggugaucaaggugugcgaguuccaguucugcaacgaccccuuccugggcguguacuaccacaagaacaacaagagcuggauggagagcgaguuccggguguacagcagcgccaacaacugcaccuucgaguacgugagccagcccuuccugauggaccuggagggcaagcagggcaacuucaagaaccugcgggaguucguguucaagaacaucgacggcuacuucaagaucuacagcaagcacaccccaaucaaccuggugcgggaucugccccagggcuucucagcccuggagccccugguggaccugcccaucggcaucaacaucacccgguuccagacccugcuggcccugcaccggagcuaccugaccccaggcgacagcagcagcggguggacagcaggcgcggcugcuuacuacgugggcuaccugcagccccggaccuuccugcugaaguacaacgagaacggcaccaucaccgacgccguggacugcgcccuggacccucugagcgagaccaagugcacccugaagagcuucaccguggagaagggcaucuaccagaccagcaacuuccgggugcagcccaccgagagcaucgugcgguuccccaacaucaccaaccugugccccuucggcgagguguucaacgccacccgguucgccagcguguacgccuggaaccggaagcggaucagcaacugcguggccgacuacagcgugcuguacaacagcgccagcuucagcaccuucaagugcuacggcgugagccccaccaagcugaacgaccugugcuucaccaacguguacgccgacagcuucgugauccguggcgacgaggugcggcagaucgcacccggccagacaggcaagaucgccgacuacaacuacaagcugcccgacgacuucaccggcugcgugaucgccuggaacagcaacaaccucgacagcaaggugggcggcaacuacaacuaccuguaccggcuguuccggaagagcaaccugaagcccuucgagcgggacaucagcaccgagaucuaccaagccggcaacaccccuugcaacggcguggagggcuucaacugcuacuucccucugcagagcuacggcuuccagcccaccaacggcgugggcuaccagcccuaccgggugguggugcugagcuucgagcugcugcacgccccagccaccguguguggccccaagaagagcaccaaccuggugaagaacaagugcgugaacuucaacuucaacggccuuaccggcaccggcgugcugaccgagagcaacaagaaauuccugcccuuucagcaguucggccgggacaucgccgacaccaccgacgcugugcgggauccccagacccuggagauccuggacaucaccccuugcagcuucggcggcgugagcgugaucaccccaggcaccaacaccagcaaccagguggccgugcuguaccagggcgugaacugcaccgaggugcccguggccauccacgccgaccagcugacacccaccuggcgggucuacagcaccggcagcaacguguuccagacccgggccgguugccugaucggcgccgagcacgugaacaacagcuacgagugcgacauccccaucggcgccggcaucugugccagcuaccagacccagaccaauucaccccggagggcaaggagcguggccagccagagcaucaucgccuacaccaugagccugggcgccgagaacagcguggccuacagcaacaacagcaucgccauccccaccaacuucaccaucagcgugaccaccgagauucugcccgugagcaugaccaagaccagcguggacugcaccauguacaucugcggcgacagcaccgagugcagcaaccugcugcugcaguacggcagcuucugcacccagcugaaccgggcccugaccggcaucgccguggagcaggacaagaacacccaggagguguucgcccaggugaagcagaucuacaagaccccucccaucaaggacuucggcggcuucaacuucagccagauccugcccgaccccagcaagcccagcaagcggagcuucaucgaggaccugcuguucaacaaggugacccuagccgacgccggcuucaucaagcaguacggcgacugccucggcgacauagccgcccgggaccugaucugcgcccagaaguucaacggccugaccgugcugccuccccugcugaccgacgagaugaucgcccaguacaccagcgcccuguuagccggaaccaucaccagcggcuggacuuucggcgcuggagccgcucugcagauccccuucgccaugcagauggccuaccgguucaacggcaucggcgugacccagaacgugcuguacgagaaccagaagcugaucgccaaccaguucaacagcgccaucggcaagauccaggacagccugagcagcaccgcuagcgcccugggcaagcugcaggacguggugaaccagaacgcccaggcccugaacacccuggugaagcagcugagcagcaacuucggcgccaucagcagcgugcugaacgacauccugagccggcuggacccucccgaggccgaggugcagaucgaccggcugaucacuggccggcugcagagccugcagaccuacgugacccagcagcugauccgggccgccgagauucgggccagcgccaaccuggccgccaccaagaugagcgagugcgugcugggccagagcaagcggguggacuucugcggcaagggcuaccaccugaugagcuuuccccagagcgcaccccacggagugguguuccugcacgugaccuacgugcccgcccaggagaagaacuucaccaccgccccagccaucugccacgacggcaaggcccacuuuccccgggagggcguguucgugagcaacggcacccacugguucgugacccagcggaacuucuacgagccccagaucaucaccaccgacaacaccuucgugagcggcaacugcgacguggugaucggcaucgugaacaacaccguguacgauccccugcagcccgagcuggacagcuucaaggaggagcuggacaaguacuucaagaaucacaccagccccgacguggaccugggcgacaucagcggcaucaacgccagcguggugaacauccagaaggagaucgaucggcugaacgagguggccaagaaccugaacgagagccugaucgaccugcaggagcugggcaaguacgagcaguacaucaaguggcccugguacaucuggcugggcuucaucgccggccugaucgccaucgugauggugaccaucaugcugugcugcaugaccagcugcugcagcugccugaagggcuguugcagcugcggcagcugcugcaaguucgacgaggacgacagcgagcccgugcugaagggcgugaagcugcacuacaccugaggacuaguguccaccugucccuccugggcugcuggauugucucguuuuccugccaaauaaacaggaucagcgcuuuacagaucuaaaaaaaaaaaaaaaaaaaaaaaaaaaaaaaaaaaaaaaaaaaaaaaaaaaaaaaaaaaaaaaaaaaaaaaaaaaaaaaaaaaaaaaaaaaaaaaaaaaa

SEQ ID NO: 25318 - RNA, 4105 nt, Artificial Sequence
  SARS-CoV-2/Wuhan/WIV05/2019__EPI_ISL_402128 spike protein mRNA gc (1-1273)(K986P_V987P_N501Y_D614G)
aggagacccgugacccggaaguuguacggcuacgcgacuuucccucccacaaacccucgcgcccuuccuuuccuacuugggcccggcagaaagcuuaccauguucguguuccuggugcugcugccccuggugagcagccagugcgugaaccugaccacccggacccagcugccaccagccuacaccaacagcuucacccggggcgucuacuaccccgacaagguguuccggagcagcguccugcacagcacccaggaccuguuccugcccuucuucagcaacgugaccugguuccacgccauccacgugagcggcaccaacggcaccaagcgguucgacaaccccgugcugcccuucaacgacggcguguacuucgccagcaccgagaagagcaacaucauccggggcuggaucuucggcaccacccuggacagcaagacccagagccugcugaucgugaauaacgccaccaacguggugaucaaggugugcgaguuccaguucugcaacgaccccuuccugggcguguacuaccacaagaacaacaagagcuggauggagagcgaguuccggguguacagcagcgccaacaacugcaccuucgaguacgugagccagcccuuccugauggaccuggagggcaagcagggcaacuucaagaaccugcgggaguucguguucaagaacaucgacggcuacuucaagaucuacagcaagcacaccccaaucaaccuggugcgggaucugccccagggcuucucagcccuggagccccugguggaccugcccaucggcaucaacaucacccgguuccagacccugcuggcccugcaccggagcuaccugaccccaggcgacagcagcagcggguggacagcaggcgcggcugcuuacuacgugggcuaccugcagccccggaccuuccugcugaaguacaacgagaacggcaccaucaccgacgccguggacugcgcccuggacccucugagcgagaccaagugcacccugaagagcuucaccguggagaagggcaucuaccagaccagcaacuuccgggugcagcccaccgagagcaucgugcgguuccccaacaucaccaaccugugccccuucggcgagguguucaacgccacccgguucgccagcguguacgccuggaaccggaagcggaucagcaacugcguggccgacuacagcgugcuguacaacagcgccagcuucagcaccuucaagugcuacggcgugagccccaccaagcugaacgaccugugcuucaccaacguguacgccgacagcuucgugauccguggcgacgaggugcggcagaucgcacccggccagacaggcaagaucgccgacuacaacuacaagcugcccgacgacuucaccggcugcgugaucgccuggaacagcaacaaccucgacagcaaggugggcggcaacuacaacuaccuguaccggcuguuccggaagagcaaccugaagcccuucgagcgggacaucagcaccgagaucuaccaagccggcuccaccccuugcaacggcguggagggcuucaacugcuacuucccucugcagagcuacggcuuccagcccaccuacggcgugggcuaccagcccuaccgggugguggugcugagcuucgagcugcugcacgccccagccaccguguguggccccaagaagagcaccaaccuggugaagaacaagugcgugaacuucaacuucaacggccuuaccggcaccggcgugcugaccgagagcaacaagaaauuccugcccuuucagcaguucggccgggacaucgccgacaccaccgacgcugugcgggauccccagacccuggagauccuggacaucaccccuugcagcuucggcggcgugagcgugaucaccccaggcaccaacaccagcaaccagguggccgugcuguaccagggcgugaacugcaccgaggugcccguggccauccacgccgaccagcugacacccaccuggcgggucuacagcaccggcagcaacguguuccagacccgggccgguugccugaucggcgccgagcacgugaacaacagcuacgagugcgacauccccaucggcgccggcaucugugccagcuaccagacccagaccaauucaccccggagggcaaggagcguggccagccagagcaucaucgccuacaccaugagccugggcgccgagaacagcguggccuacagcaacaacagcaucgccauccccaccaacuucaccaucagcgugaccaccgagauucugcccgugagcaugaccaagaccagcguggacugcaccauguacaucugcggcgacagcaccgagugcagcaaccugcugcugcaguacggcagcuucugcacccagcugaaccgggcccugaccggcaucgccguggagcaggacaagaacacccaggagguguucgcccaggugaagcagaucuacaagaccccucccaucaaggacuucggcggcuucaacuucagccagauccugcccgaccccagcaagcccagcaagcggagcuucaucgaggaccugcuguucaacaaggugacccuagccgacgccggcuucaucaagcaguacggcgacugccucggcgacauagccgcccgggaccugaucugcgcccagaaguucaacggccugaccgugcugccuccccugcugaccgacgagaugaucgcccaguacaccagcgcccuguuagccggaaccaucaccagcggcuggacuuucggcgcuggagccgcucugcagauccccuucgccaugcagauggccuaccgguucaacggcaucggcgugacccagaacgugcuguacgagaaccagaagcugaucgccaaccaguucaacagcgccaucggcaagauccaggacagccugagcagcaccgcuagcgcccugggcaagcugcaggacguggugaaccagaacgcccaggcccugaacacccuggugaagcagcugagcagcaacuucggcgccaucagcagcgugcugaacgacauccugagccggcuggacccucccgaggccgaggugcagaucgaccggcugaucacuggccggcugcagagccugcagaccuacgugacccagcagcugauccgggccgccgagauucgggccagcgccaaccuggccgccaccaagaugagcgagugcgugcugggccagagcaagcggguggacuucugcggcaagggcuaccaccugaugagcuuuccccagagcgcaccccacggagugguguuccugcacgugaccuacgugcccgcccaggagaagaacuucaccaccgccccagccaucugccacgacggcaaggcccacuuuccccgggagggcguguucgugagcaacggcacccacugguucgugacccagcggaacuucuacgagccccagaucaucaccaccgacaacaccuucgugagcggcaacugcgacguggugaucggcaucgugaacaacaccguguacgauccccugcagcccgagcuggacagcuucaaggaggagcuggacaaguacuucaagaaucacaccagccccgacguggaccugggcgacaucagcggcaucaacgccagcguggugaacauccagaaggagaucgaucggcugaacgagguggccaagaaccugaacgagagccugaucgaccugcaggagcugggcaaguacgagcaguacaucaaguggcccugguacaucuggcugggcuucaucgccggccugaucgccaucgugauggugaccaucaugcugugcugcaugaccagcugcugcagcugccugaagggcuguugcagcugcggcagcugcugcaaguucgacgaggacgacagcgagcccgugcugaagggcgugaagcugcacuacaccugaggacuaguguccaccugucccuccugggcugcuggauugucucguuuuccugccaaauaaacaggaucagcgcuuuacagaucuaaaaaaaaaaaaaaaaaaaaaaaaaaaaaaaaaaaaaaaaaaaaaaaaaaaaaaaaaaaaaaaaaaaaaaaaaaaaaaaaaaaaaaaaaaaaaaaaaaaa

SEQ ID NO: 25319 - RNA, 4099 nt, Artificial Sequence
  SARS-CoV-2/Wuhan/WIV05/2019__EPI_ISL_402128 spike protein mRNA gc (1-1273)(K986P_V987P_H69del_V70del_D614G)
aggagacccgugacccggaaguuguacggcuacgcgacuuucccucccacaaacccucgcgcccuuccuuuccuacuugggcccggcagaaagcuuaccauguucguguuccuggugcugcugccccuggugagcagccagugcgugaaccugaccacccggacccagcugccaccagccuacaccaacagcuucacccggggcgucuacuaccccgacaagguguuccggagcagcguccugcacagcacccaggaccuguuccugcccuucuucagcaacgugaccugguuccacgccaucagcggcaccaacggcaccaagcgguucgacaaccccgugcugcccuucaacgacggcguguacuucgccagcaccgagaagagcaacaucauccggggcuggaucuucggcaccacccuggacagcaagacccagagccugcugaucgugaauaacgccaccaacguggugaucaaggugugcgaguuccaguucugcaacgaccccuuccugggcguguacuaccacaagaacaacaagagcuggauggagagcgaguuccggguguacagcagcgccaacaacugcaccuucgaguacgugagccagcccuuccugauggaccuggagggcaagcagggcaacuucaagaaccugcgggaguucguguucaagaacaucgacggcuacuucaagaucuacagcaagcacaccccaaucaaccuggugcgggaucugccccagggcuucucagcccuggagccccugguggaccugcccaucggcaucaacaucacccgguuccagacccugcuggcccugcaccggagcuaccugaccccaggcgacagcagcagcggguggacagcaggcgcggcugcuuacuacgugggcuaccugcagccccggaccuuccugcugaaguacaacgagaacggcaccaucaccgacgccguggacugcgcccuggacccucugagcgagaccaagugcacccugaagagcuucaccguggagaagggcaucuaccagaccagcaacuuccgggugcagcccaccgagagcaucgugcgguuccccaacaucaccaaccugugccccuucggcgagguguucaacgccacccgguucgccagcguguacgccuggaaccggaagcggaucagcaacugcguggccgacuacagcgugcuguacaacagcgccagcuucagcaccuucaagugcuacggcgugagccccaccaagcugaacgaccugugcuucaccaacguguacgccgacagcuucgugauccguggcgacgaggugcggcagaucgcacccggccagacaggcaagaucgccgacuacaacuacaagcugcccgacgacuucaccggcugcgugaucgccuggaacagcaacaaccucgacagcaaggugggcggcaacuacaacuaccuguaccggcuguuccggaagagcaaccugaagcccuucgagcgggacaucagcaccgagaucuaccaagccggcuccaccccuugcaacggcguggagggcuucaacugcuacuucccucugcagagcuacggcuuccagcccaccaacggcgugggcuaccagcccuaccgggugguggugcugagcuucgagcugcugcacgccccagccaccguguguggccccaagaagagcaccaaccuggugaagaacaagugcgugaacuucaacuucaacggccuuaccggcaccggcgugcugaccgagagcaacaagaaauuccugcccuuucagcaguucggccgggacaucgccgacaccaccgacgcugugcgggauccccagacccuggagauccuggacaucaccccuugcagcuucggcggcgugagcgugaucaccccaggcaccaacaccagcaaccagguggccgugcuguaccagggcgugaacugcaccgaggugcccguggccauccacgccgaccagcugacacccaccuggcgggucuacagcaccggcagcaacguguuccagacccgggccgguugccugaucggcgccgagcacgugaacaacagcuacgagugcgacauccccaucggcgccggcaucugugccagcuaccagacccagaccaauucaccccggagggcaaggagcguggccagccagagcaucaucgccuacaccaugagccugggcgccgagaacagcguggccuacagcaacaacagcaucgccauccccaccaacuucaccaucagcgugaccaccgagauucugcccgugagcaugaccaagaccagcguggacugcaccauguacaucugcggcgacagcaccgagugcagcaaccugcugcugcaguacggcagcuucugcacccagcugaaccgggcccugaccggcaucgccguggagcaggacaagaacacccaggagguguucgcccaggugaagcagaucuacaagaccccucccaucaaggacuucggcggcuucaacuucagccagauccugcccgaccccagcaagcccagcaagcggagcuucaucgaggaccugcuguucaacaaggugacccuagccgacgccggcuucaucaagcaguacggcgacugccucggcgacauagccgcccgggaccugaucugcgcccagaaguucaacggccugaccgugcugccuccccugcugaccgacgagaugaucgcccaguacaccagcgcccuguuagccggaaccaucaccagcggcuggacuuucggcgcuggagccgcucugcagauccccuucgccaugcagauggccuaccgguucaacggcaucggcgugacccagaacgugcuguacgagaaccagaagcugaucgccaaccaguucaacagcgccaucggcaagauccaggacagccugagcagcaccgcuagcgcccugggcaagcugcaggacguggugaaccagaacgcccaggcccugaacacccuggugaagcagcugagcagcaacuucggcgccaucagcagcgugcugaacgacauccugagccggcuggacccucccgaggccgaggugcagaucgaccggcugaucacuggccggcugcagagccugcagaccuacgugacccagcagcugauccgggccgccgagauucgggccagcgccaaccuggccgccaccaagaugagcgagugcgugcugggccagagcaagcggguggacuucugcggcaagggcuaccaccugaugagcuuuccccagagcgcaccccacggagugguguuccugcacgugaccuacgugcccgcccaggagaagaacuucaccaccgccccagccaucugccacgacggcaaggcccacuuuccccgggagggcguguucgugagcaacggcacccacugguucgugacccagcggaacuucuacgagccccagaucaucaccaccgacaacaccuucgugagcggcaacugcgacguggugaucggcaucgugaacaacaccguguacgauccccugcagcccgagcuggacagcuucaaggaggagcuggacaaguacuucaagaaucacaccagccccgacguggaccugggcgacaucagcggcaucaacgccagcguggugaacauccagaaggagaucgaucggcugaacgagguggccaagaaccugaacgagagccugaucgaccugcaggagcugggcaaguacgagcaguacaucaaguggcccugguacaucuggcugggcuucaucgccggccugaucgccaucgugauggugaccaucaugcugugcugcaugaccagcugcugcagcugccugaagggcuguugcagcugcggcagcugcugcaaguucgacgaggacgacagcgagcccgugcugaagggcgugaagcugcacuacaccugaggacuaguguccaccugucccuccugggcugcuggauugucucguuuuccugccaaauaaacaggaucagcgcuuuacagaucuaaaaaaaaaaaaaaaaaaaaaaaaaaaaaaaaaaaaaaaaaaaaaaaaaaaaaaaaaaaaaaaaaaaaaaaaaaaaaaaaaaaaaaaaaaaaaaaaaaaa

SEQ ID NO: 25320 - RNA, 4105 nt, Artificial Sequence
  SARS-CoV-2/Wuhan/WIV05/2019__EPI_ISL_402128 spike protein mRNA gc (1-1273)(K986P_V987P_Y453F_D614G)
aggagacccgugacccggaaguuguacggcuacgcgacuuucccucccacaaacccucgcgcccuuccuuuccuacuugggcccggcagaaagcuuaccauguucguguuccuggugcugcugccccuggugagcagccagugcgugaaccugaccacccggacccagcugccaccagccuacaccaacagcuucacccggggcgucuacuaccccgacaagguguuccggagcagcguccugcacagcacccaggaccuguuccugcccuucuucagcaacgugaccugguuccacgccauccacgugagcggcaccaacggcaccaagcgguucgacaaccccgugcugcccuucaacgacggcguguacuucgccagcaccgagaagagcaacaucauccggggcuggaucuucggcaccacccuggacagcaagacccagagccugcugaucgugaauaacgccaccaacguggugaucaaggugugcgaguuccaguucugcaacgaccccuuccugggcguguacuaccacaagaacaacaagagcuggauggagagcgaguuccggguguacagcagcgccaacaacugcaccuucgaguacgugagccagcccuuccugauggaccuggagggcaagcagggcaacuucaagaaccugcgggaguucguguucaagaacaucgacggcuacuucaagaucuacagcaagcacaccccaaucaaccuggugcgggaucugccccagggcuucucagcccuggagccccugguggaccugcccaucggcaucaacaucacccgguuccagacccugcuggcccugcaccggagcuaccugaccccaggcgacagcagcagcggguggacagcaggcgcggcugcuuacuacgugggcuaccugcagccccggaccuuccugcugaaguacaacgagaacggcaccaucaccgacgccguggacugcgcccuggacccucugagcgagaccaagugcacccugaagagcuucaccguggagaagggcaucuaccagaccagcaacuuccgggugcagcccaccgagagcaucgugcgguuccccaacaucaccaaccugugccccuucggcgagguguucaacgccacccgguucgccagcguguacgccuggaaccggaagcggaucagcaacugcguggccgacuacagcgugcuguacaacagcgccagcuucagcaccuucaagugcuacggcgugagccccaccaagcugaacgaccugugcuucaccaacguguacgccgacagcuucgugauccguggcgacgaggugcggcagaucgcacccggccagacaggcaagaucgccgacuacaacuacaagcugcccgacgacuucaccggcugcgugaucgccuggaacagcaacaaccucgacagcaaggugggcggcaacuacaacuaccuguuccggcuguuccggaagagcaaccugaagcccuucgagcgggacaucagcaccgagaucuaccaagccggcuccaccccuugcaacggcguggagggcuucaacugcuacuucccucugcagagcuacggcuuccagcccaccaacggcgugggcuaccagcccuaccgggugguggugcugagcuucgagcugcugcacgccccagccaccguguguggccccaagaagagcaccaaccuggugaagaacaagugcgugaacuucaacuucaacggccuuaccggcaccggcgugcugaccgagagcaacaagaaauuccugcccuuucagcaguucggccgggacaucgccgacaccaccgacgcugugcgggauccccagacccuggagauccuggacaucaccccuugcagcuucggcggcgugagcgugaucaccccaggcaccaacaccagcaaccagguggccgugcuguaccagggcgugaacugcaccgaggugcccguggccauccacgccgaccagcugacacccaccuggcgggucuacagcaccggcagcaacguguuccagacccgggccgguugccugaucggcgccgagcacgugaacaacagcuacgagugcgacauccccaucggcgccggcaucugugccagcuaccagacccagaccaauucaccccggagggcaaggagcguggccagccagagcaucaucgccuacaccaugagccugggcgccgagaacagcguggccuacagcaacaacagcaucgccauccccaccaacuucaccaucagcgugaccaccgagauucugcccgugagcaugaccaagaccagcguggacugcaccauguacaucugcggcgacagcaccgagugcagcaaccugcugcugcaguacggcagcuucugcacccagcugaaccgggcccugaccggcaucgccguggagcaggacaagaacacccaggagguguucgcccaggugaagcagaucuacaagaccccucccaucaaggacuucggcggcuucaacuucagccagauccugcccgaccccagcaagcccagcaagcggagcuucaucgaggaccugcuguucaacaaggugacccuagccgacgccggcuucaucaagcaguacggcgacugccucggcgacauagccgcccgggaccugaucugcgcccagaaguucaacggccugaccgugcugccuccccugcugaccgacgagaugaucgcccaguacaccagcgcccuguuagccggaaccaucaccagcggcuggacuuucggcgcuggagccgcucugcagauccccuucgccaugcagauggccuaccgguucaacggcaucggcgugacccagaacgugcuguacgagaaccagaagcugaucgccaaccaguucaacagcgccaucggcaagauccaggacagccugagcagcaccgcuagcgcccugggcaagcugcaggacguggugaaccagaacgcccaggcccugaacacccuggugaagcagcugagcagcaacuucggcgccaucagcagcgugcugaacgacauccugagccggcuggacccucccgaggccgaggugcagaucgaccggcugaucacuggccggcugcagagccugcagaccuacgugacccagcagcugauccgggccgccgagauucgggccagcgccaaccuggccgccaccaagaugagcgagugcgugcugggccagagcaagcggguggacuucugcggcaagggcuaccaccugaugagcuuuccccagagcgcaccccacggagugguguuccugcacgugaccuacgugcccgcccaggagaagaacuucaccaccgccccagccaucugccacgacggcaaggcccacuuuccccgggagggcguguucgugagcaacggcacccacugguucgugacccagcggaacuucuacgagccccagaucaucaccaccgacaacaccuucgugagcggcaacugcgacguggugaucggcaucgugaacaacaccguguacgauccccugcagcccgagcuggacagcuucaaggaggagcuggacaaguacuucaagaaucacaccagccccgacguggaccugggcgacaucagcggcaucaacgccagcguggugaacauccagaaggagaucgaucggcugaacgagguggccaagaaccugaacgagagccugaucgaccugcaggagcugggcaaguacgagcaguacaucaaguggcccugguacaucuggcugggcuucaucgccggccugaucgccaucgugauggugaccaucaugcugugcugcaugaccagcugcugcagcugccugaagggcuguugcagcugcggcagcugcugcaaguucgacgaggacgacagcgagcccgugcugaagggcgugaagcugcacuacaccugaggacuaguguccaccugucccuccugggcugcuggauugucucguuuuccugccaaauaaacaggaucagcgcuuuacagaucuaaaaaaaaaaaaaaaaaaaaaaaaaaaaaaaaaaaaaaaaaaaaaaaaaaaaaaaaaaaaaaaaaaaaaaaaaaaaaaaaaaaaaaaaaaaaaaaaaaaa

SEQ ID NO: 25321 - RNA, 4105 nt, Artificial Sequence
  SARS-CoV-2/Wuhan/WIV05/2019__EPI_ISL_402128 spike protein mRNA gc (1-1273)(K986P_V987P_D614G_I692V)
aggagacccgugacccggaaguuguacggcuacgcgacuuucccucccacaaacccucgcgcccuuccuuuccuacuugggcccggcagaaagcuuaccauguucguguuccuggugcugcugccccuggugagcagccagugcgugaaccugaccacccggacccagcugccaccagccuacaccaacagcuucacccggggcgucuacuaccccgacaagguguuccggagcagcguccugcacagcacccaggaccuguuccugcccuucuucagcaacgugaccugguuccacgccauccacgugagcggcaccaacggcaccaagcgguucgacaaccccgugcugcccuucaacgacggcguguacuucgccagcaccgagaagagcaacaucauccggggcuggaucuucggcaccacccuggacagcaagacccagagccugcugaucgugaauaacgccaccaacguggugaucaaggugugcgaguuccaguucugcaacgaccccuuccugggcguguacuaccacaagaacaacaagagcuggauggagagcgaguuccggguguacagcagcgccaacaacugcaccuucgaguacgugagccagcccuuccugauggaccuggagggcaagcagggcaacuucaagaaccugcgggaguucguguucaagaacaucgacggcuacuucaagaucuacagcaagcacaccccaaucaaccuggugcgggaucugccccagggcuucucagcccuggagccccugguggaccugcccaucggcaucaacaucacccgguuccagacccugcuggcccugcaccggagcuaccugaccccaggcgacagcagcagcggguggacagcaggcgcggcugcuuacuacgugggcuaccugcagccccggaccuuccugcugaaguacaacgagaacggcaccaucaccgacgccguggacugcgcccuggacccucugagcgagaccaagugcacccugaagagcuucaccguggagaagggcaucuaccagaccagcaacuuccgggugcagcccaccgagagcaucgugcgguuccccaacaucaccaaccugugccccuucggcgagguguucaacgccacccgguucgccagcguguacgccuggaaccggaagcggaucagcaacugcguggccgacuacagcgugcuguacaacagcgccagcuucagcaccuucaagugcuacggcgugagccccaccaagcugaacgaccugugcuucaccaacguguacgccgacagcuucgugauccguggcgacgaggugcggcagaucgcacccggccagacaggcaagaucgccgacuacaacuacaagcugcccgacgacuucaccggcugcgugaucgccuggaacagcaacaaccucgacagcaaggugggcggcaacuacaacuaccuguaccggcuguuccggaagagcaaccugaagcccuucgagcgggacaucagcaccgagaucuaccaagccggcuccaccccuugcaacggcguggagggcuucaacugcuacuucccucugcagagcuacggcuuccagcccaccaacggcgugggcuaccagcccuaccgggugguggugcugagcuucgagcugcugcacgccccagccaccguguguggccccaagaagagcaccaaccuggugaagaacaagugcgugaacuucaacuucaacggccuuaccggcaccggcgugcugaccgagagcaacaagaaauuccugcccuuucagcaguucggccgggacaucgccgacaccaccgacgcugugcgggauccccagacccuggagauccuggacaucaccccuugcagcuucggcggcgugagcgugaucaccccaggcaccaacaccagcaaccagguggccgugcuguaccagggcgugaacugcaccgaggugcccguggccauccacgccgaccagcugacacccaccuggcgggucuacagcaccggcagcaacguguuccagacccgggccgguugccugaucggcgccgagcacgugaacaacagcuacgagugcgacauccccaucggcgccggcaucugugccagcuaccagacccagaccaauucaccccggagggcaaggagcguggccagccagagcgugaucgccuacaccaugagccugggcgccgagaacagcguggccuacagcaacaacagcaucgccauccccaccaacuucaccaucagcgugaccaccgagauucugcccgugagcaugaccaagaccagcguggacugcaccauguacaucugcggcgacagcaccgagugcagcaaccugcugcugcaguacggcagcuucugcacccagcugaaccgggcccugaccggcaucgccguggagcaggacaagaacacccaggagguguucgcccaggugaagcagaucuacaagaccccucccaucaaggacuucggcggcuucaacuucagccagauccugcccgaccccagcaagcccagcaagcggagcuucaucgaggaccugcuguucaacaaggugacccuagccgacgccggcuucaucaagcaguacggcgacugccucggcgacauagccgcccgggaccugaucugcgcccagaaguucaacggccugaccgugcugccuccccugcugaccgacgagaugaucgcccaguacaccagcgcccuguuagccggaaccaucaccagcggcuggacuuucggcgcuggagccgcucugcagauccccuucgccaugcagauggccuaccgguucaacggcaucggcgugacccagaacgugcuguacgagaaccagaagcugaucgccaaccaguucaacagcgccaucggcaagauccaggacagccugagcagcaccgcuagcgcccugggcaagcugcaggacguggugaaccagaacgcccaggcccugaacacccuggugaagcagcugagcagcaacuucggcgccaucagcagcgugcugaacgacauccugagccggcuggacccucccgaggccgaggugcagaucgaccggcugaucacuggccggcugcagagccugcagaccuacgugacccagcagcugauccgggccgccgagauucgggccagcgccaaccuggccgccaccaagaugagcgagugcgugcugggccagagcaagcggguggacuucugcggcaagggcuaccaccugaugagcuuuccccagagcgcaccccacggagugguguuccugcacgugaccuacgugcccgcccaggagaagaacuucaccaccgccccagccaucugccacgacggcaaggcccacuuuccccgggagggcguguucgugagcaacggcacccacugguucgugacccagcggaacuucuacgagccccagaucaucaccaccgacaacaccuucgugagcggcaacugcgacguggugaucggcaucgugaacaacaccguguacgauccccugcagcccgagcuggacagcuucaaggaggagcuggacaaguacuucaagaaucacaccagccccgacguggaccugggcgacaucagcggcaucaacgccagcguggugaacauccagaaggagaucgaucggcugaacgagguggccaagaaccugaacgagagccugaucgaccugcaggagcugggcaaguacgagcaguacaucaaguggcccugguacaucuggcugggcuucaucgccggccugaucgccaucgugauggugaccaucaugcugugcugcaugaccagcugcugcagcugccugaagggcuguugcagcugcggcagcugcugcaaguucgacgaggacgacagcgagcccgugcugaagggcgugaagcugcacuacaccugaggacuaguguccaccugucccuccugggcugcuggauugucucguuuuccugccaaauaaacaggaucagcgcuuuacagaucuaaaaaaaaaaaaaaaaaaaaaaaaaaaaaaaaaaaaaaaaaaaaaaaaaaaaaaaaaaaaaaaaaaaaaaaaaaaaaaaaaaaaaaaaaaaaaaaaaaaa

SEQ ID NO: 25322 - RNA, 4105 nt, Artificial Sequence
  SARS-CoV-2/Wuhan/WIV05/2019__EPI_ISL_402128 spike protein mRNA gc (1-1273)(K986P_V987P_D614G_M1229I)
aggagacccgugacccggaaguuguacggcuacgcgacuuucccucccacaaacccucgcgcccuuccuuuccuacuugggcccggcagaaagcuuaccauguucguguuccuggugcugcugccccuggugagcagccagugcgugaaccugaccacccggacccagcugccaccagccuacaccaacagcuucacccggggcgucuacuaccccgacaagguguuccggagcagcguccugcacagcacccaggaccuguuccugcccuucuucagcaacgugaccugguuccacgccauccacgugagcggcaccaacggcaccaagcgguucgacaaccccgugcugcccuucaacgacggcguguacuucgccagcaccgagaagagcaacaucauccggggcuggaucuucggcaccacccuggacagcaagacccagagccugcugaucgugaauaacgccaccaacguggugaucaaggugugcgaguuccaguucugcaacgaccccuuccugggcguguacuaccacaagaacaacaagagcuggauggagagcgaguuccggguguacagcagcgccaacaacugcaccuucgaguacgugagccagcccuuccugauggaccuggagggcaagcagggcaacuucaagaaccugcgggaguucguguucaagaacaucgacggcuacuucaagaucuacagcaagcacaccccaaucaaccuggugcgggaucugccccagggcuucucagcccuggagccccugguggaccugcccaucggcaucaacaucacccgguuccagacccugcuggcccugcaccggagcuaccugaccccaggcgacagcagcagcggguggacagcaggcgcggcugcuuacuacgugggcuaccugcagccccggaccuuccugcugaaguacaacgagaacggcaccaucaccgacgccguggacugcgcccuggacccucugagcgagaccaagugcacccugaagagcuucaccguggagaagggcaucuaccagaccagcaacuuccgggugcagcccaccgagagcaucgugcgguuccccaacaucaccaaccugugccccuucggcgagguguucaacgccacccgguucgccagcguguacgccuggaaccggaagcggaucagcaacugcguggccgacuacagcgugcuguacaacagcgccagcuucagcaccuucaagugcuacggcgugagccccaccaagcugaacgaccugugcuucaccaacguguacgccgacagcuucgugauccguggcgacgaggugcggcagaucgcacccggccagacaggcaagaucgccgacuacaacuacaagcugcccgacgacuucaccggcugcgugaucgccuggaacagcaacaaccucgacagcaaggugggcggcaacuacaacuaccuguaccggcuguuccggaagagcaaccugaagcccuucgagcgggacaucagcaccgagaucuaccaagccggcuccaccccuugcaacggcguggagggcuucaacugcuacuucccucugcagagcuacggcuuccagcccaccaacggcgugggcuaccagcccuaccgggugguggugcugagcuucgagcugcugcacgccccagccaccguguguggccccaagaagagcaccaaccuggugaagaacaagugcgugaacuucaacuucaacggccuuaccggcaccggcgugcugaccgagagcaacaagaaauuccugcccuuucagcaguucggccgggacaucgccgacaccaccgacgcugugcgggauccccagacccuggagauccuggacaucaccccuugcagcuucggcggcgugagcgugaucaccccaggcaccaacaccagcaaccagguggccgugcuguaccagggcgugaacugcaccgaggugcccguggccauccacgccgaccagcugacacccaccuggcgggucuacagcaccggcagcaacguguuccagacccgggccgguugccugaucggcgccgagcacgugaacaacagcuacgagugcgacauccccaucggcgccggcaucugugccagcuaccagacccagaccaauucaccccggagggcaaggagcguggccagccagagcaucaucgccuacaccaugagccugggcgccgagaacagcguggccuacagcaacaacagcaucgccauccccaccaacuucaccaucagcgugaccaccgagauucugcccgugagcaugaccaagaccagcguggacugcaccauguacaucugcggcgacagcaccgagugcagcaaccugcugcugcaguacggcagcuucugcacccagcugaaccgggcccugaccggcaucgccguggagcaggacaagaacacccaggagguguucgcccaggugaagcagaucuacaagaccccucccaucaaggacuucggcggcuucaacuucagccagauccugcccgaccccagcaagcccagcaagcggagcuucaucgaggaccugcuguucaacaaggugacccuagccgacgccggcuucaucaagcaguacggcgacugccucggcgacauagccgcccgggaccugaucugcgcccagaaguucaacggccugaccgugcugccuccccugcugaccgacgagaugaucgcccaguacaccagcgcccuguuagccggaaccaucaccagcggcuggacuuucggcgcuggagccgcucugcagauccccuucgccaugcagauggccuaccgguucaacggcaucggcgugacccagaacgugcuguacgagaaccagaagcugaucgccaaccaguucaacagcgccaucggcaagauccaggacagccugagcagcaccgcuagcgcccugggcaagcugcaggacguggugaaccagaacgcccaggcccugaacacccuggugaagcagcugagcagcaacuucggcgccaucagcagcgugcugaacgacauccugagccggcuggacccucccgaggccgaggugcagaucgaccggcugaucacuggccggcugcagagccugcagaccuacgugacccagcagcugauccgggccgccgagauucgggccagcgccaaccuggccgccaccaagaugagcgagugcgugcugggccagagcaagcggguggacuucugcggcaagggcuaccaccugaugagcuuuccccagagcgcaccccacggagugguguuccugcacgugaccuacgugcccgcccaggagaagaacuucaccaccgccccagccaucugccacgacggcaaggcccacuuuccccgggagggcguguucgugagcaacggcacccacugguucgugacccagcggaacuucuacgagccccagaucaucaccaccgacaacaccuucgugagcggcaacugcgacguggugaucggcaucgugaacaacaccguguacgauccccugcagcccgagcuggacagcuucaaggaggagcuggacaaguacuucaagaaucacaccagccccgacguggaccugggcgacaucagcggcaucaacgccagcguggugaacauccagaaggagaucgaucggcugaacgagguggccaagaaccugaacgagagccugaucgaccugcaggagcugggcaaguacgagcaguacaucaaguggcccugguacaucuggcugggcuucaucgccggccugaucgccaucgugaucgugaccaucaugcugugcugcaugaccagcugcugcagcugccugaagggcuguugcagcugcggcagcugcugcaaguucgacgaggacgacagcgagcccgugcugaagggcgugaagcugcacuacaccugaggacuaguguccaccugucccuccugggcugcuggauugucucguuuuccugccaaauaaacaggaucagcgcuuuacagaucuaaaaaaaaaaaaaaaaaaaaaaaaaaaaaaaaaaaaaaaaaaaaaaaaaaaaaaaaaaaaaaaaaaaaaaaaaaaaaaaaaaaaaaaaaaaaaaaaaaaa

SEQ ID NO: 25323 - RNA, 4099 nt, Artificial Sequence
  SARS-CoV-2/Wuhan/WIV05/2019__EPI_ISL_402128 spike protein mRNA gc (1-1273)(K986P_V987P_H69del_V70del_A222V_Y453F_S477N_D614G_I692V)
aggagacccgugacccggaaguuguacggcuacgcgacuuucccucccacaaacccucgcgcccuuccuuuccuacuugggcccggcagaaagcuuaccauguucguguuccuggugcugcugccccuggugagcagccagugcgugaaccugaccacccggacccagcugccaccagccuacaccaacagcuucacccggggcgucuacuaccccgacaagguguuccggagcagcguccugcacagcacccaggaccuguuccugcccuucuucagcaacgugaccugguuccacgccaucagcggcaccaacggcaccaagcgguucgacaaccccgugcugcccuucaacgacggcguguacuucgccagcaccgagaagagcaacaucauccggggcuggaucuucggcaccacccuggacagcaagacccagagccugcugaucgugaauaacgccaccaacguggugaucaaggugugcgaguuccaguucugcaacgaccccuuccugggcguguacuaccacaagaacaacaagagcuggauggagagcgaguuccggguguacagcagcgccaacaacugcaccuucgaguacgugagccagcccuuccugauggaccuggagggcaagcagggcaacuucaagaaccugcgggaguucguguucaagaacaucgacggcuacuucaagaucuacagcaagcacaccccaaucaaccuggugcgggaucugccccagggcuucucagugcuggagccccugguggaccugcccaucggcaucaacaucacccgguuccagacccugcuggcccugcaccggagcuaccugaccccaggcgacagcagcagcggguggacagcaggcgcggcugcuuacuacgugggcuaccugcagccccggaccuuccugcugaaguacaacgagaacggcaccaucaccgacgccguggacugcgcccuggacccucugagcgagaccaagugcacccugaagagcuucaccguggagaagggcaucuaccagaccagcaacuuccgggugcagcccaccgagagcaucgugcgguuccccaacaucaccaaccugugccccuucggcgagguguucaacgccacccgguucgccagcguguacgccuggaaccggaagcggaucagcaacugcguggccgacuacagcgugcuguacaacagcgccagcuucagcaccuucaagugcuacggcgugagccccaccaagcugaacgaccugugcuucaccaacguguacgccgacagcuucgugauccguggcgacgaggugcggcagaucgcacccggccagacaggcaagaucgccgacuacaacuacaagcugcccgacgacuucaccggcugcgugaucgccuggaacagcaacaaccucgacagcaaggugggcggcaacuacaacuaccuguuccggcuguuccggaagagcaaccugaagcccuucgagcgggacaucagcaccgagaucuaccaagccggcaacaccccuugcaacggcguggagggcuucaacugcuacuucccucugcagagcuacggcuuccagcccaccaacggcgugggcuaccagcccuaccgggugguggugcugagcuucgagcugcugcacgccccagccaccguguguggccccaagaagagcaccaaccuggugaagaacaagugcgugaacuucaacuucaacggccuuaccggcaccggcgugcugaccgagagcaacaagaaauuccugcccuuucagcaguucggccgggacaucgccgacaccaccgacgcugugcgggauccccagacccuggagauccuggacaucaccccuugcagcuucggcggcgugagcgugaucaccccaggcaccaacaccagcaaccagguggccgugcuguaccagggcgugaacugcaccgaggugcccguggccauccacgccgaccagcugacacccaccuggcgggucuacagcaccggcagcaacguguuccagacccgggccgguugccugaucggcgccgagcacgugaacaacagcuacgagugcgacauccccaucggcgccggcaucugugccagcuaccagacccagaccaauucaccccggagggcaaggagcguggccagccagagcgugaucgccuacaccaugagccugggcgccgagaacagcguggccuacagcaacaacagcaucgccauccccaccaacuucaccaucagcgugaccaccgagauucugcccgugagcaugaccaagaccagcguggacugcaccauguacaucugcggcgacagcaccgagugcagcaaccugcugcugcaguacggcagcuucugcacccagcugaaccgggcccugaccggcaucgccguggagcaggacaagaacacccaggagguguucgcccaggugaagcagaucuacaagaccccucccaucaaggacuucggcggcuucaacuucagccagauccugcccgaccccagcaagcccagcaagcggagcuucaucgaggaccugcuguucaacaaggugacccuagccgacgccggcuucaucaagcaguacggcgacugccucggcgacauagccgcccgggaccugaucugcgcccagaaguucaacggccugaccgugcugccuccccugcugaccgacgagaugaucgcccaguacaccagcgcccuguuagccggaaccaucaccagcggcuggacuuucggcgcuggagccgcucugcagauccccuucgccaugcagauggccuaccgguucaacggcaucggcgugacccagaacgugcuguacgagaaccagaagcugaucgccaaccaguucaacagcgccaucggcaagauccaggacagccugagcagcaccgcuagcgcccugggcaagcugcaggacguggugaaccagaacgcccaggcccugaacacccuggugaagcagcugagcagcaacuucggcgccaucagcagcgugcugaacgacauccugagccggcuggacccucccgaggccgaggugcagaucgaccggcugaucacuggccggcugcagagccugcagaccuacgugacccagcagcugauccgggccgccgagauucgggccagcgccaaccuggccgccaccaagaugagcgagugcgugcugggccagagcaagcggguggacuucugcggcaagggcuaccaccugaugagcuuuccccagagcgcaccccacggagugguguuccugcacgugaccuacgugcccgcccaggagaagaacuucaccaccgccccagccaucugccacgacggcaaggcccacuuuccccgggagggcguguucgugagcaacggcacccacugguucgugacccagcggaacuucuacgagccccagaucaucaccaccgacaacaccuucgugagcggcaacugcgacguggugaucggcaucgugaacaacaccguguacgauccccugcagcccgagcuggacagcuucaaggaggagcuggacaaguacuucaagaaucacaccagccccgacguggaccugggcgacaucagcggcaucaacgccagcguggugaacauccagaaggagaucgaucggcugaacgagguggccaagaaccugaacgagagccugaucgaccugcaggagcugggcaaguacgagcaguacaucaaguggcccugguacaucuggcugggcuucaucgccggccugaucgccaucgugauggugaccaucaugcugugcugcaugaccagcugcugcagcugccugaagggcuguugcagcugcggcagcugcugcaaguucgacgaggacgacagcgagcccgugcugaagggcgugaagcugcacuacaccugaggacuaguguccaccugucccuccugggcugcuggauugucucguuuuccugccaaauaaacaggaucagcgcuuuacagaucuaaaaaaaaaaaaaaaaaaaaaaaaaaaaaaaaaaaaaaaaaaaaaaaaaaaaaaaaaaaaaaaaaaaaaaaaaaaaaaaaaaaaaaaaaaaaaaaaaaaa

SEQ ID NO: 25324 - RNA, 4099 nt, Artificial Sequence
  SARS-CoV-2/Wuhan/WIV05/2019__EPI_ISL_402128 spike protein mRNA gc (1-1273)(K986P_V987P_H69del_V70del_Y453F_D614G_I692V_M1229I)
aggagacccgugacccggaaguuguacggcuacgcgacuuucccucccacaaacccucgcgcccuuccuuuccuacuugggcccggcagaaagcuuaccauguucguguuccuggugcugcugccccuggugagcagccagugcgugaaccugaccacccggacccagcugccaccagccuacaccaacagcuucacccggggcgucuacuaccccgacaagguguuccggagcagcguccugcacagcacccaggaccuguuccugcccuucuucagcaacgugaccugguuccacgccaucagcggcaccaacggcaccaagcgguucgacaaccccgugcugcccuucaacgacggcguguacuucgccagcaccgagaagagcaacaucauccggggcuggaucuucggcaccacccuggacagcaagacccagagccugcugaucgugaauaacgccaccaacguggugaucaaggugugcgaguuccaguucugcaacgaccccuuccugggcguguacuaccacaagaacaacaagagcuggauggagagcgaguuccggguguacagcagcgccaacaacugcaccuucgaguacgugagccagcccuuccugauggaccuggagggcaagcagggcaacuucaagaaccugcgggaguucguguucaagaacaucgacggcuacuucaagaucuacagcaagcacaccccaaucaaccuggugcgggaucugccccagggcuucucagcccuggagccccugguggaccugcccaucggcaucaacaucacccgguuccagacccugcuggcccugcaccggagcuaccugaccccaggcgacagcagcagcggguggacagcaggcgcggcugcuuacuacgugggcuaccugcagccccggaccuuccugcugaaguacaacgagaacggcaccaucaccgacgccguggacugcgcccuggacccucugagcgagaccaagugcacccugaagagcuucaccguggagaagggcaucuaccagaccagcaacuuccgggugcagcccaccgagagcaucgugcgguuccccaacaucaccaaccugugccccuucggcgagguguucaacgccacccgguucgccagcguguacgccuggaaccggaagcggaucagcaacugcguggccgacuacagcgugcuguacaacagcgccagcuucagcaccuucaagugcuacggcgugagccccaccaagcugaacgaccugugcuucaccaacguguacgccgacagcuucgugauccguggcgacgaggugcggcagaucgcacccggccagacaggcaagaucgccgacuacaacuacaagcugcccgacgacuucaccggcugcgugaucgccuggaacagcaacaaccucgacagcaaggugggcggcaacuacaacuaccuguuccggcuguuccggaagagcaaccugaagcccuucgagcgggacaucagcaccgagaucuaccaagccggcuccaccccuugcaacggcguggagggcuucaacugcuacuucccucugcagagcuacggcuuccagcccaccaacggcgugggcuaccagcccuaccgggugguggugcugagcuucgagcugcugcacgccccagccaccguguguggccccaagaagagcaccaaccuggugaagaacaagugcgugaacuucaacuucaacggccuuaccggcaccggcgugcugaccgagagcaacaagaaauuccugcccuuucagcaguucggccgggacaucgccgacaccaccgacgcugugcgggauccccagacccuggagauccuggacaucaccccuugcagcuucggcggcgugagcgugaucaccccaggcaccaacaccagcaaccagguggccgugcuguaccagggcgugaacugcaccgaggugcccguggccauccacgccgaccagcugacacccaccuggcgggucuacagcaccggcagcaacguguuccagacccgggccgguugccugaucggcgccgagcacgugaacaacagcuacgagugcgacauccccaucggcgccggcaucugugccagcuaccagacccagaccaauucaccccggagggcaaggagcguggccagccagagcgugaucgccuacaccaugagccugggcgccgagaacagcguggccuacagcaacaacagcaucgccauccccaccaacuucaccaucagcgugaccaccgagauucugcccgugagcaugaccaagaccagcguggacugcaccauguacaucugcggcgacagcaccgagugcagcaaccugcugcugcaguacggcagcuucugcacccagcugaaccgggcccugaccggcaucgccguggagcaggacaagaacacccaggagguguucgcccaggugaagcagaucuacaagaccccucccaucaaggacuucggcggcuucaacuucagccagauccugcccgaccccagcaagcccagcaagcggagcuucaucgaggaccugcuguucaacaaggugacccuagccgacgccggcuucaucaagcaguacggcgacugccucggcgacauagccgcccgggaccugaucugcgcccagaaguucaacggccugaccgugcugccuccccugcugaccgacgagaugaucgcccaguacaccagcgcccuguuagccggaaccaucaccagcggcuggacuuucggcgcuggagccgcucugcagauccccuucgccaugcagauggccuaccgguucaacggcaucggcgugacccagaacgugcuguacgagaaccagaagcugaucgccaaccaguucaacagcgccaucggcaagauccaggacagccugagcagcaccgcuagcgcccugggcaagcugcaggacguggugaaccagaacgcccaggcccugaacacccuggugaagcagcugagcagcaacuucggcgccaucagcagcgugcugaacgacauccugagccggcuggacccucccgaggccgaggugcagaucgaccggcugaucacuggccggcugcagagccugcagaccuacgugacccagcagcugauccgggccgccgagauucgggccagcgccaaccuggccgccaccaagaugagcgagugcgugcugggccagagcaagcggguggacuucugcggcaagggcuaccaccugaugagcuuuccccagagcgcaccccacggagugguguuccugcacgugaccuacgugcccgcccaggagaagaacuucaccaccgccccagccaucugccacgacggcaaggcccacuuuccccgggagggcguguucgugagcaacggcacccacugguucgugacccagcggaacuucuacgagccccagaucaucaccaccgacaacaccuucgugagcggcaacugcgacguggugaucggcaucgugaacaacaccguguacgauccccugcagcccgagcuggacagcuucaaggaggagcuggacaaguacuucaagaaucacaccagccccgacguggaccugggcgacaucagcggcaucaacgccagcguggugaacauccagaaggagaucgaucggcugaacgagguggccaagaaccugaacgagagccugaucgaccugcaggagcugggcaaguacgagcaguacaucaaguggcccugguacaucuggcugggcuucaucgccggccugaucgccaucgugaucgugaccaucaugcugugcugcaugaccagcugcugcagcugccugaagggcuguugcagcugcggcagcugcugcaaguucgacgaggacgacagcgagcccgugcugaagggcgugaagcugcacuacaccugaggacuaguguccaccugucccuccugggcugcuggauugucucguuuuccugccaaauaaacaggaucagcgcuuuacagaucuaaaaaaaaaaaaaaaaaaaaaaaaaaaaaaaaaaaaaaaaaaaaaaaaaaaaaaaaaaaaaaaaaaaaaaaaaaaaaaaaaaaaaaaaaaaaaaaaaaaa

SEQ ID NO: 25325 - RNA, 4096 nt, Artificial Sequence
  SARS-CoV-2/Wuhan/WIV05/2019__EPI_ISL_402128 spike protein mRNA gc (1-1273)(K986P_V987P_K986P_V987P_H69del_V70del_Y144del_N501Y_A570 D_D614G_P681H_T716I_S982A_D1118H)
aggagacccgugacccggaaguuguacggcuacgcgacuuucccucccacaaacccucgcgcccuuccuuuccuacuugggcccggcagaaagcuuaccauguucguguuccuggugcugcugccccuggugagcagccagugcgugaaccugaccacccggacccagcugccaccagccuacaccaacagcuucacccggggcgucuacuaccccgacaagguguuccggagcagcguccugcacagcacccaggaccuguuccugcccuucuucagcaacgugaccugguuccacgccaucagcggcaccaacggcaccaagcgguucgacaaccccgugcugcccuucaacgacggcguguacuucgccagcaccgagaagagcaacaucauccggggcuggaucuucggcaccacccuggacagcaagacccagagccugcugaucgugaauaacgccaccaacguggugaucaaggugugcgaguuccaguucugcaacgaccccuuccugggcguguaccacaagaacaacaagagcuggauggagagcgaguuccggguguacagcagcgccaacaacugcaccuucgaguacgugagccagcccuuccugauggaccuggagggcaagcagggcaacuucaagaaccugcgggaguucguguucaagaacaucgacggcuacuucaagaucuacagcaagcacaccccaaucaaccuggugcgggaucugccccagggcuucucagcccuggagccccugguggaccugcccaucggcaucaacaucacccgguuccagacccugcuggcccugcaccggagcuaccugaccccaggcgacagcagcagcggguggacagcaggcgcggcugcuuacuacgugggcuaccugcagccccggaccuuccugcugaaguacaacgagaacggcaccaucaccgacgccguggacugcgcccuggacccucugagcgagaccaagugcacccugaagagcuucaccguggagaagggcaucuaccagaccagcaacuuccgggugcagcccaccgagagcaucgugcgguuccccaacaucaccaaccugugccccuucggcgagguguucaacgccacccgguucgccagcguguacgccuggaaccggaagcggaucagcaacugcguggccgacuacagcgugcuguacaacagcgccagcuucagcaccuucaagugcuacggcgugagccccaccaagcugaacgaccugugcuucaccaacguguacgccgacagcuucgugauccguggcgacgaggugcggcagaucgcacccggccagacaggcaagaucgccgacuacaacuacaagcugcccgacgacuucaccggcugcgugaucgccuggaacagcaacaaccucgacagcaaggugggcggcaacuacaacuaccuguaccggcuguuccggaagagcaaccugaagcccuucgagcgggacaucagcaccgagaucuaccaagccggcuccaccccuugcaacggcguggagggcuucaacugcuacuucccucugcagagcuacggcuuccagcccaccuacggcgugggcuaccagcccuaccgggugguggugcugagcuucgagcugcugcacgccccagccaccguguguggccccaagaagagcaccaaccuggugaagaacaagugcgugaacuucaacuucaacggccuuaccggcaccggcgugcugaccgagagcaacaagaaauuccugcccuuucagcaguucggccgggacaucgacgacaccaccgacgcugugcgggauccccagacccuggagauccuggacaucaccccuugcagcuucggcggcgugagcgugaucaccccaggcaccaacaccagcaaccagguggccgugcuguaccagggcgugaacugcaccgaggugcccguggccauccacgccgaccagcugacacccaccuggcgggucuacagcaccggcagcaacguguuccagacccgggccgguugccugaucggcgccgagcacgugaacaacagcuacgagugcgacauccccaucggcgccggcaucugugccagcuaccagacccagaccaauucacaccggagggcaaggagcguggccagccagagcaucaucgccuacaccaugagccugggcgccgagaacagcguggccuacagcaacaacagcaucgccauccccaucaacuucaccaucagcgugaccaccgagauucugcccgugagcaugaccaagaccagcguggacugcaccauguacaucugcggcgacagcaccgagugcagcaaccugcugcugcaguacggcagcuucugcacccagcugaaccgggcccugaccggcaucgccguggagcaggacaagaacacccaggagguguucgcccaggugaagcagaucuacaagaccccucccaucaaggacuucggcggcuucaacuucagccagauccugcccgaccccagcaagcccagcaagcggagcuucaucgaggaccugcuguucaacaaggugacccuagccgacgccggcuucaucaagcaguacggcgacugccucggcgacauagccgcccgggaccugaucugcgcccagaaguucaacggccugaccgugcugccuccccugcugaccgacgagaugaucgcccaguacaccagcgcccuguuagccggaaccaucaccagcggcuggacuuucggcgcuggagccgcucugcagauccccuucgccaugcagauggccuaccgguucaacggcaucggcgugacccagaacgugcuguacgagaaccagaagcugaucgccaaccaguucaacagcgccaucggcaagauccaggacagccugagcagcaccgcuagcgcccugggcaagcugcaggacguggugaaccagaacgcccaggcccugaacacccuggugaagcagcugagcagcaacuucggcgccaucagcagcgugcugaacgacauccuggcccggcuggacccucccgaggccgaggugcagaucgaccggcugaucacuggccggcugcagagccugcagaccuacgugacccagcagcugauccgggccgccgagauucgggccagcgccaaccuggccgccaccaagaugagcgagugcgugcugggccagagcaagcggguggacuucugcggcaagggcuaccaccugaugagcuuuccccagagcgcaccccacggagugguguuccugcacgugaccuacgugcccgcccaggagaagaacuucaccaccgccccagccaucugccacgacggcaaggcccacuuuccccgggagggcguguucgugagcaacggcacccacugguucgugacccagcggaacuucuacgagccccagaucaucaccacccacaacaccuucgugagcggcaacugcgacguggugaucggcaucgugaacaacaccguguacgauccccugcagcccgagcuggacagcuucaaggaggagcuggacaaguacuucaagaaucacaccagccccgacguggaccugggcgacaucagcggcaucaacgccagcguggugaacauccagaaggagaucgaucggcugaacgagguggccaagaaccugaacgagagccugaucgaccugcaggagcugggcaaguacgagcaguacaucaaguggcccugguacaucuggcugggcuucaucgccggccugaucgccaucgugauggugaccaucaugcugugcugcaugaccagcugcugcagcugccugaagggcuguugcagcugcggcagcugcugcaaguucgacgaggacgacagcgagcccgugcugaagggcgugaagcugcacuacaccugaggacuaguguccaccugucccuccugggcugcuggauugucucguuuuccugccaaauaaacaggaucagcgcuuuacagaucuaaaaaaaaaaaaaaaaaaaaaaaaaaaaaaaaaaaaaaaaaaaaaaaaaaaaaaaaaaaaaaaaaaaaaaaaaaaaaaaaaaaaaaaaaaaaaaaaaaaa

SEQ ID NO: 25326 - RNA, 4105 nt, Artificial Sequence
  SARS-CoV-2/Wuhan/WIV05/2019__EPI_ISL_402128 spike protein mRNA gc (1-1273)(K986P_V987P_K986P_V987P_K417N_E484K_N501Y_D614G)
aggagacccgugacccggaaguuguacggcuacgcgacuuucccucccacaaacccucgcgcccuuccuuuccuacuugggcccggcagaaagcuuaccauguucguguuccuggugcugcugccccuggugagcagccagugcgugaaccugaccacccggacccagcugccaccagccuacaccaacagcuucacccggggcgucuacuaccccgacaagguguuccggagcagcguccugcacagcacccaggaccuguuccugcccuucuucagcaacgugaccugguuccacgccauccacgugagcggcaccaacggcaccaagcgguucgacaaccccgugcugcccuucaacgacggcguguacuucgccagcaccgagaagagcaacaucauccggggcuggaucuucggcaccacccuggacagcaagacccagagccugcugaucgugaauaacgccaccaacguggugaucaaggugugcgaguuccaguucugcaacgaccccuuccugggcguguacuaccacaagaacaacaagagcuggauggagagcgaguuccggguguacagcagcgccaacaacugcaccuucgaguacgugagccagcccuuccugauggaccuggagggcaagcagggcaacuucaagaaccugcgggaguucguguucaagaacaucgacggcuacuucaagaucuacagcaagcacaccccaaucaaccuggugcgggaucugccccagggcuucucagcccuggagccccugguggaccugcccaucggcaucaacaucacccgguuccagacccugcuggcccugcaccggagcuaccugaccccaggcgacagcagcagcggguggacagcaggcgcggcugcuuacuacgugggcuaccugcagccccggaccuuccugcugaaguacaacgagaacggcaccaucaccgacgccguggacugcgcccuggacccucugagcgagaccaagugcacccugaagagcuucaccguggagaagggcaucuaccagaccagcaacuuccgggugcagcccaccgagagcaucgugcgguuccccaacaucaccaaccugugccccuucggcgagguguucaacgccacccgguucgccagcguguacgccuggaaccggaagcggaucagcaacugcguggccgacuacagcgugcuguacaacagcgccagcuucagcaccuucaagugcuacggcgugagccccaccaagcugaacgaccugugcuucaccaacguguacgccgacagcuucgugauccguggcgacgaggugcggcagaucgcacccggccagacaggcaacaucgccgacuacaacuacaagcugcccgacgacuucaccggcugcgugaucgccuggaacagcaacaaccucgacagcaaggugggcggcaacuacaacuaccuguaccggcuguuccggaagagcaaccugaagcccuucgagcgggacaucagcaccgagaucuaccaagccggcuccaccccuugcaacggcgugaagggcuucaacugcuacuucccucugcagagcuacggcuuccagcccaccuacggcgugggcuaccagcccuaccgggugguggugcugagcuucgagcugcugcacgccccagccaccguguguggccccaagaagagcaccaaccuggugaagaacaagugcgugaacuucaacuucaacggccuuaccggcaccggcgugcugaccgagagcaacaagaaauuccugcccuuucagcaguucggccgggacaucgccgacaccaccgacgcugugcgggauccccagacccuggagauccuggacaucaccccuugcagcuucggcggcgugagcgugaucaccccaggcaccaacaccagcaaccagguggccgugcuguaccagggcgugaacugcaccgaggugcccguggccauccacgccgaccagcugacacccaccuggcgggucuacagcaccggcagcaacguguuccagacccgggccgguugccugaucggcgccgagcacgugaacaacagcuacgagugcgacauccccaucggcgccggcaucugugccagcuaccagacccagaccaauucaccccggagggcaaggagcguggccagccagagcaucaucgccuacaccaugagccugggcgccgagaacagcguggccuacagcaacaacagcaucgccauccccaccaacuucaccaucagcgugaccaccgagauucugcccgugagcaugaccaagaccagcguggacugcaccauguacaucugcggcgacagcaccgagugcagcaaccugcugcugcaguacggcagcuucugcacccagcugaaccgggcccugaccggcaucgccguggagcaggacaagaacacccaggagguguucgcccaggugaagcagaucuacaagaccccucccaucaaggacuucggcggcuucaacuucagccagauccugcccgaccccagcaagcccagcaagcggagcuucaucgaggaccugcuguucaacaaggugacccuagccgacgccggcuucaucaagcaguacggcgacugccucggcgacauagccgcccgggaccugaucugcgcccagaaguucaacggccugaccgugcugccuccccugcugaccgacgagaugaucgcccaguacaccagcgcccuguuagccggaaccaucaccagcggcuggacuuucggcgcuggagccgcucugcagauccccuucgccaugcagauggccuaccgguucaacggcaucggcgugacccagaacgugcuguacgagaaccagaagcugaucgccaaccaguucaacagcgccaucggcaagauccaggacagccugagcagcaccgcuagcgcccugggcaagcugcaggacguggugaaccagaacgcccaggcccugaacacccuggugaagcagcugagcagcaacuucggcgccaucagcagcgugcugaacgacauccugagccggcuggacccucccgaggccgaggugcagaucgaccggcugaucacuggccggcugcagagccugcagaccuacgugacccagcagcugauccgggccgccgagauucgggccagcgccaaccuggccgccaccaagaugagcgagugcgugcugggccagagcaagcggguggacuucugcggcaagggcuaccaccugaugagcuuuccccagagcgcaccccacggagugguguuccugcacgugaccuacgugcccgcccaggagaagaacuucaccaccgccccagccaucugccacgacggcaaggcccacuuuccccgggagggcguguucgugagcaacggcacccacugguucgugacccagcggaacuucuacgagccccagaucaucaccaccgacaacaccuucgugagcggcaacugcgacguggugaucggcaucgugaacaacaccguguacgauccccugcagcccgagcuggacagcuucaaggaggagcuggacaaguacuucaagaaucacaccagccccgacguggaccugggcgacaucagcggcaucaacgccagcguggugaacauccagaaggagaucgaucggcugaacgagguggccaagaaccugaacgagagccugaucgaccugcaggagcugggcaaguacgagcaguacaucaaguggcccugguacaucuggcugggcuucaucgccggccugaucgccaucgugauggugaccaucaugcugugcugcaugaccagcugcugcagcugccugaagggcuguugcagcugcggcagcugcugcaaguucgacgaggacgacagcgagcccgugcugaagggcgugaagcugcacuacaccugaggacuaguguccaccugucccuccugggcugcuggauugucucguuuuccugccaaauaaacaggaucagcgcuuuacagaucuaaaaaaaaaaaaaaaaaaaaaaaaaaaaaaaaaaaaaaaaaaaaaaaaaaaaaaaaaaaaaaaaaaaaaaaaaaaaaaaaaaaaaaaaaaaaaaaaaaaa

SEQ ID NO: 25327 - RNA, 4096 nt, Artificial Sequence
  SARS-CoV-2/Wuhan/WIV05/2019__EPI_ISL_402128 spike protein mRNA gc (1-1273)(K986P_V987P_K986P_V987P_L18F_D80A_D215G_L242del_A243del_ L244del_R246I_K417N_E484K_N501Y_D614G_A701V)
aggagacccgugacccggaaguuguacggcuacgcgacuuucccucccacaaacccucgcgcccuuccuuuccuacuugggcccggcagaaagcuuaccauguucguguuccuggugcugcugccccuggugagcagccagugcgugaacuucaccacccggacccagcugccaccagccuacaccaacagcuucacccggggcgucuacuaccccgacaagguguuccggagcagcguccugcacagcacccaggaccuguuccugcccuucuucagcaacgugaccugguuccacgccauccacgugagcggcaccaacggcaccaagcgguucgccaaccccgugcugcccuucaacgacggcguguacuucgccagcaccgagaagagcaacaucauccggggcuggaucuucggcaccacccuggacagcaagacccagagccugcugaucgugaauaacgccaccaacguggugaucaaggugugcgaguuccaguucugcaacgaccccuuccugggcguguacuaccacaagaacaacaagagcuggauggagagcgaguuccggguguacagcagcgccaacaacugcaccuucgaguacgugagccagcccuuccugauggaccuggagggcaagcagggcaacuucaagaaccugcgggaguucguguucaagaacaucgacggcuacuucaagaucuacagcaagcacaccccaaucaaccuggugcggggccugccccagggcuucucagcccuggagccccugguggaccugcccaucggcaucaacaucacccgguuccagacccugcacaucagcuaccugaccccaggcgacagcagcagcggguggacagcaggcgcggcugcuuacuacgugggcuaccugcagccccggaccuuccugcugaaguacaacgagaacggcaccaucaccgacgccguggacugcgcccuggacccucugagcgagaccaagugcacccugaagagcuucaccguggagaagggcaucuaccagaccagcaacuuccgggugcagcccaccgagagcaucgugcgguuccccaacaucaccaaccugugccccuucggcgagguguucaacgccacccgguucgccagcguguacgccuggaaccggaagcggaucagcaacugcguggccgacuacagcgugcuguacaacagcgccagcuucagcaccuucaagugcuacggcgugagccccaccaagcugaacgaccugugcuucaccaacguguacgccgacagcuucgugauccguggcgacgaggugcggcagaucgcacccggccagacaggcaacaucgccgacuacaacuacaagcugcccgacgacuucaccggcugcgugaucgccuggaacagcaacaaccucgacagcaaggugggcggcaacuacaacuaccuguaccggcuguuccggaagagcaaccugaagcccuucgagcgggacaucagcaccgagaucuaccaagccggcuccaccccuugcaacggcgugaagggcuucaacugcuacuucccucugcagagcuacggcuuccagcccaccuacggcgugggcuaccagcccuaccgggugguggugcugagcuucgagcugcugcacgccccagccaccguguguggccccaagaagagcaccaaccuggugaagaacaagugcgugaacuucaacuucaacggccuuaccggcaccggcgugcugaccgagagcaacaagaaauuccugcccuuucagcaguucggccgggacaucgccgacaccaccgacgcugugcgggauccccagacccuggagauccuggacaucaccccuugcagcuucggcggcgugagcgugaucaccccaggcaccaacaccagcaaccagguggccgugcuguaccagggcgugaacugcaccgaggugcccguggccauccacgccgaccagcugacacccaccuggcgggucuacagcaccggcagcaacguguuccagacccgggccgguugccugaucggcgccgagcacgugaacaacagcuacgagugcgacauccccaucggcgccggcaucugugccagcuaccagacccagaccaauucaccccggagggcaaggagcguggccagccagagcaucaucgccuacaccaugagccugggcguggagaacagcguggccuacagcaacaacagcaucgccauccccaccaacuucaccaucagcgugaccaccgagauucugcccgugagcaugaccaagaccagcguggacugcaccauguacaucugcggcgacagcaccgagugcagcaaccugcugcugcaguacggcagcuucugcacccagcugaaccgggcccugaccggcaucgccguggagcaggacaagaacacccaggagguguucgcccaggugaagcagaucuacaagaccccucccaucaaggacuucggcggcuucaacuucagccagauccugcccgaccccagcaagcccagcaagcggagcuucaucgaggaccugcuguucaacaaggugacccuagccgacgccggcuucaucaagcaguacggcgacugccucggcgacauagccgcccgggaccugaucugcgcccagaaguucaacggccugaccgugcugccuccccugcugaccgacgagaugaucgcccaguacaccagcgcccuguuagccggaaccaucaccagcggcuggacuuucggcgcuggagccgcucugcagauccccuucgccaugcagauggccuaccgguucaacggcaucggcgugacccagaacgugcuguacgagaaccagaagcugaucgccaaccaguucaacagcgccaucggcaagauccaggacagccugagcagcaccgcuagcgcccugggcaagcugcaggacguggugaaccagaacgcccaggcccugaacacccuggugaagcagcugagcagcaacuucggcgccaucagcagcgugcugaacgacauccugagccggcuggacccucccgaggccgaggugcagaucgaccggcugaucacuggccggcugcagagccugcagaccuacgugacccagcagcugauccgggccgccgagauucgggccagcgccaaccuggccgccaccaagaugagcgagugcgugcugggccagagcaagcggguggacuucugcggcaagggcuaccaccugaugagcuuuccccagagcgcaccccacggagugguguuccugcacgugaccuacgugcccgcccaggagaagaacuucaccaccgccccagccaucugccacgacggcaaggcccacuuuccccgggagggcguguucgugagcaacggcacccacugguucgugacccagcggaacuucuacgagccccagaucaucaccaccgacaacaccuucgugagcggcaacugcgacguggugaucggcaucgugaacaacaccguguacgauccccugcagcccgagcuggacagcuucaaggaggagcuggacaaguacuucaagaaucacaccagccccgacguggaccugggcgacaucagcggcaucaacgccagcguggugaacauccagaaggagaucgaucggcugaacgagguggccaagaaccugaacgagagccugaucgaccugcaggagcugggcaaguacgagcaguacaucaaguggcccugguacaucuggcugggcuucaucgccggccugaucgccaucgugauggugaccaucaugcugugcugcaugaccagcugcugcagcugccugaagggcuguugcagcugcggcagcugcugcaaguucgacgaggacgacagcgagcccgugcugaagggcgugaagcugcacuacaccugaggacuaguguccaccugucccuccugggcugcuggauugucucguuuuccugccaaauaaacaggaucagcgcuuuacagaucuaaaaaaaaaaaaaaaaaaaaaaaaaaaaaaaaaaaaaaaaaaaaaaaaaaaaaaaaaaaaaaaaaaaaaaaaaaaaaaaaaaaaaaaaaaaaaaaaaaaa

SEQ ID NO: 25328 - RNA, 4105 nt, Artificial Sequence
  SARS-CoV-2/Wuhan/WIV05/2019__EPI_ISL_402128 spike protein mRNA gc (1-1273)(K986P_V987P_K986P_V987P_E484K_D614G)
aggagacccgugacccggaaguuguacggcuacgcgacuuucccucccacaaacccucgcgcccuuccuuuccuacuugggcccggcagaaagcuuaccauguucguguuccuggugcugcugccccuggugagcagccagugcgugaaccugaccacccggacccagcugccaccagccuacaccaacagcuucacccggggcgucuacuaccccgacaagguguuccggagcagcguccugcacagcacccaggaccuguuccugcccuucuucagcaacgugaccugguuccacgccauccacgugagcggcaccaacggcaccaagcgguucgacaaccccgugcugcccuucaacgacggcguguacuucgccagcaccgagaagagcaacaucauccggggcuggaucuucggcaccacccuggacagcaagacccagagccugcugaucgugaauaacgccaccaacguggugaucaaggugugcgaguuccaguucugcaacgaccccuuccugggcguguacuaccacaagaacaacaagagcuggauggagagcgaguuccggguguacagcagcgccaacaacugcaccuucgaguacgugagccagcccuuccugauggaccuggagggcaagcagggcaacuucaagaaccugcgggaguucguguucaagaacaucgacggcuacuucaagaucuacagcaagcacaccccaaucaaccuggugcgggaucugccccagggcuucucagcccuggagccccugguggaccugcccaucggcaucaacaucacccgguuccagacccugcuggcccugcaccggagcuaccugaccccaggcgacagcagcagcggguggacagcaggcgcggcugcuuacuacgugggcuaccugcagccccggaccuuccugcugaaguacaacgagaacggcaccaucaccgacgccguggacugcgcccuggacccucugagcgagaccaagugcacccugaagagcuucaccguggagaagggcaucuaccagaccagcaacuuccgggugcagcccaccgagagcaucgugcgguuccccaacaucaccaaccugugccccuucggcgagguguucaacgccacccgguucgccagcguguacgccuggaaccggaagcggaucagcaacugcguggccgacuacagcgugcuguacaacagcgccagcuucagcaccuucaagugcuacggcgugagccccaccaagcugaacgaccugugcuucaccaacguguacgccgacagcuucgugauccguggcgacgaggugcggcagaucgcacccggccagacaggcaagaucgccgacuacaacuacaagcugcccgacgacuucaccggcugcgugaucgccuggaacagcaacaaccucgacagcaaggugggcggcaacuacaacuaccuguaccggcuguuccggaagagcaaccugaagcccuucgagcgggacaucagcaccgagaucuaccaagccggcuccaccccuugcaacggcgugaagggcuucaacugcuacuucccucugcagagcuacggcuuccagcccaccaacggcgugggcuaccagcccuaccgggugguggugcugagcuucgagcugcugcacgccccagccaccguguguggccccaagaagagcaccaaccuggugaagaacaagugcgugaacuucaacuucaacggccuuaccggcaccggcgugcugaccgagagcaacaagaaauuccugcccuuucagcaguucggccgggacaucgccgacaccaccgacgcugugcgggauccccagacccuggagauccuggacaucaccccuugcagcuucggcggcgugagcgugaucaccccaggcaccaacaccagcaaccagguggccgugcuguaccagggcgugaacugcaccgaggugcccguggccauccacgccgaccagcugacacccaccuggcgggucuacagcaccggcagcaacguguuccagacccgggccgguugccugaucggcgccgagcacgugaacaacagcuacgagugcgacauccccaucggcgccggcaucugugccagcuaccagacccagaccaauucaccccggagggcaaggagcguggccagccagagcaucaucgccuacaccaugagccugggcgccgagaacagcguggccuacagcaacaacagcaucgccauccccaccaacuucaccaucagcgugaccaccgagauucugcccgugagcaugaccaagaccagcguggacugcaccauguacaucugcggcgacagcaccgagugcagcaaccugcugcugcaguacggcagcuucugcacccagcugaaccgggcccugaccggcaucgccguggagcaggacaagaacacccaggagguguucgcccaggugaagcagaucuacaagaccccucccaucaaggacuucggcggcuucaacuucagccagauccugcccgaccccagcaagcccagcaagcggagcuucaucgaggaccugcuguucaacaaggugacccuagccgacgccggcuucaucaagcaguacggcgacugccucggcgacauagccgcccgggaccugaucugcgcccagaaguucaacggccugaccgugcugccuccccugcugaccgacgagaugaucgcccaguacaccagcgcccuguuagccggaaccaucaccagcggcuggacuuucggcgcuggagccgcucugcagauccccuucgccaugcagauggccuaccgguucaacggcaucggcgugacccagaacgugcuguacgagaaccagaagcugaucgccaaccaguucaacagcgccaucggcaagauccaggacagccugagcagcaccgcuagcgcccugggcaagcugcaggacguggugaaccagaacgcccaggcccugaacacccuggugaagcagcugagcagcaacuucggcgccaucagcagcgugcugaacgacauccugagccggcuggacccucccgaggccgaggugcagaucgaccggcugaucacuggccggcugcagagccugcagaccuacgugacccagcagcugauccgggccgccgagauucgggccagcgccaaccuggccgccaccaagaugagcgagugcgugcugggccagagcaagcggguggacuucugcggcaagggcuaccaccugaugagcuuuccccagagcgcaccccacggagugguguuccugcacgugaccuacgugcccgcccaggagaagaacuucaccaccgccccagccaucugccacgacggcaaggcccacuuuccccgggagggcguguucgugagcaacggcacccacugguucgugacccagcggaacuucuacgagccccagaucaucaccaccgacaacaccuucgugagcggcaacugcgacguggugaucggcaucgugaacaacaccguguacgauccccugcagcccgagcuggacagcuucaaggaggagcuggacaaguacuucaagaaucacaccagccccgacguggaccugggcgacaucagcggcaucaacgccagcguggugaacauccagaaggagaucgaucggcugaacgagguggccaagaaccugaacgagagccugaucgaccugcaggagcugggcaaguacgagcaguacaucaaguggcccugguacaucuggcugggcuucaucgccggccugaucgccaucgugauggugaccaucaugcugugcugcaugaccagcugcugcagcugccugaagggcuguugcagcugcggcagcugcugcaaguucgacgaggacgacagcgagcccgugcugaagggcgugaagcugcacuacaccugaggacuaguguccaccugucccuccugggcugcuggauugucucguuuuccugccaaauaaacaggaucagcgcuuuacagaucuaaaaaaaaaaaaaaaaaaaaaaaaaaaaaaaaaaaaaaaaaaaaaaaaaaaaaaaaaaaaaaaaaaaaaaaaaaaaaaaaaaaaaaaaaaaaaaaaaaaa

SEQ ID NO: 25329 - RNA, 4105 nt, Artificial Sequence
  SARS-CoV-2/Wuhan/WIV05/2019__EPI_ISL_402128 spike protein mRNA gc (1-1273)(K986P_V987P_K986P_V987P_L18F_T20N_P26S_D138Y_R190S_K417T _E484K_N501Y_D614G_H655Y_T1027I)
aggagacccgugacccggaaguuguacggcuacgcgacuuucccucccacaaacccucgcgcccuuccuuuccuacuugggcccggcagaaagcuuaccauguucguguuccuggugcugcugccccuggugagcagccagugcgugaacuucaccaaccggacccagcugccaagcgccuacaccaacagcuucacccggggcgucuacuaccccgacaagguguuccggagcagcguccugcacagcacccaggaccuguuccugcccuucuucagcaacgugaccugguuccacgccauccacgugagcggcaccaacggcaccaagcgguucgacaaccccgugcugcccuucaacgacggcguguacuucgccagcaccgagaagagcaacaucauccggggcuggaucuucggcaccacccuggacagcaagacccagagccugcugaucgugaauaacgccaccaacguggugaucaaggugugcgaguuccaguucugcaacuaccccuuccugggcguguacuaccacaagaacaacaagagcuggauggagagcgaguuccggguguacagcagcgccaacaacugcaccuucgaguacgugagccagcccuuccugauggaccuggagggcaagcagggcaacuucaagaaccugagcgaguucguguucaagaacaucgacggcuacuucaagaucuacagcaagcacaccccaaucaaccuggugcgggaucugccccagggcuucucagcccuggagccccugguggaccugcccaucggcaucaacaucacccgguuccagacccugcuggcccugcaccggagcuaccugaccccaggcgacagcagcagcggguggacagcaggcgcggcugcuuacuacgugggcuaccugcagccccggaccuuccugcugaaguacaacgagaacggcaccaucaccgacgccguggacugcgcccuggacccucugagcgagaccaagugcacccugaagagcuucaccguggagaagggcaucuaccagaccagcaacuuccgggugcagcccaccgagagcaucgugcgguuccccaacaucaccaaccugugccccuucggcgagguguucaacgccacccgguucgccagcguguacgccuggaaccggaagcggaucagcaacugcguggccgacuacagcgugcuguacaacagcgccagcuucagcaccuucaagugcuacggcgugagccccaccaagcugaacgaccugugcuucaccaacguguacgccgacagcuucgugauccguggcgacgaggugcggcagaucgcacccggccagacaggcaccaucgccgacuacaacuacaagcugcccgacgacuucaccggcugcgugaucgccuggaacagcaacaaccucgacagcaaggugggcggcaacuacaacuaccuguaccggcuguuccggaagagcaaccugaagcccuucgagcgggacaucagcaccgagaucuaccaagccggcuccaccccuugcaacggcgugaagggcuucaacugcuacuucccucugcagagcuacggcuuccagcccaccuacggcgugggcuaccagcccuaccgggugguggugcugagcuucgagcugcugcacgccccagccaccguguguggccccaagaagagcaccaaccuggugaagaacaagugcgugaacuucaacuucaacggccuuaccggcaccggcgugcugaccgagagcaacaagaaauuccugcccuuucagcaguucggccgggacaucgccgacaccaccgacgcugugcgggauccccagacccuggagauccuggacaucaccccuugcagcuucggcggcgugagcgugaucaccccaggcaccaacaccagcaaccagguggccgugcuguaccagggcgugaacugcaccgaggugcccguggccauccacgccgaccagcugacacccaccuggcgggucuacagcaccggcagcaacguguuccagacccgggccgguugccugaucggcgccgaguacgugaacaacagcuacgagugcgacauccccaucggcgccggcaucugugccagcuaccagacccagaccaauucaccccggagggcaaggagcguggccagccagagcaucaucgccuacaccaugagccugggcgccgagaacagcguggccuacagcaacaacagcaucgccauccccaccaacuucaccaucagcgugaccaccgagauucugcccgugagcaugaccaagaccagcguggacugcaccauguacaucugcggcgacagcaccgagugcagcaaccugcugcugcaguacggcagcuucugcacccagcugaaccgggcccugaccggcaucgccguggagcaggacaagaacacccaggagguguucgcccaggugaagcagaucuacaagaccccucccaucaaggacuucggcggcuucaacuucagccagauccugcccgaccccagcaagcccagcaagcggagcuucaucgaggaccugcuguucaacaaggugacccuagccgacgccggcuucaucaagcaguacggcgacugccucggcgacauagccgcccgggaccugaucugcgcccagaaguucaacggccugaccgugcugccuccccugcugaccgacgagaugaucgcccaguacaccagcgcccuguuagccggaaccaucaccagcggcuggacuuucggcgcuggagccgcucugcagauccccuucgccaugcagauggccuaccgguucaacggcaucggcgugacccagaacgugcuguacgagaaccagaagcugaucgccaaccaguucaacagcgccaucggcaagauccaggacagccugagcagcaccgcuagcgcccugggcaagcugcaggacguggugaaccagaacgcccaggcccugaacacccuggugaagcagcugagcagcaacuucggcgccaucagcagcgugcugaacgacauccugagccggcuggacccucccgaggccgaggugcagaucgaccggcugaucacuggccggcugcagagccugcagaccuacgugacccagcagcugauccgggccgccgagauucgggccagcgccaaccuggccgccaucaagaugagcgagugcgugcugggccagagcaagcggguggacuucugcggcaagggcuaccaccugaugagcuuuccccagagcgcaccccacggagugguguuccugcacgugaccuacgugcccgcccaggagaagaacuucaccaccgccccagccaucugccacgacggcaaggcccacuuuccccgggagggcguguucgugagcaacggcacccacugguucgugacccagcggaacuucuacgagccccagaucaucaccaccgacaacaccuucgugagcggcaacugcgacguggugaucggcaucgugaacaacaccguguacgauccccugcagcccgagcuggacagcuucaaggaggagcuggacaaguacuucaagaaucacaccagccccgacguggaccugggcgacaucagcggcaucaacgccagcguggugaacauccagaaggagaucgaucggcugaacgagguggccaagaaccugaacgagagccugaucgaccugcaggagcugggcaaguacgagcaguacaucaaguggcccugguacaucuggcugggcuucaucgccggccugaucgccaucgugauggugaccaucaugcugugcugcaugaccagcugcugcagcugccugaagggcuguugcagcugcggcagcugcugcaaguucgacgaggacgacagcgagcccgugcugaagggcgugaagcugcacuacaccugaggacuaguguccaccugucccuccugggcugcuggauugucucguuuuccugccaaauaaacaggaucagcgcuuuacagaucuaaaaaaaaaaaaaaaaaaaaaaaaaaaaaaaaaaaaaaaaaaaaaaaaaaaaaaaaaaaaaaaaaaaaaaaaaaaaaaaaaaaaaaaaaaaaaaaaaaaa

SEQ ID NO: 25330 - RNA, 4105 nt, Artificial Sequence
  SARS-CoV-2/Wuhan/WIV05/2019__EPI_ISL_402128 spike protein mRNA gc (1-1273)(K986P_V987P_K986P_V987P_S13I_W152C_L452R_D614G)
aggagacccgugacccggaaguuguacggcuacgcgacuuucccucccacaaacccucgcgcccuuccuuuccuacuugggcccggcagaaagcuuaccauguucguguuccuggugcugcugccccuggugagcauccagugcgugaaccugaccacccggacccagcugccaccagccuacaccaacagcuucacccggggcgucuacuaccccgacaagguguuccggagcagcguccugcacagcacccaggaccuguuccugcccuucuucagcaacgugaccugguuccacgccauccacgugagcggcaccaacggcaccaagcgguucgacaaccccgugcugcccuucaacgacggcguguacuucgccagcaccgagaagagcaacaucauccggggcuggaucuucggcaccacccuggacagcaagacccagagccugcugaucgugaauaacgccaccaacguggugaucaaggugugcgaguuccaguucugcaacgaccccuuccugggcguguacuaccacaagaacaacaagagcugcauggagagcgaguuccggguguacagcagcgccaacaacugcaccuucgaguacgugagccagcccuuccugauggaccuggagggcaagcagggcaacuucaagaaccugcgggaguucguguucaagaacaucgacggcuacuucaagaucuacagcaagcacaccccaaucaaccuggugcgggaucugccccagggcuucucagcccuggagccccugguggaccugcccaucggcaucaacaucacccgguuccagacccugcuggcccugcaccggagcuaccugaccccaggcgacagcagcagcggguggacagcaggcgcggcugcuuacuacgugggcuaccugcagccccggaccuuccugcugaaguacaacgagaacggcaccaucaccgacgccguggacugcgcccuggacccucugagcgagaccaagugcacccugaagagcuucaccguggagaagggcaucuaccagaccagcaacuuccgggugcagcccaccgagagcaucgugcgguuccccaacaucaccaaccugugccccuucggcgagguguucaacgccacccgguucgccagcguguacgccuggaaccggaagcggaucagcaacugcguggccgacuacagcgugcuguacaacagcgccagcuucagcaccuucaagugcuacggcgugagccccaccaagcugaacgaccugugcuucaccaacguguacgccgacagcuucgugauccguggcgacgaggugcggcagaucgcacccggccagacaggcaagaucgccgacuacaacuacaagcugcccgacgacuucaccggcugcgugaucgccuggaacagcaacaaccucgacagcaaggugggcggcaacuacaacuaccgcuaccggcuguuccggaagagcaaccugaagcccuucgagcgggacaucagcaccgagaucuaccaagccggcuccaccccuugcaacggcguggagggcuucaacugcuacuucccucugcagagcuacggcuuccagcccaccaacggcgugggcuaccagcccuaccgggugguggugcugagcuucgagcugcugcacgccccagccaccguguguggccccaagaagagcaccaaccuggugaagaacaagugcgugaacuucaacuucaacggccuuaccggcaccggcgugcugaccgagagcaacaagaaauuccugcccuuucagcaguucggccgggacaucgccgacaccaccgacgcugugcgggauccccagacccuggagauccuggacaucaccccuugcagcuucggcggcgugagcgugaucaccccaggcaccaacaccagcaaccagguggccgugcuguaccagggcgugaacugcaccgaggugcccguggccauccacgccgaccagcugacacccaccuggcgggucuacagcaccggcagcaacguguuccagacccgggccgguugccugaucggcgccgagcacgugaacaacagcuacgagugcgacauccccaucggcgccggcaucugugccagcuaccagacccagaccaauucaccccggagggcaaggagcguggccagccagagcaucaucgccuacaccaugagccugggcgccgagaacagcguggccuacagcaacaacagcaucgccauccccaccaacuucaccaucagcgugaccaccgagauucugcccgugagcaugaccaagaccagcguggacugcaccauguacaucugcggcgacagcaccgagugcagcaaccugcugcugcaguacggcagcuucugcacccagcugaaccgggcccugaccggcaucgccguggagcaggacaagaacacccaggagguguucgcccaggugaagcagaucuacaagaccccucccaucaaggacuucggcggcuucaacuucagccagauccugcccgaccccagcaagcccagcaagcggagcuucaucgaggaccugcuguucaacaaggugacccuagccgacgccggcuucaucaagcaguacggcgacugccucggcgacauagccgcccgggaccugaucugcgcccagaaguucaacggccugaccgugcugccuccccugcugaccgacgagaugaucgcccaguacaccagcgcccuguuagccggaaccaucaccagcggcuggacuuucggcgcuggagccgcucugcagauccccuucgccaugcagauggccuaccgguucaacggcaucggcgugacccagaacgugcuguacgagaaccagaagcugaucgccaaccaguucaacagcgccaucggcaagauccaggacagccugagcagcaccgcuagcgcccugggcaagcugcaggacguggugaaccagaacgcccaggcccugaacacccuggugaagcagcugagcagcaacuucggcgccaucagcagcgugcugaacgacauccugagccggcuggacccucccgaggccgaggugcagaucgaccggcugaucacuggccggcugcagagccugcagaccuacgugacccagcagcugauccgggccgccgagauucgggccagcgccaaccuggccgccaccaagaugagcgagugcgugcugggccagagcaagcggguggacuucugcggcaagggcuaccaccugaugagcuuuccccagagcgcaccccacggagugguguuccugcacgugaccuacgugcccgcccaggagaagaacuucaccaccgccccagccaucugccacgacggcaaggcccacuuuccccgggagggcguguucgugagcaacggcacccacugguucgugacccagcggaacuucuacgagccccagaucaucaccaccgacaacaccuucgugagcggcaacugcgacguggugaucggcaucgugaacaacaccguguacgauccccugcagcccgagcuggacagcuucaaggaggagcuggacaaguacuucaagaaucacaccagccccgacguggaccugggcgacaucagcggcaucaacgccagcguggugaacauccagaaggagaucgaucggcugaacgagguggccaagaaccugaacgagagccugaucgaccugcaggagcugggcaaguacgagcaguacaucaaguggcccugguacaucuggcugggcuucaucgccggccugaucgccaucgugauggugaccaucaugcugugcugcaugaccagcugcugcagcugccugaagggcuguugcagcugcggcagcugcugcaaguucgacgaggacgacagcgagcccgugcugaagggcgugaagcugcacuacaccugaggacuaguguccaccugucccuccugggcugcuggauugucucguuuuccugccaaauaaacaggaucagcgcuuuacagaucuaaaaaaaaaaaaaaaaaaaaaaaaaaaaaaaaaaaaaaaaaaaaaaaaaaaaaaaaaaaaaaaaaaaaaaaaaaaaaaaaaaaaaaaaaaaaaaaaaaaa

SEQ ID NO: 25331 - RNA, 4105 nt, Artificial Sequence
  SARS-CoV-2/Wuhan/WIV05/2019__EPI_ISL_402128 spike protein mRNA gc (1-1273)(K986P_V987P)
aggagacccgugacccggaaguuguacggcuacgcgacuuucccucccacaaacccucgcgcccuuccuuuccuacuugggcccggcagaaagcuuaccauguucguguuccuggugcugcugccccuggugagcagccagugcgugaaccugaccacccggacccagcugcccccugccuacaccaacagcuucacccggggcguguacuaccccgacaagguguuccggagcagcgugcugcacagcacccaggaccuguuccugcccuucuucagcaacgugaccugguuccacgccauccacgugagcggcaccaacggcaccaagcgguucgacaacccagugcugcccuucaacgacggcguguacuucgccagcaccgagaagucaaacaucauccggggcuggaucuucggcaccacccuggacagcaagacacagagccugcugaucgugaacaacgccaccaacguggugaucaaggugugcgaguuucaguucugcaacgaccccuuccugggcguguacuaccacaagaacaacaagagcuggauggagagcgaguuccgggucuacagcagcgcuaacaauugcaccuucgaguacgugagccagcccuuccugauggaccucgagggcaagcagggcaacuucaagaaccugcgggaguucguguucaagaacaucgauggcuacuucaagaucuacagcaagcacacccccaucaaccuggugcgggaccugccccagggauucagcgcccuggagccucugguggaccugcccaucggcaucaacaucaccagguuccagacccugcuggcccugcaccggagcuaccugacccccggcgacagcagcagcggcuggaccgccggcgccgccgcauacuacgugggcuaccugcagccacggaccuuccugcugaaguacaacgagaacggcaccaucaccgacgccguggacugcgcccuggacccccugagcgagaccaagugcacccuaaagagcuucaccguggagaagggcaucuaccagaccagcaacuuccgggugcagcccacugagagcaucgugcgguuccccaacauuaccaaccugugucccuucggcgagguguucaacgccacccgguucgccagcguguacgccuggaaccggaagcggaucagcaacugcguggccgacuacagcgugcuguacaacagcgccagcuucagcaccuucaagugcuacggcgugagcccuaccaagcugaacgaccugugcuucaccaacguguacgcugacagcuucgugauccggggcgacgaggugcggcagaucgcccccggccagaccggcaagaucgccgacuacaacuacaagcugcccgacgacuucaccggcugcgugaucgccuggaacagcaacaaccuggacagcaaggugggcggcaacuacaacuaccuguaccggcuguuccguaagagcaaccugaagccauucgagcgggacaucagcaccgagaucuaccaggccggcagcacccccugcaacgguguggagggcuuuaacugcuacuucccccugcagagcuacggcuuccagcccaccaacggcgugggcuaccagcccuaccgggugguggugcugagcuucgagcugcugcacgcccccgccaccgugugcggcccuaaaaagagcaccaaccuggugaagaacaagugcgugaacuucaauuucaacggccugaccggcaccggcgugcugaccgagagcaacaagaaguuccugcccuuccagcaguucggccgggauaucgccgacaccaccgacgcagugcgggacccccagacccuggagauccuggacaucaccccaugcagcuucggcggcgugagcgucaucacccccggcacaaacaccagcaaccagguggccgugcuguaccaggacgugaacugcaccgaggugcccguggccauccacgccgaccagcugacccccaccuggcggguguacagcaccggaagcaacguguuccagacccgggccggcugccugaucggcgccgagcacgugaacaacuccuacgagugcgacauccccaucggcgcuggcaucugcgccagcuaccagacccagaccaacagcccccggcgggcccggagcguggccagccagagcaucaucgccuacaccaugagcuuaggcgccgagaacagcguggccuacagcaacaacagcaucgcgaucccuaccaacuucaccaucagcgugaccaccgagauacugcccgugagcaugaccaagaccagcguggacuguaccauguacaucugcggcgacagcaccgagugcagcaaccugcugcugcaguacggcagcuucugcacccagcugaaccgggcccugaccggcaucgccguggagcaggacaagaacacccaagagguguucgcccaggugaagcagaucuacaagacucccccaaucaaggacuucggcggcuucaacuucagccagauccugcccgaccccagcaagcccagcaagcggagcuucaucgaggaccugcuguucaacaaggugacccuggccgacgccggcuucaucaagcaguacggcgauugccugggcgacaucgccgcucgggaccugaucugcgcccagaaguucaacgggcugaccgugcugcccccucugcugaccgacgagaugaucgcccaguacaccagcgcccugcuugccggcaccaucaccagcggcuggaccuucggcgccggcgcagcccugcagauccccuucgccaugcagauggccuaccgguucaacggcaucggcgugacccagaacgugcuguacgagaaccagaagcugaucgccaaccaguucaacagcgccaucggcaagauccaggacagccugagcagcaccgccagcgcccugggcaagcugcaggacguggugaaccagaacgcucaggcccugaacacccuggugaagcagcugagcagcaacuucggcgccaucagcucagugcugaaugacauccugagcaggcuggaucccccagaggccgaggugcagaucgaccggcugaucaccggccggcugcagagccugcagaccuacgugacccagcagcugauccgggccgccgagauccgggccagcgccaaccuggcagccaccaagaugagcgagugcgugcugggccagagcaagcggguggacuuuugcggcaagggcuaccaccugaugagcuucccccagagcgcuccccacggcgugguguuccuccacgugacauacguccccgcccaggagaagaacuucaccaccgcccccgccauuugccacgacggcaaggcccacuucccccgggagggcguguucgugagcaacggaacccacugguucgugacccagcggaacuucuacgagccucagaucaucaccaccgacaacaccuucgugagcggcaacugcgacguggugaucggcaucgugaacaacaccguguacgacccccugcagcccgagcuggacagcuucaaggaggagcuggacaaguacuucaagaaccacaccagcccagacguggaccugggcgacaucagcggcaucaacgccagcguggugaacauccagaaggagaucgaccggcugaacgagguggccaagaaccugaacgagagccugaucgaccugcaggagcugggcaaguacgagcaguacaucaaguggcccugguacaucuggcugggcuucaucgccggccugaucgccaucgugauggugaccaucaugcugugcugcaugaccagcugcuguagcugccugaagggcugcugcagcugcggcagcugcugcaaguucgacgaggacgacagcgagcccgugcugaagggcgugaagcugcacuacaccugaggacuaguguccaccugucccuccugggcugcuggauugucucguuuuccugccaaauaaacaggaucagcgcuuuacagaucuaaaaaaaaaaaaaaaaaaaaaaaaaaaaaaaaaaaaaaaaaaaaaaaaaaaaaaaaaaaaaaaaaaaaaaaaaaaaaaaaaaaaaaaaaaaaaaaaaaaa

SEQ ID NO: 25332 - RNA, 4105 nt, Artificial Sequence
  SARS-CoV-2/Wuhan/WIV05/2019__EPI_ISL_402128 spike protein mRNA gc (1-1273)(K986P_V987P_ D614G)
aggagacccgugacccggaaguuguacggcuacgcgacuuucccucccacaaacccucgcgcccuuccuuuccuacuugggcccggcagaaagcuuaccauguucguguuccuggugcugcugccccuggugagcagccagugcgugaaccugaccacccggacccagcugcccccugccuacaccaacagcuucacccggggcguguacuaccccgacaagguguuccggagcagcgugcugcacagcacccaggaccuguuccugcccuucuucagcaacgugaccugguuccacgccauccacgugagcggcaccaacggcaccaagcgguucgacaacccagugcugcccuucaacgacggcguguacuucgccagcaccgagaagucaaacaucauccggggcuggaucuucggcaccacccuggacagcaagacacagagccugcugaucgugaacaacgccaccaacguggugaucaaggugugcgaguuucaguucugcaacgaccccuuccugggcguguacuaccacaagaacaacaagagcuggauggagagcgaguuccgggucuacagcagcgcuaacaauugcaccuucgaguacgugagccagcccuuccugauggaccucgagggcaagcagggcaacuucaagaaccugcgggaguucguguucaagaacaucgauggcuacuucaagaucuacagcaagcacacccccaucaaccuggugcgggaccugccccagggauucagcgcccuggagccucugguggaccugcccaucggcaucaacaucaccagguuccagacccugcuggcccugcaccggagcuaccugacccccggcgacagcagcagcggcuggaccgccggcgccgccgcauacuacgugggcuaccugcagccacggaccuuccugcugaaguacaacgagaacggcaccaucaccgacgccguggacugcgcccuggacccccugagcgagaccaagugcacccuaaagagcuucaccguggagaagggcaucuaccagaccagcaacuuccgggugcagcccacugagagcaucgugcgguuccccaacauuaccaaccugugucccuucggcgagguguucaacgccacccgguucgccagcguguacgccuggaaccggaagcggaucagcaacugcguggccgacuacagcgugcuguacaacagcgccagcuucagcaccuucaagugcuacggcgugagcccuaccaagcugaacgaccugugcuucaccaacguguacgcugacagcuucgugauccggggcgacgaggugcggcagaucgcccccggccagaccggcaagaucgccgacuacaacuacaagcugcccgacgacuucaccggcugcgugaucgccuggaacagcaacaaccuggacagcaaggugggcggcaacuacaacuaccuguaccggcuguuccguaagagcaaccugaagccauucgagcgggacaucagcaccgagaucuaccaggccggcagcacccccugcaacgguguggagggcuuuaacugcuacuucccccugcagagcuacggcuuccagcccaccaacggcgugggcuaccagcccuaccgggugguggugcugagcuucgagcugcugcacgcccccgccaccgugugcggcccuaaaaagagcaccaaccuggugaagaacaagugcgugaacuucaauuucaacggccugaccggcaccggcgugcugaccgagagcaacaagaaguuccugcccuuccagcaguucggccgggauaucgccgacaccaccgacgcagugcgggacccccagacccuggagauccuggacaucaccccaugcagcuucggcggcgugagcgucaucacccccggcacaaacaccagcaaccagguggccgugcuguaccagggagugaacugcaccgaggugcccguggccauccacgccgaccagcugacccccaccuggcggguguacagcaccggcagcaacguguuccagacccgggccggcugccugaucggcgccgagcacgugaacaacuccuacgagugcgacauccccaucggcgcuggcaucugcgccagcuaccagacccagaccaacagcccccggcgggcccggagcguggccagccagagcaucaucgccuacaccaugagcuuaggcgccgagaacagcguggccuacagcaacaacagcaucgcgaucccuaccaacuucaccaucagcgugaccaccgagauacugcccgugagcaugaccaagaccagcguggacuguaccauguacaucugcggcgacagcaccgagugcagcaaccugcugcugcaguacggcagcuucugcacccagcugaaccgggcccugaccggcaucgccguggagcaggacaagaacacccaagagguguucgcccaggugaagcagaucuacaagacucccccaaucaaggacuucggcggcuucaacuucagccagauccugcccgaccccagcaagcccagcaagcggagcuucaucgaggaccugcuguucaacaaggugacccuggccgacgccggcuucaucaagcaguacggcgacugccugggggauaucgccgcucgggaccugaucugcgcccagaaguucaacggccugaccgugcugcccccucugcugaccgacgagaugaucgcccaguacaccagcgcccugcuugccggcaccaucaccagcggcuggaccuucggcgccggcgcagcccugcagauccccuucgccaugcagauggccuaccgguucaacggcaucggcgugacccagaacgugcuguacgagaaccagaagcugaucgccaaccaguucaacagcgccaucggcaagauccaggacagccugagcagcaccgccagcgcccugggcaagcugcaggacguggugaaccagaacgcucaggcccugaacacccuggugaagcagcugagcagcaacuucggcgccaucagcucagugcugaaugacauccugagcaggcuggaucccccagaggccgaggugcagaucgaccggcugaucaccggccggcugcagagccugcagaccuacgugacccagcagcugauccgggccgccgagauccgggccagcgccaaccuggcagccaccaagaugagcgagugcgugcugggccagagcaagcggguggacuuuugcggcaagggcuaccaccugaugagcuucccccagagcgcuccccacggcgugguguuccuccacgugacauacguccccgcccaggagaagaacuucaccaccgcccccgccauuugccacgacggcaaggcccacuucccccgggagggaguguucgugagcaacggcacccacugguucgugacccagcggaacuucuacgagccucagaucaucaccaccgacaacaccuucgugagcggcaacugcgacguggugaucggcaucgugaacaacaccguguacgacccccugcagcccgagcuggacagcuucaaggaggagcuggacaaguacuucaagaaccacaccagcccagacguggaccugggcgacaucagcggcaucaacgccagcguggugaacauccagaaggagaucgaccggcugaacgagguggccaagaaccugaacgagagccugaucgaccugcaggagcugggcaaguacgagcaguacaucaaguggcccugguacaucuggcugggcuucaucgccggccugaucgccaucgugauggugaccaucaugcugugcugcaugaccagcugcuguagcugccugaagggcugcugcagcugcggcagcugcugcaaguucgacgaggacgacagcgagcccgugcugaagggcgugaagcugcacuacaccugaggacuaguguccaccugucccuccugggcugcuggauugucucguuuuccugccaaauaaacaggaucagcgcuuuacagaucuaaaaaaaaaaaaaaaaaaaaaaaaaaaaaaaaaaaaaaaaaaaaaaaaaaaaaaaaaaaaaaaaaaaaaaaaaaaaaaaaaaaaaaaaaaaaaaaaaaaa

SEQ ID NO: 25333 - RNA, 4105 nt, Artificial Sequence
  SARS-CoV-2/Wuhan/WIV05/2019__EPI_ISL_402128 spike protein mRNA gc (1-1273)(K986P_V987P_A222V_D614G)
aggagacccgugacccggaaguuguacggcuacgcgacuuucccucccacaaacccucgcgcccuuccuuuccuacuugggcccggcagaaagcuuaccauguucguguuccuggugcugcugccccuggugagcagccagugcgugaaccugaccacccggacccagcugcccccugccuacaccaacagcuucacccggggcguguacuaccccgacaagguguuccggagcagcgugcugcacagcacccaggaccuguuccugcccuucuucagcaacgugaccugguuccacgccauccacgugagcggcaccaacggcaccaagcgguucgacaacccagugcugcccuucaacgacggcguguacuucgccagcaccgagaagucaaacaucauccggggcuggaucuucggcaccacccuggacagcaagacacagagccugcugaucgugaacaacgccaccaacguggugaucaaggugugcgaguuucaguucugcaacgaccccuuccugggcguguacuaccacaagaacaacaagagcuggauggagagcgaguuccgggucuacagcagcgcuaacaauugcaccuucgaguacgugagccagcccuuccugauggaccucgagggcaagcagggcaacuucaagaaccugcgggaguucguguucaagaacaucgauggcuacuucaagaucuacagcaagcacacccccaucaaccuggugcgggaccugccccagggauucagcgugcuggagccucugguggaccugcccaucggcaucaacaucaccagguuccagacccugcuggcccugcaccggagcuaccugacccccggcgacagcagcagcggcuggaccgccggcgccgccgccuacuacgugggcuaccugcagccacggaccuuccugcugaaguacaacgagaacggcaccaucaccgacgcaguggacugcgcccuggacccccugagcgagaccaagugcacccuaaagagcuucaccguggagaagggcaucuaccagaccagcaacuuccgggugcagcccacugagagcaucgugcgguuccccaacauuaccaaccugugucccuucggcgagguguucaacgccacccgguucgccagcguguacgccuggaaccggaagcggaucagcaacugcguggccgacuacagcgugcuguacaacagcgccagcuucagcaccuucaagugcuacggcgugagcccuaccaagcugaacgaccugugcuucaccaacguguacgccgacagcuucgugauccggggcgacgaggugcggcagaucgcucccggccagaccggcaagaucgccgacuacaacuacaagcugcccgacgacuucaccggcugcgugaucgccuggaacagcaacaaccuggacagcaaggugggcggcaacuacaacuaccuguaccggcuguuccguaagagcaaccugaagccauucgagcgggacaucagcaccgagaucuaccaggccggcagcacccccugcaacgguguggagggcuuuaacugcuacuucccccugcagagcuacggcuuccagcccaccaacggcgugggcuaccagcccuaccgggugguggugcugagcuucgagcugcugcacgcccccgccaccgugugcggcccuaaaaagagcaccaaccuggugaagaacaagugcgugaacuucaauuucaacggccugaccggcaccggcgugcugaccgagagcaacaagaaguuccugcccuuccagcaguucggccgggauaucgccgacaccaccgacgccgugcgggacccccagacccuggagauccuggacaucaccccaugcagcuucggcggcgucagcgugaucacccccggcacaaacaccagcaaccagguggcagugcuguaccagggagugaacugcaccgaggugcccguggccauccacgccgaccagcugacccccaccuggcggguguacagcaccggcagcaacguguuccagacccgggccggcugccugaucggcgccgagcacgugaacaacuccuacgagugcgacauccccaucggcgccggcaucugcgcuagcuaccagacccagaccaacagcccccggcgggcccggagcguggccagccagagcaucaucgccuacaccaugagcuuaggcgccgagaacagcguggccuacagcaacaacagcaucgccaucccuaccaacuucaccaucagcgugaccaccgagauacugcccgugagcaugaccaagaccagcguggacuguaccauguacaucugcggcgacagcaccgagugcagcaaccugcugcugcaguacggcagcuucugcacccagcugaaccgggcgcugaccggcaucgccguggagcaggacaagaacacccaagagguguucgcccaggugaagcagaucuacaagacucccccaaucaaggacuucggcggcuucaacuucagccagauccugcccgaccccagcaagcccagcaagcggagcuucaucgaggaccugcuguucaacaaggugacccuggccgacgccggcuucaucaagcaguacggcgacugccugggggauaucgccgcccgggaccugaucugcgcucagaaguucaacggccugaccgugcugcccccucugcugaccgacgagaugaucgcccaguacaccagcgcccugcuugccggcaccaucaccagcggcuggaccuucggcgccggcgccgcacugcagauccccuucgccaugcagauggccuaccgguucaacggcaucggcgugacccagaacgugcuguacgagaaccagaagcugaucgccaaccaguucaacagcgccaucggcaagauccaggacagccugagcagcaccgccagcgcccugggcaagcugcaggacguggugaaccagaacgcccaggcucugaacacccuggugaagcagcugagcagcaacuucggcgccaucagcucagugcugaaugacauccugagcaggcuggaucccccagaggccgaggugcagaucgaccggcugaucaccggccggcugcagagccugcagaccuacgugacccagcagcugauccgggccgccgagauccgggccagcgccaaccuggccgcaaccaagaugagcgagugcgugcugggccagagcaagcggguggacuuuugcggcaagggcuaccaccugaugagcuucccccagagcgcuccccacggcgugguguuccuccacgucacauacgugcccgcccaggagaagaacuucaccaccgcccccgccauuugccacgacggcaaggcccacuucccccgggagggaguguucgugagcaacggcacccacugguucgugacccagcggaacuucuacgagccucagaucaucaccaccgacaacaccuucgugagcggcaacugcgacguggugaucggcaucgugaacaacaccguguacgacccccugcagcccgagcuggacagcuucaaggaggagcuggacaaguacuucaagaaccacaccagcccagacguggaccugggcgacaucagcggcaucaacgccagcguggugaacauccagaaggagaucgaccggcugaacgagguggccaagaaccugaacgagagccugaucgaccugcaggagcugggcaaguacgagcaguacaucaaguggcccugguacaucuggcugggcuucaucgccggccugaucgccaucgugauggugaccaucaugcugugcugcaugaccagcugcuguagcugccugaagggcugcugcagcugcggcagcugcugcaaguucgacgaggacgacagcgagcccgugcugaagggcgugaagcugcacuacaccugaggacuaguguccaccugucccuccugggcugcuggauugucucguuuuccugccaaauaaacaggaucagcgcuuuacagaucuaaaaaaaaaaaaaaaaaaaaaaaaaaaaaaaaaaaaaaaaaaaaaaaaaaaaaaaaaaaaaaaaaaaaaaaaaaaaaaaaaaaaaaaaaaaaaaaaaaaa

SEQ ID NO: 25334 - RNA, 4105 nt, Artificial Sequence
  SARS-CoV-2/Wuhan/WIV05/2019__EPI_ISL_402128 spike protein mRNA gc (1-1273)(K986P_V987P_N439K_D614G)
aggagacccgugacccggaaguuguacggcuacgcgacuuucccucccacaaacccucgcgcccuuccuuuccuacuugggcccggcagaaagcuuaccauguucguguuccuggugcugcugccccuggugagcagccagugcgugaaccugaccacccggacccagcugcccccugccuacaccaacagcuucacccggggcguguacuaccccgacaagguguuccggagcagcgugcugcacagcacccaggaccuguuccugcccuucuucagcaacgugaccugguuccacgccauccacgugagcggcaccaacggcaccaagcgguucgacaacccagugcugcccuucaacgacggcguguacuucgccagcaccgagaagucaaacaucauccggggcuggaucuucggcaccacccuggacagcaagacacagagccugcugaucgugaacaacgccaccaacguggugaucaaggugugcgaguuucaguucugcaacgaccccuuccugggcguguacuaccacaagaacaacaagagcuggauggagagcgaguuccgggucuacagcagcgcuaacaauugcaccuucgaguacgugagccagcccuuccugauggaccucgagggcaagcagggcaacuucaagaaccugcgggaguucguguucaagaacaucgauggcuacuucaagaucuacagcaagcacacccccaucaaccuggugcgggaccugccccagggauucagcgcccuggagccucugguggaccugcccaucggcaucaacaucaccagguuccagacccugcuggcccugcaccggagcuaccugacccccggcgacagcagcagcggcuggaccgccggcgccgccgcauacuacgugggcuaccugcagccacggaccuuccugcugaaguacaacgagaacggcaccaucaccgacgccguggacugcgcccuggacccccugagcgagaccaagugcacccuaaagagcuucaccguggagaagggcaucuaccagaccagcaacuuccgggugcagcccacugagagcaucgugcgguuccccaacauuaccaaccugugucccuucggcgagguguucaacgccacccgguucgccagcguguacgccuggaaccggaagcggaucagcaacugcguggccgacuacagcgugcuguacaacagcgccagcuucagcaccuucaagugcuacggcgugagcccuaccaagcugaacgaccugugcuucaccaacguguacgcugacagcuucgugauccggggcgacgaggugcggcagaucgcccccggccagaccggcaagaucgccgacuacaacuacaagcugcccgacgacuucaccggcugcgugaucgccuggaacagcaagaaccuggacagcaaggugggcggcaacuacaacuaccuguaccggcuguuccguaagagcaaccugaagccauucgagcgggacaucagcaccgagaucuaccaggccggcagcacccccugcaacgguguggagggcuuuaacugcuacuucccccugcagagcuacggcuuccagcccaccaacggcgugggcuaccagcccuaccgggugguggugcugagcuucgagcugcugcacgcccccgccaccgugugcggcccuaaaaagagcaccaaccuggugaagaacaagugcgugaacuucaacuucaauggccugaccggcaccggcgugcugaccgagagcaacaagaaguuccugcccuuccagcaguucggccgggauaucgccgacaccaccgacgcagugcgggacccccagacccuggagauccuggacaucaccccaugcagcuucggcggcgugagcgucaucacccccggcacaaacaccagcaaccagguggccgugcuguaccagggagugaacugcaccgaggugcccguggccauccacgccgaccagcugacccccaccuggcggguguacagcaccggcagcaacguguuccagacccgggccggcugccugaucggcgccgagcacgugaacaacuccuacgagugcgacauccccaucggcgcuggcaucugcgccagcuaccagacccagaccaacagcccccggcgggcccggagcguggccagccagagcaucaucgccuacaccaugagcuuaggcgccgagaacagcguggccuacagcaacaacagcaucgcgaucccuaccaacuucaccaucagcgugaccaccgagauacugcccgugagcaugaccaagaccagcguggacuguaccauguacaucugcggcgacagcaccgagugcagcaaccugcugcugcaguacggcagcuucugcacccagcugaaccgggcccugaccggcaucgccguggagcaggacaagaacacccaagagguguucgcccaggugaagcagaucuacaagacucccccaaucaaggacuucggcggcuucaacuucagccagauccugcccgaccccagcaagcccagcaagcggagcuucaucgaggaccugcuguucaacaaggugacccuggccgacgccggcuucaucaagcaguacggcgacugccugggggauaucgccgcucgggaccugaucugcgcccagaaguucaacggccugaccgugcugcccccucugcugaccgacgagaugaucgcccaguacaccagcgcccugcuugccggcaccaucaccagcggcuggaccuucggcgccggcgcagcccugcagauccccuucgccaugcagauggccuaccgguucaacggcaucggcgugacccagaacgugcuguacgagaaccagaagcugaucgccaaccaguucaacagcgccaucggcaagauccaggacagccugagcagcaccgccagcgcccugggcaagcugcaggacguggugaaccagaacgcucaggcccugaacacccuggugaagcagcugagcagcaacuucggcgccaucagcucagugcugaacgacauccugagcaggcuggaucccccagaggccgaggugcagaucgaccggcugaucaccggccggcugcagagccugcagaccuacgugacccagcagcugauccgggccgccgagauccgggccagcgccaaucuggcagccaccaagaugagcgagugcgugcugggccagagcaagcggguggacuuuugcggcaagggcuaccaccugaugagcuucccccagagcgcuccccacggcgugguguuccuccacgugacauacguccccgcccaggagaagaacuucaccaccgcccccgccauuugccacgacggcaaggcccacuucccccgggagggaguguucgugagcaacggcacccacugguucgugacccagcggaacuucuacgagccucagaucaucaccaccgacaacaccuucgugagcggcaacugcgacguggugaucggcaucgugaacaacaccguguacgacccccugcagcccgagcuggacagcuucaaggaggagcuggacaaguacuucaagaaccacaccagcccagacguggaccugggcgacaucagcggcaucaacgccagcguggugaacauccagaaggagaucgaccggcugaacgagguggccaagaaccugaacgagagccugaucgaccugcaggagcugggcaaguacgagcaguacaucaaguggcccugguacaucuggcugggcuucaucgccggccugaucgccaucgugauggugaccaucaugcugugcugcaugaccagcugcuguagcugccugaagggcugcugcagcugcggcagcugcugcaaguucgacgaggacgacagcgagcccgugcugaagggcgugaagcugcacuacaccugaggacuaguguccaccugucccuccugggcugcuggauugucucguuuuccugccaaauaaacaggaucagcgcuuuacagaucuaaaaaaaaaaaaaaaaaaaaaaaaaaaaaaaaaaaaaaaaaaaaaaaaaaaaaaaaaaaaaaaaaaaaaaaaaaaaaaaaaaaaaaaaaaaaaaaaaaaa

SEQ ID NO: 25335 - RNA, 4105 nt, Artificial Sequence
  SARS-CoV-2/Wuhan/WIV05/2019__EPI_ISL_402128 spike protein mRNA gc (1-1273)(K986P_V987P_S477N_D614G)
aggagacccgugacccggaaguuguacggcuacgcgacuuucccucccacaaacccucgcgcccuuccuuuccuacuugggcccggcagaaagcuuaccauguucguguuccuggugcugcugccccuggugagcagccagugcgugaaccugaccacccggacccagcugcccccugccuacaccaacagcuucacccggggcguguacuaccccgacaagguguuccggagcagcgugcugcacagcacccaggaccuguuccugcccuucuucagcaacgugaccugguuccacgccauccacgugagcggcaccaacggcaccaagcgguucgacaacccagugcugcccuucaacgacggcguguacuucgccagcaccgagaagucaaacaucauccggggcuggaucuucggcaccacccuggacagcaagacacagagccugcugaucgugaacaacgccaccaacguggugaucaaggugugcgaguuucaguucugcaacgaccccuuccugggcguguacuaccacaagaacaacaagagcuggauggagagcgaguuccgggucuacagcagcgcuaacaauugcaccuucgaguacgugagccagcccuuccugauggaccucgagggcaagcagggcaacuucaagaaccugcgggaguucguguucaagaacaucgauggcuacuucaagaucuacagcaagcacacccccaucaaccuggugcgggaccugccccagggauucagcgcccuggagccucugguggaccugcccaucggcaucaacaucaccagguuccagacccugcuggcccugcaccggagcuaccugacccccggcgacagcagcagcggcuggaccgccggcgccgccgcauacuacgugggcuaccugcagccacggaccuuccugcugaaguacaacgagaacggcaccaucaccgacgccguggacugcgcccuggacccccugagcgagaccaagugcacccuaaagagcuucaccguggagaagggcaucuaccagaccagcaacuuccgggugcagcccacugagagcaucgugcgguuccccaacauuaccaaccugugucccuucggcgagguguucaacgccacccgguucgccagcguguacgccuggaaccggaagcggaucagcaacugcguggccgacuacagcgugcuguacaacagcgccagcuucagcaccuucaagugcuacggcgugagcccuaccaagcugaacgaccugugcuucaccaacguguacgcugacagcuucgugauccggggcgacgaggugcggcagaucgcccccggccagaccggcaagaucgccgacuacaacuacaagcugcccgacgacuucaccggcugcgugaucgccuggaacagcaacaaccuggacagcaaggugggcggcaacuacaacuaccuguaccggcuguuccguaagagcaaccugaagccauucgagcgggacaucagcaccgagaucuaccaggccggcaacacccccugcaacgguguggagggcuuuaacugcuacuucccccugcagagcuacggcuuccagcccaccaacggcgugggcuaccagcccuaccgggugguggugcugagcuucgagcugcugcacgcccccgccaccgugugcggcccuaaaaagagcaccaaccuggugaagaacaagugcgugaauuucaacuucaacggccugaccggcaccggcgugcugaccgagagcaacaagaaguuccugcccuuccagcaguucggccgggauaucgccgacaccaccgacgcagugcgggacccccagacccuggagauccuggacaucaccccaugcagcuucggcggcgugagcgucaucacccccggcacaaacaccagcaaccagguggccgugcuguaccagggagugaacugcaccgaggugcccguggccauccacgccgaccagcugacccccaccuggcggguguacagcaccggcagcaacguguuccagacccgggccggcugccugaucggcgccgagcacgugaacaacagcuacgagugcgacauccccaucggcgcuggcaucugcgccuccuaccagacccagaccaacagcccccggcgggcccggagcguggccagccagagcaucaucgccuacaccaugagcuuaggcgccgagaacagcguggccuacagcaacaacagcaucgcgaucccuaccaacuucaccaucagcgugaccaccgagauacugcccgugagcaugaccaagaccagcguggacuguaccauguacaucugcggcgacagcaccgagugcagcaaccugcugcugcaguacggcagcuucugcacccagcugaaccgggcccugaccggcaucgccguggagcaggacaagaacacccaagagguguucgcccaggugaagcagaucuacaagacucccccaaucaaggacuucggcggcuucaacuucagccagauccugcccgaccccagcaagcccagcaagcggagcuucaucgaggaccugcuguucaacaaggugacccuggccgacgccggcuucaucaagcaguacggcgacugccugggggauaucgccgcucgggaccugaucugcgcccagaaguucaacggccugaccgugcugcccccucugcugaccgacgagaugaucgcccaguacaccagcgcccugcuugccggcaccaucaccagcggcuggaccuucggcgccggcgcagcccugcagauccccuucgccaugcagauggccuaccgguucaacggcaucggcgugacccagaacgugcuguacgagaaccagaagcugaucgccaaccaguucaacagcgccaucggcaagauccaggacagccugagcagcaccgccagcgcccugggcaagcugcaggacguggugaaccagaacgcucaggcccugaacacccuggugaagcagcugagcagcaauuucggcgccaucagcagcgugcugaacgacauccugucaaggcuggaucccccagaggccgaggugcagaucgaccggcugaucaccggccggcugcagagccugcagaccuacgugacccagcagcugauccgggccgccgagauccgggccagcgccaaccuggcagccaccaagaugagcgagugcgugcugggccagagcaagcggguggacuuuugcggcaagggcuaccaccugaugagcuucccccagagcgcuccccacggcgugguguuccuccacgugacauacguccccgcccaggagaagaacuucaccaccgcccccgccauuugccacgacggcaaggcccacuucccccgggagggaguguucgugagcaacggcacccacugguucgugacccagcggaacuucuacgagccucagaucaucaccaccgacaacaccuucgugagcggcaacugcgacguggugaucggcaucgugaacaacaccguguacgacccccugcagcccgagcuggacagcuucaaggaggagcuggacaaguacuucaagaaccacaccagcccagacguggaccugggcgacaucagcggcaucaacgccagcguggugaacauccagaaggagaucgaccggcugaacgagguggccaagaaccugaacgagagccugaucgaccugcaggagcugggcaaguacgagcaguacaucaaguggcccugguacaucuggcugggcuucaucgccggccugaucgccaucgugauggugaccaucaugcugugcugcaugaccagcugcuguagcugccugaagggcugcugcagcugcggcagcugcugcaaguucgacgaggacgacagcgagcccgugcugaagggcgugaagcugcacuacaccugaggacuaguguccaccugucccuccugggcugcuggauugucucguuuuccugccaaauaaacaggaucagcgcuuuacagaucuaaaaaaaaaaaaaaaaaaaaaaaaaaaaaaaaaaaaaaaaaaaaaaaaaaaaaaaaaaaaaaaaaaaaaaaaaaaaaaaaaaaaaaaaaaaaaaaaaaaa

SEQ ID NO: 25336 - RNA, 4105 nt, Artificial Sequence
  SARS-CoV-2/Wuhan/WIV05/2019__EPI_ISL_402128 spike protein mRNA gc (1-1273)(K986P_V987P_N501Y_D614G)
aggagacccgugacccggaaguuguacggcuacgcgacuuucccucccacaaacccucgcgcccuuccuuuccuacuugggcccggcagaaagcuuaccauguucguguuccuggugcugcugccccuggugagcagccagugcgugaaccugaccacccggacccagcugcccccugccuacaccaacagcuucacccggggcguguacuaccccgacaagguguuccggagcagcgugcugcacagcacccaggaccuguuccugcccuucuucagcaacgugaccugguuccacgccauccacgugagcggcaccaacggcaccaagcgguucgacaacccagugcugcccuucaacgacggcguguacuucgccagcaccgagaagucaaacaucauccggggcuggaucuucggcaccacccuggacagcaagacacagagccugcugaucgugaacaacgccaccaacguggugaucaaggugugcgaguuucaguucugcaacgaccccuuccugggcguguacuaccacaagaacaacaagagcuggauggagagcgaguuccgggucuacagcagcgcuaacaauugcaccuucgaguacgugagccagcccuuccugauggaccucgagggcaagcagggcaacuucaagaaccugcgggaguucguguucaagaacaucgauggcuacuucaagaucuacagcaagcacacccccaucaaccuggugcgggaccugccccagggauucagcgcccuggagccucugguggaccugcccaucggcaucaacaucaccagguuccagacccugcuggcccugcaccggagcuaccugacccccggcgacagcagcagcggcuggaccgccggcgccgccgcauacuacgugggcuaccugcagccacggaccuuccugcugaaguacaacgagaacggcaccaucaccgacgccguggacugcgcccuggacccccugagcgagaccaagugcacccuaaagagcuucaccguggagaagggcaucuaccagaccagcaacuuccgggugcagcccacugagagcaucgugcgguuccccaacauuaccaaccugugucccuucggcgagguguucaacgccacccgguucgccagcguguacgccuggaaccggaagcggaucagcaacugcguggccgacuacagcgugcuguacaacagcgccagcuucagcaccuucaagugcuacggcgugagcccuaccaagcugaacgaccugugcuucaccaacguguacgcugacagcuucgugauccggggcgacgaggugcggcagaucgcccccggccagaccggcaagaucgccgacuacaacuacaagcugcccgacgacuucaccggcugcgugaucgccuggaacagcaacaaccuggacagcaaggugggcggcaacuacaacuaccuguaccggcuguuccguaagagcaaccugaagccauucgagcgggacaucagcaccgagaucuaccaggccggcagcacccccugcaacgguguggagggcuuuaacugcuacuucccccugcagagcuacggcuuccagcccaccuacggcgugggcuaccagcccuaccgggugguggugcugagcuucgagcugcugcacgcccccgccaccgugugcggcccuaaaaagagcaccaaccuggugaagaacaagugcgugaacuucaacuucaauggccugaccggcaccggcgugcugaccgagagcaacaagaaguuccugcccuuccagcaguucggccgggauaucgccgacaccaccgacgcagugcgggacccccagacccuggagauccuggacaucaccccaugcagcuucggcggcgugagcgucaucacccccggcacaaacaccagcaaccagguggccgugcuguaccagggagugaacugcaccgaggugcccguggccauccacgccgaccagcugacccccaccuggcggguguacagcaccggcagcaacguguuccagacccgggccggcugccugaucggcgccgagcacgugaacaacuccuacgagugcgacauccccaucggcgcuggcaucugcgccagcuaccagacccagaccaacagcccccggcgggcccggagcguggccagccagagcaucaucgccuacaccaugagcuuaggcgccgagaacagcguggccuacagcaacaacagcaucgcgaucccuaccaacuucaccaucagcgugaccaccgagauacugcccgugagcaugaccaagaccagcguggacuguaccauguacaucugcggcgacagcaccgagugcagcaaccugcugcugcaguacggcagcuucugcacccagcugaaccgggcccugaccggcaucgccguggagcaggacaagaacacccaagagguguucgcccaggugaagcagaucuacaagacucccccaaucaaggacuucggcggcuucaacuucagccagauccugcccgaccccagcaagcccagcaagcggagcuucaucgaggaccugcuguucaacaaggugacccuggccgacgccggcuucaucaagcaguacggcgacugccugggggauaucgccgcucgggaccugaucugcgcccagaaguucaacggccugaccgugcugcccccucugcugaccgacgagaugaucgcccaguacaccagcgcccugcuugccggcaccaucaccagcggcuggaccuucggcgccggcgcagcccugcagauccccuucgccaugcagauggccuaccgguucaacggcaucggcgugacccagaacgugcuguacgagaaccagaagcugaucgccaaccaguucaacagcgccaucggcaagauccaggacagccugagcagcaccgccagcgcccugggcaagcugcaggacguggugaaccagaacgcucaggcccugaacacccuggugaagcagcugagcagcaacuucggcgccaucagcucagugcugaacgacauccugagcaggcuggaucccccagaggccgaggugcagaucgaccggcugaucaccggccggcugcagagccugcagaccuacgugacccagcagcugauccgggccgccgagauccgggccagcgccaaucuggcagccaccaagaugagcgagugcgugcugggccagagcaagcggguggacuuuugcggcaagggcuaccaccugaugagcuucccccagagcgcuccccacggcgugguguuccuccacgugacauacguccccgcccaggagaagaacuucaccaccgcccccgccauuugccacgacggcaaggcccacuucccccgggagggaguguucgugagcaacggcacccacugguucgugacccagcggaacuucuacgagccucagaucaucaccaccgacaacaccuucgugagcggcaacugcgacguggugaucggcaucgugaacaacaccguguacgacccccugcagcccgagcuggacagcuucaaggaggagcuggacaaguacuucaagaaccacaccagcccagacguggaccugggcgacaucagcggcaucaacgccagcguggugaacauccagaaggagaucgaccggcugaacgagguggccaagaaccugaacgagagccugaucgaccugcaggagcugggcaaguacgagcaguacaucaaguggcccugguacaucuggcugggcuucaucgccggccugaucgccaucgugauggugaccaucaugcugugcugcaugaccagcugcuguagcugccugaagggcugcugcagcugcggcagcugcugcaaguucgacgaggacgacagcgagcccgugcugaagggcgugaagcugcacuacaccugaggacuaguguccaccugucccuccugggcugcuggauugucucguuuuccugccaaauaaacaggaucagcgcuuuacagaucuaaaaaaaaaaaaaaaaaaaaaaaaaaaaaaaaaaaaaaaaaaaaaaaaaaaaaaaaaaaaaaaaaaaaaaaaaaaaaaaaaaaaaaaaaaaaaaaaaaaa

SEQ ID NO: 25337 - RNA, 4099 nt, Artificial Sequence
  SARS-CoV-2/Wuhan/WIV05/2019__EPI_ISL_402128 spike protein mRNA gc (1-1273)(K986P_V987P_H69del_V70del_D614G)
aggagacccgugacccggaaguuguacggcuacgcgacuuucccucccacaaacccucgcgcccuuccuuuccuacuugggcccggcagaaagcuuaccauguucguguuccuggugcugcugccccuggugagcagccagugcgugaaccugaccacccggacccagcugcccccugccuacaccaacagcuucacccggggcguguacuaccccgacaagguguuccggagcagcgugcugcacagcacccaggaccuguuccugcccuucuucagcaacgugaccugguuccacgccaucagcggcaccaacggcaccaagcgguucgacaacccagugcugcccuucaacgacggcguguacuucgccagcaccgagaagucaaacaucauccggggcuggaucuucggcaccacccuggacagcaagacacagagccugcugaucgugaacaacgccaccaacguggugaucaaggugugcgaguuucaguucugcaacgaccccuuccugggcguguacuaccacaagaacaacaagagcuggauggagagcgaguuccggguguacagcagcgcuaacaauugcaccuucgaguacgucagccagcccuuccugauggaccucgagggcaagcagggcaacuucaagaaccugcgggaguucguguucaagaacaucgauggcuacuucaagaucuacagcaagcacacccccaucaaccuggugcgggaccugccccagggauucagcgcccuggagccucugguggaccugcccaucggcaucaacaucaccagguuccagacccugcuggcccugcaccggagcuaccugacccccggcgacagcagcagcggcuggaccgccggcgccgccgcauacuacgugggcuaccugcagccacggaccuuccugcugaaguacaacgagaacggcaccaucaccgacgccguggacugcgcccuggacccccugagcgagaccaagugcacccuaaagagcuucaccguggagaagggcaucuaccagaccagcaacuuccgggugcagcccacugagagcaucgugcgguuccccaacauuaccaaccugugucccuucggcgagguguucaacgccacccgguucgccagcguguacgccuggaaccggaagcggaucagcaacugcguggccgacuacagcgugcuguacaacagcgccagcuucagcaccuucaagugcuacggcgugagcccuaccaagcugaacgaccugugcuucaccaacguguacgcugacagcuucgugauccggggcgacgaggugcggcagaucgcccccggccagaccggcaagaucgccgacuacaacuacaagcugcccgacgacuucaccggcugcgugaucgccuggaacagcaacaaccuggacagcaaggugggcggcaacuacaacuaccuguaccggcuguuccguaagagcaaccugaagccauucgagcgggacaucagcaccgagaucuaccaggccggcagcacccccugcaacgguguggagggcuuuaacugcuacuucccccugcagagcuacggcuuccagcccaccaacggcgugggcuaccagcccuaccgggugguggugcugagcuucgagcugcugcacgcccccgccaccgugugcggcccuaaaaagagcaccaaccuggugaagaacaagugcgugaacuucaauuucaacggccugaccggcaccggcgugcugaccgagagcaacaagaaguuccugcccuuccagcaguucggccgggauaucgccgacaccaccgacgcagugcgggacccccagacccuggagauccuggacaucaccccaugcagcuucggcggcgugagcgugaucacccccggcacaaacaccagcaaccaggucgccgugcuguaccagggagugaacugcaccgaggugcccguggccauccacgccgaccagcugacccccaccuggcggguguacagcaccggcagcaacguguuccagacccgggccggcugccugaucggcgccgagcacgugaacaacuccuacgagugcgacauccccaucggcgcuggcaucugcgccagcuaccagacccagaccaacagcccccggcgggcccggagcguggccagccagagcaucaucgccuacaccaugagcuuaggcgccgagaacagcguggccuacagcaacaacagcaucgcgaucccuaccaacuucaccaucagcgugaccaccgagauacugcccgugagcaugaccaagaccagcguggacuguaccauguacaucugcggcgacagcaccgagugcagcaaccugcugcugcaguacggcagcuucugcacccagcugaaccgggcccugaccggcaucgccguggagcaggacaagaacacccaagagguguucgcccaggugaagcagaucuacaagacucccccaaucaaggacuucggcggcuucaacuucagccagauccugcccgaccccagcaagcccagcaagcggagcuucaucgaggaccugcuguucaacaaggugacccuggccgacgccggcuucaucaagcaguacggcgacugccugggggauaucgccgcucgggaccugaucugcgcccagaaguucaacggccugaccgugcugcccccucugcugaccgacgagaugaucgcccaguacaccagcgcccugcuugccggcaccaucaccagcggcuggaccuucggcgccggcgcagcccugcagauccccuucgccaugcagauggccuaccgguucaacggcaucggcgugacccagaacgugcuguacgagaaccagaagcugaucgccaaccaguucaacagcgccaucggcaagauccaggacagccugagcagcaccgccagcgcccugggcaagcugcaggacguggugaaccagaacgcucaggcccugaacacccuggugaagcagcugagcagcaacuucggcgccaucagcucagugcugaaugacauccugagcaggcuggaucccccagaggccgaggugcagaucgaccggcugaucaccggccggcugcagagccugcagaccuacgugacccagcagcugauccgggccgccgagauccgggccagcgccaaccuggcagccaccaagaugagcgagugcgugcugggccagagcaagcggguggacuuuugcggcaagggcuaccaccugaugagcuucccccagagcgcuccccacggcgugguguuccuccacgugacauacgugcccgcccaggagaagaacuucaccaccgcccccgccauuugccacgacggcaaggcccacuucccccgggagggagucuucgugagcaacggcacccacugguucgugacccagcggaacuucuacgagccucagaucaucaccaccgacaacaccuucgugagcggcaacugcgacguggugaucggcaucgugaacaacaccguguacgacccccugcagcccgagcuggacagcuucaaggaggagcuggacaaguacuucaagaaccacaccagcccagacguggaccugggcgacaucagcggcaucaacgccagcguggugaacauccagaaggagaucgaccggcugaacgagguggccaagaaccugaacgagagccugaucgaccugcaggagcugggcaaguacgagcaguacaucaaguggcccugguacaucuggcugggcuucaucgccggccugaucgccaucgugauggugaccaucaugcugugcugcaugaccagcugcuguagcugccugaagggcugcugcagcugcggcagcugcugcaaguucgacgaggacgacagcgagcccgugcugaagggcgugaagcugcacuacaccugaggacuaguguccaccugucccuccugggcugcuggauugucucguuuuccugccaaauaaacaggaucagcgcuuuacagaucuaaaaaaaaaaaaaaaaaaaaaaaaaaaaaaaaaaaaaaaaaaaaaaaaaaaaaaaaaaaaaaaaaaaaaaaaaaaaaaaaaaaaaaaaaaaaaaaaaaaa

SEQ ID NO: 25338 - RNA, 4105 nt, Artificial Sequence
  SARS-CoV-2/Wuhan/WIV05/2019__EPI_ISL_402128 spike protein mRNA gc (1-1273)(K986P_V987P_Y453F_D614G)
aggagacccgugacccggaaguuguacggcuacgcgacuuucccucccacaaacccucgcgcccuuccuuuccuacuugggcccggcagaaagcuuaccauguucguguuccuggugcugcugccccuggugagcagccagugcgugaaccugaccacccggacccagcugcccccugccuacaccaacagcuucacccggggcguguacuaccccgacaagguguuccggagcagcgugcugcacagcacccaggaccuguuccugcccuucuucagcaacgugaccugguuccacgccauccacgugagcggcaccaacggcaccaagcgguucgacaacccagugcugcccuucaacgacggcguguacuucgccagcaccgagaagucaaacaucauccggggcuggaucuucggcaccacccuggacagcaagacacagagccugcugaucgugaacaacgccaccaacguggugaucaaggugugcgaguuucaguucugcaacgaccccuuccugggcguguacuaccacaagaacaacaagagcuggauggagagcgaguuccgggucuacagcagcgcuaacaauugcaccuucgaguacgugagccagcccuuccugauggaccucgagggcaagcagggcaacuucaagaaccugcgggaguucguguucaagaacaucgauggcuacuucaagaucuacagcaagcacacccccaucaaccuggugcgggaccugccccagggauucagcgcccuggagccucugguggaccugcccaucggcaucaacaucaccagguuccagacccugcuggcccugcaccggagcuaccugacccccggcgacagcagcagcggcuggaccgccggcgccgccgcauacuacgugggcuaccugcagccacggaccuuccugcugaaguacaacgagaacggcaccaucaccgacgccguggacugcgcccuggacccccugagcgagaccaagugcacccuaaagagcuucaccguggagaagggcaucuaccagaccagcaacuuccgggugcagcccacugagagcaucgugcgguuccccaacauuaccaaccugugucccuucggcgagguguucaacgccacccgguucgccagcguguacgccuggaaccggaagcggaucagcaacugcguggccgacuacagcgugcuguacaacagcgccagcuucagcaccuucaagugcuacggcgugagcccuaccaagcugaacgaccugugcuucaccaacguguacgcugacagcuucgugauccggggcgacgaggugcggcagaucgcccccggccagaccggcaagaucgccgacuacaacuacaagcugcccgacgacuucaccggcugcgugaucgccuggaacagcaacaaccuggacagcaaggugggcggcaacuacaacuaccuguuccggcuguuccguaagagcaaccugaagccauuugagcgggacaucagcaccgagaucuaccaggccggcagcacccccugcaacgguguggagggcuucaacugcuacuucccccugcagagcuacggcuuccagcccaccaacggcgugggcuaccagcccuaccgggugguggugcugagcuucgagcugcugcacgcccccgccaccgugugcggcccuaaaaagagcaccaaccuggugaagaacaagugcgugaacuucaauuucaacggccugaccggcaccggcgugcugaccgagagcaacaagaaguuccugcccuuccagcaguucggccgggauaucgccgacaccaccgacgcagugcgggacccccagacccuggagauccuggacaucaccccaugcagcuucggcggcgugagcgucaucacccccggcacaaacaccagcaaccagguggccgugcuguaccagggagugaacugcaccgaggugcccguggccauccacgccgaccagcugacccccaccuggcggguguacagcaccggcagcaacguguuccagacccgggccggcugccugaucggcgccgagcacgugaacaacuccuacgagugcgacauccccaucggcgcuggcaucugcgccagcuaccagacccagaccaacagcccccggcgggcccggagcguggccagccagagcaucaucgccuacaccaugagcuuaggcgccgagaacagcguggccuacagcaacaacagcaucgcgaucccuaccaacuucaccaucagcgugaccaccgagauacugcccgugagcaugaccaagaccagcguggacuguaccauguacaucugcggcgacagcaccgagugcagcaaccugcugcugcaguacggcagcuucugcacccagcugaaccgggcccugaccggcaucgccguggagcaggacaagaacacccaagagguguucgcccaggugaagcagaucuacaagacucccccaaucaaggacuucggcggcuucaacuucagccagauccugcccgaccccagcaagcccagcaagcggagcuucaucgaggaccugcuguucaacaaggugacccuggccgacgccggcuucaucaagcaguacggcgacugccugggggauaucgccgcucgggaccugaucugcgcccagaaguucaacggccugaccgugcugcccccucugcugaccgacgagaugaucgcccaguacaccagcgcccugcuugccggcaccaucaccagcggcuggaccuucggcgccggcgcagcccugcagauccccuucgccaugcagauggccuaccgguucaacggcaucggcgugacccagaacgugcuguacgagaaccagaagcugaucgccaaccaguucaacagcgccaucggcaagauccaggacagccugagcagcaccgccagcgcccugggcaagcugcaggacguggugaaccagaacgcucaggcccugaacacccuggugaagcagcugagcagcaacuuuggcgccaucagcucagugcugaaugacauccugagcaggcuggaucccccagaggccgaggugcagaucgaccggcugaucaccggccggcugcagagccugcagaccuacgugacccagcagcugauccgggccgccgagauccgggccagcgccaaccuggcagccaccaagaugagcgagugcgugcugggccagagcaagcggguggacuucugcggcaagggcuaccaccugaugagcuucccccagagcgcuccccacggcgugguguuccuccacgugacauacguccccgcccaggagaagaacuucaccaccgcccccgccauuugccacgacggcaaggcccacuucccccgggagggaguguucgugagcaacggcacccacugguucgugacccagcggaacuucuacgagccucagaucaucaccaccgacaacaccuucgugagcggcaacugcgacguggugaucggcaucgugaacaacaccguguacgacccccugcagcccgagcuggacagcuucaaggaggagcuggacaaguacuucaagaaccacaccagcccagacguggaccugggcgacaucagcggcaucaacgccagcguggugaacauccagaaggagaucgaccggcugaacgagguggccaagaaccugaacgagagccugaucgaccugcaggagcugggcaaguacgagcaguacaucaaguggcccugguacaucuggcugggcuucaucgccggccugaucgccaucgugauggugaccaucaugcugugcugcaugaccagcugcuguagcugccugaagggcugcugcagcugcggcagcugcugcaaguucgacgaggacgacagcgagcccgugcugaagggcgugaagcugcacuacaccugaggacuaguguccaccugucccuccugggcugcuggauugucucguuuuccugccaaauaaacaggaucagcgcuuuacagaucuaaaaaaaaaaaaaaaaaaaaaaaaaaaaaaaaaaaaaaaaaaaaaaaaaaaaaaaaaaaaaaaaaaaaaaaaaaaaaaaaaaaaaaaaaaaaaaaaaaaa

SEQ ID NO: 25339 - RNA, 4105 nt, Artificial Sequence
  SARS-CoV-2/Wuhan/WIV05/2019__EPI_ISL_402128 spike protein mRNA gc (1-1273)(K986P_V987P_D614G_I692V)
aggagacccgugacccggaaguuguacggcuacgcgacuuucccucccacaaacccucgcgcccuuccuuuccuacuugggcccggcagaaagcuuaccauguucguguuccuggugcugcugccccuggugagcagccagugcgugaaccugaccacccggacccagcugcccccugccuacaccaacagcuucacccggggcguguacuaccccgacaagguguuccggagcagcgugcugcacagcacccaggaccuguuccugcccuucuucagcaacgugaccugguuccacgccauccacgugagcggcaccaacggcaccaagcgguucgacaacccagugcugcccuucaacgacggcguguacuucgccagcaccgagaagucaaacaucauccggggcuggaucuucggcaccacccuggacagcaagacacagagccugcugaucgugaacaacgccaccaacguggugaucaaggugugcgaguuucaguucugcaacgaccccuuccugggcguguacuaccacaagaacaacaagagcuggauggagagcgaguuccgggucuacagcagcgcuaacaauugcaccuucgaguacgugagccagcccuuccugauggaccucgagggcaagcagggcaacuucaagaaccugcgggaguucguguucaagaacaucgauggcuacuucaagaucuacagcaagcacacccccaucaaccuggugcgggaccugccccagggauucagcgcccuggagccucugguggaccugcccaucggcaucaacaucaccagguuccagacccugcuggcccugcaccggagcuaccugacccccggcgacagcagcagcggcuggaccgccggcgccgccgcauacuacgugggcuaccugcagccacggaccuuccugcugaaguacaacgagaacggcaccaucaccgacgccguggacugcgcccuggacccccugagcgagaccaagugcacccuaaagagcuucaccguggagaagggcaucuaccagaccagcaacuuccgggugcagcccacugagagcaucgugcgguuccccaacauuaccaaccugugucccuucggcgagguguucaacgccacccgguucgccagcguguacgccuggaaccggaagcggaucagcaacugcguggccgacuacagcgugcuguacaacagcgccagcuucagcaccuucaagugcuacggcgugagcccuaccaagcugaacgaccugugcuucaccaacguguacgcugacagcuucgugauccggggcgacgaggugcggcagaucgcccccggccagaccggcaagaucgccgacuacaacuacaagcugcccgacgacuucaccggcugcgugaucgccuggaacagcaacaaccuggacagcaaggugggcggcaacuacaacuaccuguaccggcuguuccguaagagcaaccugaagccauucgagcgggacaucagcaccgagaucuaccaggccggcagcacccccugcaacgguguggagggcuuuaacugcuacuucccccugcagagcuacggcuuccagcccaccaacggcgugggcuaccagcccuaccgggugguggugcugagcuucgagcugcugcacgcccccgccaccgugugcggcccuaaaaagagcaccaaccuggugaagaacaagugcgugaacuucaauuucaacggccugaccggcaccggcgugcugaccgagagcaacaagaaguuccugcccuuccagcaguucggccgggauaucgccgacaccaccgacgcagugcgggacccccagacccuggagauccuggacaucaccccaugcagcuucggcggcgugagcgucaucacccccggcacaaacaccagcaaccagguggccgugcuguaccagggagugaacugcaccgaggugcccguggccauccacgccgaccagcugacccccaccuggcggguguacagcaccggcagcaacguguuccagacccgggccggcugccugaucggcgccgagcacgugaacaacuccuacgagugcgacauccccaucggcgcuggcaucugcgccagcuaccagacccagaccaacagcccccggcgggcccggagcguggccagccagagcgugaucgccuacaccaugagcuuaggcgccgagaacagcguggccuacagcaacaacagcaucgcgaucccuaccaacuucaccaucagcgugaccaccgagauccugcccgugagcaugaccaagaccagcguggacuguaccauguacauaugcggcgacagcaccgagugcagcaaccugcugcugcaguacggcagcuucugcacccagcugaaccgggcccugaccggcaucgccguggagcaggacaagaacacccaagagguguucgcccaggugaagcagaucuacaagacucccccaaucaaggacuucggcggcuucaacuucagccagauccugcccgaccccagcaagcccagcaagcggagcuucaucgaggaccugcuguucaacaaggugacccuggccgacgccggcuucaucaagcaguacggcgacugccugggggauaucgccgcucgggaccugaucugcgcccagaaguucaacggccugaccgugcugcccccucugcugaccgacgagaugaucgcccaguacaccagcgcccugcuugccggcaccaucaccagcggcuggaccuucggcgccggcgcagcccugcagauccccuucgccaugcagauggccuaccgguucaacggcaucggcgugacccagaacgugcuguacgagaaccagaagcugaucgccaaccaguucaacagcgccaucggcaagauccaggacagccugagcagcaccgccagcgcccugggcaagcugcaggacguggugaaccagaacgcucaggcccugaacacccuggugaagcagcugagcagcaacuucggcgccaucagcucagugcugaaugacauccugagcaggcuggaucccccagaggccgaggugcagaucgaccggcugaucaccggccggcugcagagccugcagaccuacgugacccagcagcugauccgggccgccgagauccgggccagcgccaaccuggcagccaccaagaugagcgagugcgugcugggccagagcaagcggguggacuuuugcggcaagggcuaccaccugaugagcuucccccagagcgcuccccacggcgugguguuccuccacgucacauacgugcccgcccaggagaagaacuucaccaccgcccccgccaucugccacgacggcaaggcccacuucccccgggagggaguguucgugagcaacggcacccacugguucgugacccagcggaacuucuacgagccucagauuaucaccaccgacaacaccuucgugagcggcaacugcgacguggugaucggcaucgugaacaacaccguguacgacccccugcagcccgagcuggacagcuucaaggaggagcuggacaaguacuucaagaaccacaccagcccagacguggaccugggcgacaucagcggcaucaacgccagcguggugaacauccagaaggagaucgaccggcugaacgagguggccaagaaccugaacgagagccugaucgaccugcaggagcugggcaaguacgagcaguacaucaaguggcccugguacaucuggcugggcuucaucgccggccugaucgccaucgugauggugaccaucaugcugugcugcaugaccagcugcuguagcugccugaagggcugcugcagcugcggcagcugcugcaaguucgacgaggacgacagcgagcccgugcugaagggcgugaagcugcacuacaccugaggacuaguguccaccugucccuccugggcugcuggauugucucguuuuccugccaaauaaacaggaucagcgcuuuacagaucuaaaaaaaaaaaaaaaaaaaaaaaaaaaaaaaaaaaaaaaaaaaaaaaaaaaaaaaaaaaaaaaaaaaaaaaaaaaaaaaaaaaaaaaaaaaaaaaaaaaa

SEQ ID NO: 25340 - RNA, 4105 nt, Artificial Sequence
  SARS-CoV-2/Wuhan/WIV05/2019__EPI_ISL_402128 spike protein mRNA gc (1-1273)(K986P_V987P_D614G_M1229I)
aggagacccgugacccggaaguuguacggcuacgcgacuuucccucccacaaacccucgcgcccuuccuuuccuacuugggcccggcagaaagcuuaccauguucguguuccuggugcugcugccccuggugagcagccagugcgugaaccugaccacccggacccagcugcccccugccuacaccaacagcuucacccggggcguguacuaccccgacaagguguuccggagcagcgugcugcacagcacccaggaccuguuccugcccuucuucagcaacgugaccugguuccacgccauccacgugagcggcaccaacggcaccaagcgguucgacaacccagugcugcccuucaacgacggcguguacuucgccagcaccgagaagucaaacaucauccggggcuggaucuucggcaccacccuggacagcaagacacagagccugcugaucgugaacaacgccaccaacguggugaucaaggugugcgaguuucaguucugcaacgaccccuuccugggcguguacuaccacaagaacaacaagagcuggauggagagcgaguuccgggucuacagcagcgcuaacaauugcaccuucgaguacgugagccagcccuuccugauggaccucgagggcaagcagggcaacuucaagaaccugcgggaguucguguucaagaacaucgauggcuacuucaagaucuacagcaagcacacccccaucaaccuggugcgggaccugccccagggauucagcgcccuggagccucugguggaccugcccaucggcaucaacaucaccagguuccagacccugcuggcccugcaccggagcuaccugacccccggcgacagcagcagcggcuggaccgccggcgccgccgcauacuacgugggcuaccugcagccacggaccuuccugcugaaguacaacgagaacggcaccaucaccgacgccguggacugcgcccuggacccccugagcgagaccaagugcacccuaaagagcuucaccguggagaagggcaucuaccagaccagcaacuuccgggugcagcccacugagagcaucgugcgguuccccaacauuaccaaccugugucccuucggcgagguguucaacgccacccgguucgccagcguguacgccuggaaccggaagcggaucagcaacugcguggccgacuacagcgugcuguacaacagcgccagcuucagcaccuucaagugcuacggcgugagcccuaccaagcugaacgaccugugcuucaccaacguguacgcugacagcuucgugauccggggcgacgaggugcggcagaucgcccccggccagaccggcaagaucgccgacuacaacuacaagcugcccgacgacuucaccggcugcgugaucgccuggaacagcaacaaccuggacagcaaggugggcggcaacuacaacuaccuguaccggcuguuccguaagagcaaccugaagccauucgagcgggacaucagcaccgagaucuaccaggccggcagcacccccugcaacgguguggagggcuuuaacugcuacuucccccugcagagcuacggcuuccagcccaccaacggcgugggcuaccagcccuaccgggugguggugcugagcuucgagcugcugcacgcccccgccaccgugugcggcccuaaaaagagcaccaaccuggugaagaacaagugcgugaacuucaauuucaacggccugaccggcaccggcgugcugaccgagagcaacaagaaguuccugcccuuccagcaguucggccgggauaucgccgacaccaccgacgcagugcgggacccccagacccuggagauccuggacaucaccccaugcagcuucggcggcgugagcgucaucacccccggcacaaacaccagcaaccagguggccgugcuguaccagggagugaacugcaccgaggugcccguggccauccacgccgaccagcugacccccaccuggcggguguacagcaccggcagcaacguguuccagacccgggccggcugccugaucggcgccgagcacgugaacaacuccuacgagugcgacauccccaucggcgcuggcaucugcgccagcuaccagacccagaccaacagcccccggcgggcccggagcguggccagccagagcaucaucgccuacaccaugagcuuaggcgccgagaacagcguggccuacagcaacaacagcaucgcgaucccuaccaacuucaccaucagcgugaccaccgagauacugcccgugagcaugaccaagaccagcguggacuguaccauguacaucugcggcgacagcaccgagugcagcaaccugcugcugcaguacggcagcuucugcacccagcugaaccgggcccugaccggcaucgccguggagcaggacaagaacacccaagagguguucgcccaggugaagcagaucuacaagacucccccaaucaaggacuucggcggcuucaacuucagccagauccugcccgaccccagcaagcccagcaagcggagcuucaucgaggaccugcuguucaacaaggugacccuggccgacgccggcuucaucaagcaguacggcgacugccugggggauaucgccgcucgggaccugaucugcgcccagaaguucaacggccugaccgugcugcccccucugcugaccgacgagaugaucgcccaguacaccagcgcccugcuugccggcaccaucaccagcggcuggaccuucggcgccggcgcagcccugcagauccccuucgccaugcagauggccuaccgguucaacggcaucggcgugacccagaacgugcuguacgagaaccagaagcugaucgccaaccaguucaacagcgccaucggcaagauccaggacagccugagcagcaccgccagcgcccugggcaagcugcaggacguggugaaccagaacgcucaggcccugaacacccuggugaagcagcugagcagcaacuucggcgccaucagcucagugcugaaugacauccugagcaggcuggaucccccagaggccgaggugcagaucgaccggcugaucaccggccggcugcagagccugcagaccuacgugacccagcagcugauccgggccgccgagauccgggccagcgccaaccuggcagccaccaagaugagcgagugcgugcugggccagagcaagcggguggacuuuugcggcaagggcuaccaccugaugagcuucccccagagcgcuccccacggcgugguguuccuccacgugacauacguccccgcccaggagaagaacuucaccaccgcccccgccauuugccacgacggcaaggcccacuucccccgggagggaguguucgugagcaacggcacccacugguucgugacccagcggaacuucuacgagccucagaucaucaccaccgacaacaccuucgugagcggcaacugcgacguggugaucggcaucgugaacaacaccguguacgacccccugcagcccgagcuggacagcuucaaggaggagcuggacaaguacuucaagaaccacaccagcccagacguggaccugggcgacaucagcggcaucaacgccagcguggugaacauccagaaggagaucgaccggcugaacgagguggccaagaaccugaacgagagccugaucgaccugcaggagcugggcaaguacgagcaguacaucaaguggcccugguacaucuggcugggcuucaucgccggccugaucgccaucgugaucgugaccaucaugcugugcugcaugaccagcugcuguagcugccugaagggcugcugcagcugcggcagcugcugcaaguucgacgaggacgacagcgagcccgugcugaagggcgugaagcugcacuacaccugaggacuaguguccaccugucccuccugggcugcuggauugucucguuuuccugccaaauaaacaggaucagcgcuuuacagaucuaaaaaaaaaaaaaaaaaaaaaaaaaaaaaaaaaaaaaaaaaaaaaaaaaaaaaaaaaaaaaaaaaaaaaaaaaaaaaaaaaaaaaaaaaaaaaaaaaaaa

SEQ ID NO: 25341 - RNA, 4099 nt, Artificial Sequence
  SARS-CoV-2/Wuhan/WIV05/2019__EPI_ISL_402128 spike protein mRNA gc (1-1273)(K986P_V987P_H69del_V70del_A222V_Y453F_S477N_D614G_I692V)
aggagacccgugacccggaaguuguacggcuacgcgacuuucccucccacaaacccucgcgcccuuccuuuccuacuugggcccggcagaaagcuuaccauguucguguuccuggugcugcugccccuggugagcagccagugcgugaaccugaccacccggacccagcugcccccugccuacaccaacagcuucacccggggcguguacuaccccgacaagguguuccggagcagcgugcugcacagcacccaggaccuguuccugcccuucuucagcaacgugaccugguuccacgccaucagcggcaccaacggcaccaagcgguucgacaacccagugcugcccuucaacgacggcguguacuucgccagcaccgagaagucaaacaucauccggggcuggaucuucggcaccacccuggacagcaagacacagagccugcugaucgugaacaacgccaccaacguggugaucaaggugugcgaguuucaguucugcaacgaccccuuccugggcguguacuaccacaagaacaacaagagcuggauggagagcgaguuccggguguacagcagcgcuaacaauugcaccuucgaguacgucagccagcccuuccugauggaccucgagggcaagcagggcaacuucaagaaccugcgggaguucguguucaagaacaucgauggcuacuucaagaucuacagcaagcacacccccaucaaccuggugcgggaccugccccagggauucagcgugcuggagccucugguggaccugcccaucggcaucaacaucaccagguuccagacccugcuggcccugcaccggagcuaccugacccccggcgacagcagcagcggcuggaccgccggcgccgccgccuacuacgugggcuaccugcagccacggaccuuccugcugaaguacaacgagaacggcaccaucaccgacgcaguggacugcgcccuggacccccugagcgagaccaagugcacccuaaagagcuucaccguggagaagggcaucuaccagaccagcaacuuccgggugcagcccacugagagcaucgugcgguuccccaacauuaccaaccugugucccuucggcgagguguucaacgccacccgguucgccagcguguacgccuggaaccggaagcggaucagcaacugcguggccgacuacagcgugcuguacaacagcgccagcuucagcaccuucaagugcuacggcgugagcccuaccaagcugaacgaccugugcuucaccaacguguacgccgacagcuucgugauccggggcgacgaggugcggcagaucgcucccggccagaccggcaagaucgccgacuacaacuacaagcugcccgacgacuucaccggcugcgugaucgccuggaacagcaacaaccuggacagcaaggugggcggcaacuacaacuaccuguuccggcuguuccguaagagcaaccugaagccauuugagcgggacaucagcaccgagaucuaccaggccggcaacacccccugcaacgguguggagggcuucaacugcuacuucccccugcagagcuacggcuuccagcccaccaacggcgugggcuaccagcccuaccgggugguggugcugagcuucgagcugcugcacgcccccgccaccgugugcggcccuaaaaagagcaccaaccuggugaagaacaagugcgugaauuucaacuucaacggccugaccggcaccggcgugcugaccgagagcaacaagaaguuccugcccuuccagcaguucggccgggauaucgccgacaccaccgacgccgugcgggacccccagacccuggagauccuggacaucaccccaugcagcuucggcggcgugagcgucaucacccccggcacaaacaccagcaaccagguggcagugcuguaccagggagugaacugcaccgaggugcccguggccauccacgccgaccagcugacccccaccuggcggguguacagcaccggcagcaacguguuccagacccgggccggcugccugaucggcgccgagcacgugaacaacagcuacgagugcgacauccccaucggcgccggcaucugcgcuuccuaccagacccagaccaacagcccccggcgggcccggagcguggccagccagagcgugaucgccuacaccaugagcuuaggcgccgagaacagcguggccuacagcaacaacagcaucgccaucccuaccaacuucaccaucagcgugaccaccgagauccugcccgugagcaugaccaagaccagcguggacuguaccauguacauaugcggcgacagcaccgagugcagcaaccugcugcugcaguacggcagcuucugcacccagcugaaccgggcgcugaccggcaucgccguggagcaggacaagaacacccaagagguguucgcccaggugaagcagaucuacaagacucccccaaucaaggacuucggcggcuucaacuucagccagauccugcccgaccccagcaagcccagcaagcggagcuucaucgaggaccugcuguucaacaaggugacccuggccgacgccggcuucaucaagcaguacggcgacugccugggggauaucgccgcccgggaccugaucugcgcucagaaguucaacggccugaccgugcugcccccucugcugaccgacgagaugaucgcccaguacaccagcgcccugcuugccggcaccaucaccagcggcuggaccuucggcgccggcgccgcacugcagauccccuucgccaugcagauggccuaccgguucaacggcaucggcgugacccagaacgugcuguacgagaaccagaagcugaucgccaaccaguucaacagcgccaucggcaagauccaggacagccugagcagcaccgccagcgcccugggcaagcugcaggacguggugaaccagaacgcccaggcucugaacacccuggugaagcagcugagcagcaauuuuggcgccaucagcagcgugcugaacgacauccugucaaggcuggaucccccagaggccgaggugcagaucgaccggcugaucaccggccggcugcagagccugcagaccuacgugacccagcagcugauccgggccgccgagauccgggccagcgccaaccuggccgcaaccaagaugagcgagugcgugcugggccagagcaagcggguggacuucugcggcaagggcuaccaccugaugagcuucccccagagcgcuccccacggcgugguguuccuccacgucacauacgugcccgcccaggagaagaacuucaccaccgcccccgccaucugccacgacggcaaggcccacuucccccgggagggaguguucgugagcaacggcacccacugguucgugacccagcggaacuucuacgagccucagauuaucaccaccgacaacaccuucgugagcggcaacugcgacguggugaucggcaucgugaacaacaccguguacgacccccugcagcccgagcuggacagcuucaaggaggagcuggacaaguacuucaagaaccacaccagcccagacguggaccugggcgacaucagcggcaucaacgccagcguggugaacauccagaaggagaucgaccggcugaacgagguggccaagaaccugaacgagagccugaucgaccugcaggagcugggcaaguacgagcaguacaucaaguggcccugguacaucuggcugggcuucaucgccggccugaucgccaucgugauggugaccaucaugcugugcugcaugaccagcugcuguagcugccugaagggcugcugcagcugcggcagcugcugcaaguucgacgaggacgacagcgagcccgugcugaagggcgugaagcugcacuacaccugaggacuaguguccaccugucccuccugggcugcuggauugucucguuuuccugccaaauaaacaggaucagcgcuuuacagaucuaaaaaaaaaaaaaaaaaaaaaaaaaaaaaaaaaaaaaaaaaaaaaaaaaaaaaaaaaaaaaaaaaaaaaaaaaaaaaaaaaaaaaaaaaaaaaaaaaaaa

SEQ ID NO: 25342 - RNA, 4099 nt, Artificial Sequence
  SARS-CoV-2/Wuhan/WIV05/2019__EPI_ISL_402128 spike protein mRNA gc (1-1273)(K986P_V987P_H69del_V70del_Y453F_D614G_I692V_M1229I)
aggagacccgugacccggaaguuguacggcuacgcgacuuucccucccacaaacccucgcgcccuuccuuuccuacuugggcccggcagaaagcuuaccauguucguguuccuggugcugcugccccuggugagcagccagugcgugaaccugaccacccggacccagcugcccccugccuacaccaacagcuucacccggggcguguacuaccccgacaagguguuccggagcagcgugcugcacagcacccaggaccuguuccugcccuucuucagcaacgugaccugguuccacgccaucagcggcaccaacggcaccaagcgguucgacaacccagugcugcccuucaacgacggcguguacuucgccagcaccgagaagucaaacaucauccggggcuggaucuucggcaccacccuggacagcaagacacagagccugcugaucgugaacaacgccaccaacguggugaucaaggugugcgaguuucaguucugcaacgaccccuuccugggcguguacuaccacaagaacaacaagagcuggauggagagcgaguuccggguguacagcagcgcuaacaauugcaccuucgaguacgucagccagcccuuccugauggaccucgagggcaagcagggcaacuucaagaaccugcgggaguucguguucaagaacaucgauggcuacuucaagaucuacagcaagcacacccccaucaaccuggugcgggaccugccccagggauucagcgcccuggagccucugguggaccugcccaucggcaucaacaucaccagguuccagacccugcuggcccugcaccggagcuaccugacccccggcgacagcagcagcggcuggaccgccggcgccgccgcauacuacgugggcuaccugcagccacggaccuuccugcugaaguacaacgagaacggcaccaucaccgacgccguggacugcgcccuggacccccugagcgagaccaagugcacccuaaagagcuucaccguggagaagggcaucuaccagaccagcaacuuccgggugcagcccacugagagcaucgugcgguuccccaacauuaccaaccugugucccuucggcgagguguucaacgccacccgguucgccagcguguacgccuggaaccggaagcggaucagcaacugcguggccgacuacagcgugcuguacaacagcgccagcuucagcaccuucaagugcuacggcgugagcccuaccaagcugaacgaccugugcuucaccaacguguacgcugacagcuucgugauccggggcgacgaggugcggcagaucgcccccggccagaccggcaagaucgccgacuacaacuacaagcugcccgacgacuucaccggcugcgugaucgccuggaacagcaacaaccuggacagcaaggugggcggcaacuacaacuaccuguuccggcuguuccguaagagcaaccugaagccauuugagcgggacaucagcaccgagaucuaccaggccggcagcacccccugcaacgguguggagggcuucaacugcuacuucccccugcagagcuacggcuuccagcccaccaacggcgugggcuaccagcccuaccgggugguggugcugagcuucgagcugcugcacgcccccgccaccgugugcggcccuaaaaagagcaccaaccuggugaagaacaagugcgugaacuucaauuucaacggccugaccggcaccggcgugcugaccgagagcaacaagaaguuccugcccuuccagcaguucggccgggauaucgccgacaccaccgacgcagugcgggacccccagacccuggagauccuggacaucaccccaugcagcuucggcggcgugagcgugaucacccccggcacaaacaccagcaaccaggucgccgugcuguaccagggagugaacugcaccgaggugcccguggccauccacgccgaccagcugacccccaccuggcggguguacagcaccggcagcaacguguuccagacccgggccggcugccugaucggcgccgagcacgugaacaacuccuacgagugcgacauccccaucggcgcuggcaucugcgccagcuaccagacccagaccaacagcccccggcgggcccggagcguggccagccagagcgugaucgccuacaccaugagcuuaggcgccgagaacagcguggccuacagcaacaacagcaucgcgaucccuaccaacuucaccaucagcgugaccaccgagauccugcccgugagcaugaccaagaccagcguggacuguaccauguacauaugcggcgacagcaccgagugcagcaaccugcugcugcaguacggcagcuucugcacccagcugaaccgggcccugaccggcaucgccguggagcaggacaagaacacccaagagguguucgcccaggugaagcagaucuacaagacucccccaaucaaggacuucggcggcuucaacuucagccagauccugcccgaccccagcaagcccagcaagcggagcuucaucgaggaccugcuguucaacaaggugacccuggccgacgccggcuucaucaagcaguacggcgacugccugggggauaucgccgcucgggaccugaucugcgcccagaaguucaacggccugaccgugcugcccccucugcugaccgacgagaugaucgcccaguacaccagcgcccugcuugccggcaccaucaccagcggcuggaccuucggcgccggcgcagcccugcagauccccuucgccaugcagauggccuaccgguucaacggcaucggcgugacccagaacgugcuguacgagaaccagaagcugaucgccaaccaguucaacagcgccaucggcaagauccaggacagccugagcagcaccgccagcgcccugggcaagcugcaggacguggugaaccagaacgcucaggcccugaacacccuggugaagcagcugagcagcaacuuuggcgccaucagcucagugcugaaugacauccugagcaggcuggaucccccagaggccgaggugcagaucgaccggcugaucaccggccggcugcagagccugcagaccuacgugacccagcagcugauccgggccgccgagauccgggccagcgccaaccuggcagccaccaagaugagcgagugcgugcugggccagagcaagcggguggacuucugcggcaagggcuaccaccugaugagcuucccccagagcgcuccccacggcgugguguuccuccacgugacauacguccccgcccaggagaagaacuucaccaccgcccccgccaucugccacgacggcaaggcccacuucccccgggagggaguguucgugagcaacggcacccacugguucgugacccagcggaacuucuacgagccucagauuaucaccaccgacaacaccuucgugagcggcaacugcgacguggugaucggcaucgugaacaacaccguguacgacccccugcagcccgagcuggacagcuucaaggaggagcuggacaaguacuucaagaaccacaccagcccagacguggaccugggcgacaucagcggcaucaacgccagcguggugaacauccagaaggagaucgaccggcugaacgagguggccaagaaccugaacgagagccugaucgaccugcaggagcugggcaaguacgagcaguacaucaaguggcccugguacaucuggcugggcuucaucgccggccugaucgccaucgugaucgugaccaucaugcugugcugcaugaccagcugcuguagcugccugaagggcugcugcagcugcggcagcugcugcaaguucgacgaggacgacagcgagcccgugcugaagggcgugaagcugcacuacaccugaggacuaguguccaccugucccuccugggcugcuggauugucucguuuuccugccaaauaaacaggaucagcgcuuuacagaucuaaaaaaaaaaaaaaaaaaaaaaaaaaaaaaaaaaaaaaaaaaaaaaaaaaaaaaaaaaaaaaaaaaaaaaaaaaaaaaaaaaaaaaaaaaaaaaaaaaaa

SEQ ID NO: 25343 - RNA, 4096 nt, Artificial Sequence
  SARS-CoV-2/Wuhan/WIV05/2019__EPI_ISL_402128 spike protein mRNA gc (1-1273)(K986P_V987P_K986P_V987P_H69del_V70del_Y144del_N501Y_A570 D_D614G_P681H_T716I_S982A_D1118H)
aggagacccgugacccggaaguuguacggcuacgcgacuuucccucccacaaacccucgcgcccuuccuuuccuacuugggcccggcagaaagcuuaccauguucguguuccuggugcugcugccccuggugagcagccagugcgugaaccugaccacccggacccagcugcccccugccuacaccaacagcuucacccggggcguguacuaccccgacaagguguuccggagcagcgugcugcacagcacccaggaccuguuccugcccuucuucagcaacgugaccugguuccacgccaucagcggcaccaacggcaccaagcgguucgacaacccagugcugcccuucaacgacggcguguacuucgccagcaccgagaagucaaacaucauccggggcuggaucuucggcaccacccuggacagcaagacacagagccugcugaucgugaacaacgccaccaacguggugaucaaggugugcgaguuucaguucugcaacgaccccuuccugggcguguaccacaagaacaacaagagcuggauggagagcgaguuccggguguacagcagcgcuaacaauugcaccuucgaguacgucagccagcccuuccugauggaccucgagggcaagcagggcaacuucaagaaccugcgggaguucguguucaagaacaucgauggcuacuucaagaucuacagcaagcacacccccaucaaccuggugcgggaccugccccagggauucagcgcccuggagccucugguggaccugcccaucggcaucaacaucaccagguuccagacccugcuggcccugcaccggagcuaccugacccccggcgacagcagcagcggcuggaccgccggcgccgccgcauacuacgugggcuaccugcagccacggaccuuccugcugaaguacaacgagaacggcaccaucaccgacgccguggacugcgcccuggacccccugagcgagaccaagugcacccuaaagagcuucaccguggagaagggcaucuaccagaccagcaacuuccgggugcagcccacugagagcaucgugcgguuccccaacauuaccaaccugugucccuucggcgagguguucaacgccacccgguucgccagcguguacgccuggaaccggaagcggaucagcaacugcguggccgacuacagcgugcuguacaacagcgccagcuucagcaccuucaagugcuacggcgugagcccuaccaagcugaacgaccugugcuucaccaacguguacgcugacagcuucgugauccggggcgacgaggugcggcagaucgcccccggccagaccggcaagaucgccgacuacaacuacaagcugcccgacgacuucaccggcugcgugaucgccuggaacagcaacaaccuggacagcaaggugggcggcaacuacaacuaccuguaccggcuguuccguaagagcaaccugaagccauucgagcgggacaucagcaccgagaucuaccaggccggcagcacccccugcaacgguguggagggcuuuaacugcuacuucccccugcagagcuacggcuuccagcccaccuacggcgugggcuaccagcccuaccgggugguggugcugagcuucgagcugcugcacgcccccgccaccgugugcggcccuaaaaagagcaccaaccuggugaagaacaagugcgugaacuucaacuucaauggccugaccggcaccggcgugcugaccgagagcaacaagaaguuccugcccuuccagcaguucggccgggauaucgacgacaccaccgacgccgugcgggacccccagacccuggagauccuggacaucaccccaugcagcuucggcggcgugagcgugaucacccccggcacaaacaccagcaaccaggucgcagugcuguaccagggagugaacugcaccgaggugcccguggccauccacgccgaccagcugacccccaccuggcggguguacagcaccggcagcaacguguuccagacccgggccggcugccugaucggcgccgagcacgugaacaacuccuacgagugcgacauccccaucggcgccggcaucugcgcuagcuaccagacccagaccaacagccaccggcgggcccggagcguggccagccagagcaucaucgccuacaccaugagcuuaggcgccgagaacagcguggccuacagcaacaacagcaucgccauccccaucaacuucaccauaagcgugaccaccgagauccugccugugagcaugaccaagaccagcguggacuguaccauguacaucugcggcgacagcaccgagugcagcaaccugcugcugcaguacggcagcuucugcacccagcugaaccgggcgcugaccggcaucgccguggagcaggacaagaacacccaagagguguucgcccaggugaagcagaucuacaagaccccacccaucaaggacuucggcggcuucaacuucagccagauccugcccgaccccagcaagcccagcaagcggagcuucaucgaggaccugcuguucaacaaggugacucuggccgacgccggcuucaucaagcaguacggcgauugccugggggacaucgccgcccgggaccugaucugcgcucagaaguucaacggccugaccgugcugccuccccugcugaccgacgagaugaucgcccaguacaccagcgcccugcuugccggcaccaucaccagcggcuggaccuucggcgccggcgccgcacugcagauccccuucgccaugcagauggccuaccgguucaacggcaucggcgugacccagaacgugcuguacgagaaccagaagcugaucgccaaccaguucaacagcgccaucggcaagauccaggacagccugagcagcaccgccagcgcccugggcaagcugcaggacguggugaaccagaacgcccaggcucugaacacccuggugaagcagcugagcagcaacuucggcgccaucagcucagugcugaacgacauccuggccaggcuggacccacccgaggccgaggugcagaucgaccggcugaucaccggccggcugcagagccugcagaccuacgugacccagcagcugauccgggccgccgagauucgggccagcgccaaucuggcagccaccaagaugagcgagugcgugcugggccagagcaagcggguggacuuuugcggcaagggcuaccaccugaugagcuucccccagagcgcuccccacggcgugguguuccuccacgugaccuacgugcccgcccaggagaagaacuucacaaccgcccccgccaucugccacgacggcaaggcccacuucccccgggagggagucuucgugagcaacggcacccacugguucgugacccagcggaacuucuacgagccccagaucaucaccacccacaacaccuucgugagcggcaacugcgacguggugaucggcaucgugaacaacaccguguacgacccucugcagcccgagcuggacagcuucaaggaggagcuggacaaguacuucaagaaccacaccagccccgacguggaucugggcgacaucagcggcaucaacgccagcguggugaacauccagaaggagaucgaccggcugaacgagguggccaagaaccugaacgagagccugaucgaccugcaggagcugggcaaguacgagcaguacaucaaguggccaugguacaucuggcugggcuucaucgccggccugaucgccaucgugauggugaccaucaugcugugcugcaugaccagcugcuguagcugccugaagggcugcugcagcugcggcagcugcugcaaguucgacgaggacgacagcgagcccgugcugaagggcgugaagcugcacuacaccugaggacuaguguccaccugucccuccugggcugcuggauugucucguuuuccugccaaauaaacaggaucagcgcuuuacagaucuaaaaaaaaaaaaaaaaaaaaaaaaaaaaaaaaaaaaaaaaaaaaaaaaaaaaaaaaaaaaaaaaaaaaaaaaaaaaaaaaaaaaaaaaaaaaaaaaaaaa

SEQ ID NO: 25344 - RNA, 4105 nt, Artificial Sequence
  SARS-CoV-2/Wuhan/WIV05/2019__EPI_ISL_402128 spike protein mRNA gc (1-1273)(K986P_V987P_K986P_V987P_K417N_E484K_N501Y_D614G)
aggagacccgugacccggaaguuguacggcuacgcgacuuucccucccacaaacccucgcgcccuuccuuuccuacuugggcccggcagaaagcuuaccauguucguguuccuggugcugcugccccuggugagcagccagugcgugaaccugaccacccggacccagcugcccccugccuacaccaacagcuucacccggggcguguacuaccccgacaagguguuccggagcagcgugcugcacagcacccaggaccuguuccugcccuucuucagcaacgugaccugguuccacgccauccacgugagcggcaccaacggcaccaagcgguucgacaacccagugcugcccuucaacgacggcguguacuucgccagcaccgagaagucaaacaucauccggggcuggaucuucggcaccacccuggacagcaagacacagagccugcugaucgugaacaacgccaccaacguggugaucaaggugugcgaguuucaguucugcaacgaccccuuccugggcguguacuaccacaagaacaacaagagcuggauggagagcgaguuccgggucuacagcagcgcuaacaauugcaccuucgaguacgugagccagcccuuccugauggaccucgagggcaagcagggcaacuucaagaaccugcgggaguucguguucaagaacaucgauggcuacuucaagaucuacagcaagcacacccccaucaaccuggugcgggaccugccccagggauucagcgcccuggagccucugguggaccugcccaucggcaucaacaucaccagguuccagacccugcuggcccugcaccggagcuaccugacccccggcgacagcagcagcggcuggaccgccggcgccgccgcauacuacgugggcuaccugcagccacggaccuuccugcugaaguacaacgagaacggcaccaucaccgacgccguggacugcgcccuggacccccugagcgagaccaagugcacccuaaagagcuucaccguggagaagggcaucuaccagaccagcaacuuccgggugcagcccacugagagcaucgugcgguuccccaacauuaccaaccugugucccuucggcgagguguucaacgccacccgguucgccagcguguacgccuggaaccggaagcggaucagcaacugcguggccgacuacagcgugcuguacaacagcgccagcuucagcaccuucaagugcuacggcgugagcccuaccaagcugaacgaccugugcuucaccaacguguacgcugacagcuucgugauccggggcgacgaggugcggcagaucgcccccggccagaccggcaacaucgccgacuacaacuacaagcugcccgacgacuucaccggcugcgugaucgccuggaacagcaacaaccuggacagcaaggugggcggcaacuacaacuaccuguaccggcuguuccguaagagcaaccugaagccauucgagcgggacaucagcaccgagaucuaccaggccggcagcacccccugcaacggugugaagggcuuuaacugcuacuucccccugcagagcuacggcuuccagcccaccuacggcgugggcuaccagcccuaccgggugguggugcugagcuucgagcugcugcacgcccccgccaccgugugcggcccuaaaaagagcaccaaccuggugaagaacaagugcgugaacuucaauuucaacggccugaccggcaccggcgugcugaccgagagcaacaagaaguuccugcccuuccagcaguucggccgggauaucgccgacaccaccgacgcagugcgggacccccagacccuggagauccuggacaucaccccaugcagcuucggcggcgugagcgucaucacccccggcacaaacaccagcaaccagguggccgugcuguaccagggagugaacugcaccgaggugcccguggccauccacgccgaccagcugacccccaccuggcggguguacagcaccggcagcaacguguuccagacccgggccggcugccugaucggcgccgagcacgugaacaacuccuacgagugcgacauccccaucggcgcuggcaucugcgccagcuaccagacccagaccaacagcccccggcgggcccggagcguggccagccagagcaucaucgccuacaccaugagcuuaggcgccgagaacagcguggccuacagcaacaacagcaucgcgaucccuaccaacuucaccaucagcgugaccaccgagauacugcccgugagcaugaccaagaccagcguggacuguaccauguacaucugcggcgacagcaccgagugcagcaaccugcugcugcaguacggcagcuucugcacccagcugaaccgggcccugaccggcaucgccguggagcaggacaagaacacccaagagguguucgcccaggugaagcagaucuacaagacucccccaaucaaggacuucggcggcuucaacuucagccagauccugcccgaccccagcaagcccagcaagcggagcuucaucgaggaccugcuguucaacaaggugacccuggccgacgccggcuucaucaagcaguacggcgacugccugggggauaucgccgcucgggaccugaucugcgcccagaaguucaacggccugaccgugcugcccccucugcugaccgacgagaugaucgcccaguacaccagcgcccugcuugccggcaccaucaccagcggcuggaccuucggcgccggcgcagcccugcagauccccuucgccaugcagauggccuaccgguucaacggcaucggcgugacccagaacgugcuguacgagaaccagaagcugaucgccaaccaguucaacagcgccaucggcaagauccaggacagccugagcagcaccgccagcgcccugggcaagcugcaggacguggugaaccagaacgcucaggcccugaacacccuggugaagcagcugagcagcaacuucggcgccaucagcucagugcugaaugacauccugagcaggcuggaucccccagaggccgaggugcagaucgaccggcugaucaccggccggcugcagagccugcagaccuacgugacccagcagcugauccgggccgccgagauccgggccagcgccaaccuggcagccaccaagaugagcgagugcgugcugggccagagcaagcggguggacuuuugcggcaagggcuaccaccugaugagcuucccccagagcgcuccccacggcgugguguuccuccacgugacauacguccccgcccaggagaagaacuucaccaccgcccccgccauuugccacgacggcaaggcccacuucccccgggagggaguguucgugagcaacggcacccacugguucgugacccagcggaacuucuacgagccucagaucaucaccaccgacaacaccuucgugagcggcaacugcgacguggugaucggcaucgugaacaacaccguguacgacccccugcagcccgagcuggacagcuucaaggaggagcuggacaaguacuucaagaaccacaccagcccagacguggaccugggcgacaucagcggcaucaacgccagcguggugaacauccagaaggagaucgaccggcugaacgagguggccaagaaccugaacgagagccugaucgaccugcaggagcugggcaaguacgagcaguacaucaaguggcccugguacaucuggcugggcuucaucgccggccugaucgccaucgugauggugaccaucaugcugugcugcaugaccagcugcuguagcugccugaagggcugcugcagcugcggcagcugcugcaaguucgacgaggacgacagcgagcccgugcugaagggcgugaagcugcacuacaccugaggacuaguguccaccugucccuccugggcugcuggauugucucguuuuccugccaaauaaacaggaucagcgcuuuacagaucuaaaaaaaaaaaaaaaaaaaaaaaaaaaaaaaaaaaaaaaaaaaaaaaaaaaaaaaaaaaaaaaaaaaaaaaaaaaaaaaaaaaaaaaaaaaaaaaaaaaa

SEQ ID NO: 25345 - RNA, 4096 nt, Artificial Sequence
  SARS-CoV-2/Wuhan/WIV05/2019__EPI_ISL_402128 spike protein mRNA gc (1-1273)(K986P_V987P_K986P_V987P_L18F_D80A_D215G_L242del_A243del_ L244del_R246I_K417N_E484K_N501Y_D614G_A701V)
aggagacccgugacccggaaguuguacggcuacgcgacuuucccucccacaaacccucgcgcccuuccuuuccuacuugggcccggcagaaagcuuaccauguucguguuccuggugcugcugccccuggugagcagccagugcgugaacuucaccacccggacccagcugcccccugccuacaccaacagcuucacccggggcguguacuaccccgacaagguguuccggagcagcgugcugcacagcacccaggaccuguuccugcccuucuucagcaacgugaccugguuccacgccauccacgugagcggcaccaacggcaccaagcgguucgccaacccagugcugcccuucaacgacggcguguacuucgccagcaccgagaagucaaacaucauccggggcuggaucuuuggcaccacccuggacagcaagacacagagccugcugaucgugaacaacgcuaccaacguggugaucaaggugugcgaguuccaguucugcaacgaccccuuccugggcguguacuaccacaagaacaacaagagcuggauggagagcgaguuccgggucuacagcagcgccaacaauugcaccuucgaguacgugagccagcccuuccugauggaccuggagggcaagcagggcaacuucaagaaccuccgggaguucguguucaagaacaucgacggcuacuucaagaucuacagcaagcacacccccaucaaccuggugcggggacugccccagggcuucagcgcccuggagccucugguggaucugcccaucggcaucaacaucaccagguuccagacccugcacaucagcuaccugacccccggcgacagcagcagcggcuggaccgccggcgccgccgcauacuacgugggcuaccugcagccacggaccuuccugcugaaguacaacgagaacggcaccaucaccgacgccguggacugcgcccuggacccccugagcgagaccaagugcacccuuaagagcuucaccguggagaagggcaucuaccagaccagcaacuuccgggugcagcccacugagagcauugugcgguuccccaacaucaccaaccugugucccuucggcgagguguucaacgccacccgguucgccagcguguacgccuggaaccggaagcggaucagcaacugcguggccgacuacagcgugcuguacaacagcgccagcuucagcaccuucaagugcuacggcgugagcccuaccaagcugaacgaccugugcuucaccaacguguacgcugacagcuucgugauccggggcgacgaggugcggcagaucgcccccggccagaccggcaacaucgccgacuacaacuacaagcugcccgacgacuucaccggcugcgugaucgccuggaacagcaacaaccuggacagcaaggugggcggcaacuacaacuaccuguaccggcuauuccguaagagcaaccugaagccauuugagcgggacaucagcaccgagaucuaccaggccgguagcacccccugcaacggcgugaagggcuucaacugcuacuucccccugcagagcuacggcuuccagcccaccuacggcgugggcuaccagcccuaccgggugguggugcugagcuucgagcugcugcacgcccccgccaccgugugcggcccuaaaaagagcaccaaccuggugaagaacaagugcgugaacuucaauuucaacggccugaccggcaccggcgugcugaccgagagcaacaagaaguuccugcccuuccagcaguucggccgggacaucgccgacaccaccgaugcagugcgggacccccagacccuggagauccuggacaucaccccaugcagcuucggcggcgugagcgucaucacccccggaacaaacaccagcaaccagguggccgugcuguaccagggcgugaacugcaccgaggugcccguggccauccacgccgaccagcugacccccaccuggcggguguacagcaccggcagcaacguguuccagacccgggccggcugccugaucggcgccgagcacgugaacaacuccuacgagugcgacauccccaucggcgcuggcaucugcgccagcuaccagacccagaccaacagcccccggcgggcccggagcguggccagccagagcaucaucgccuacaccaugagccugggcguggagaacagcguggccuacagcaacaacagcaucgccaucccuaccaacuucaccauaagcgugaccaccgagauccugcccgugagcaugaccaagaccagcguggacuguaccauguacaucugcggcgacagcaccgagugcagcaaccuguuacugcaguacggcagcuucugcacccagcugaaccgggcgcugaccggcaucgccguggagcaggacaagaacacccaagagguguucgcccaggugaagcagaucuacaagacucccccaaucaaggacuucggcggcuucaacuucagccagauccugcccgaccccagcaagcccagcaagcggagcuucaucgaggaccugcuguucaacaaggugacccuggccgacgccggcuucaucaagcaguacggggacugccugggcgacaucgccgcccgggaccugaucugcgcucagaaguucaacggccugaccgugcugcccccucugcugaccgaugagaugaucgcccaguacaccagcgcccugcuggccggcaccaucaccagcggcuggaccuucggcgccggcgccgcacugcagauccccuucgccaugcagauggccuaccgguucaacggcaucggcgugacccagaacgugcuguacgagaaccagaagcugaucgccaaccaguucaacagcgccaucggcaagauccaggacagccugagcagcaccgccagcgcccugggcaagcugcaggacguggugaaccagaacgcccaggcucugaacacccuggugaagcagcugagcagcaacuuuggcgccaucagcucagugcugaaugacauccugagccggcuggaucccccagaggccgaggugcagaucgacaggcugaucaccggccggcugcagagccugcagaccuacgugacccagcagcugauccgggccgccgagauucgggccagcgccaaccuggccgcaaccaagaugagcgagugcgugcugggccagagcaagcggguggacuucugcggcaagggcuaccaccugaugagcuucccccagagcgcuccccacggcgugguguuccugcacgucacauacgugcccgcccaggagaagaacuucaccaccgcccccgccaucugccacgacggaaaggcccacuucccccgggagggcguguucgugagcaacggcacccacugguucgugacccagcggaacuucuacgagccucagaucaucaccaccgacaacaccuucgugagcggcaacugcgacguggugaucggcaucgugaacaacaccguguacgacccccugcagcccgagcuggacagcuucaaggaggagcucgacaaguacuucaagaaccacaccagcccagacguggaccugggcgacaucagcggcaucaacgccagcguggugaacauccagaaggagaucgaccggcugaacgagguggccaagaaccugaacgagagccugaucgaccugcaggagcugggcaaguacgagcaguacaucaaguggcccugguacaucuggcugggcuucaucgccggccugaucgccaucgugauggugaccaucaugcugugcugcaugaccagcugcuguagcugccugaagggcugcugcagcugcggcagcugcugcaaguucgacgaggacgacagcgagcccgugcugaagggcgugaagcugcacuacaccugaggacuaguguccaccugucccuccugggcugcuggauugucucguuuuccugccaaauaaacaggaucagcgcuuuacagaucuaaaaaaaaaaaaaaaaaaaaaaaaaaaaaaaaaaaaaaaaaaaaaaaaaaaaaaaaaaaaaaaaaaaaaaaaaaaaaaaaaaaaaaaaaaaaaaaaaaaa

SEQ ID NO: 25346 - RNA, 4105 nt, Artificial Sequence
  SARS-CoV-2/Wuhan/WIV05/2019__EPI_ISL_402128 spike protein mRNA gc (1-1273)(K986P_V987P_K986P_V987P_E484K_D614G)
aggagacccgugacccggaaguuguacggcuacgcgacuuucccucccacaaacccucgcgcccuuccuuuccuacuugggcccggcagaaagcuuaccauguucguguuccuggugcugcugccccuggugagcagccagugcgugaaccugaccacccggacccagcugcccccugccuacaccaacagcuucacccggggcguguacuaccccgacaagguguuccggagcagcgugcugcacagcacccaggaccuguuccugcccuucuucagcaacgugaccugguuccacgccauccacgugagcggcaccaacggcaccaagcgguucgacaacccagugcugcccuucaacgacggcguguacuucgccagcaccgagaagucaaacaucauccggggcuggaucuucggcaccacccuggacagcaagacacagagccugcugaucgugaacaacgccaccaacguggugaucaaggugugcgaguuucaguucugcaacgaccccuuccugggcguguacuaccacaagaacaacaagagcuggauggagagcgaguuccgggucuacagcagcgcuaacaauugcaccuucgaguacgugagccagcccuuccugauggaccucgagggcaagcagggcaacuucaagaaccugcgggaguucguguucaagaacaucgauggcuacuucaagaucuacagcaagcacacccccaucaaccuggugcgggaccugccccagggauucagcgcccuggagccucugguggaccugcccaucggcaucaacaucaccagguuccagacccugcuggcccugcaccggagcuaccugacccccggcgacagcagcagcggcuggaccgccggcgccgccgcauacuacgugggcuaccugcagccacggaccuuccugcugaaguacaacgagaacggcaccaucaccgacgccguggacugcgcccuggacccccugagcgagaccaagugcacccuaaagagcuucaccguggagaagggcaucuaccagaccagcaacuuccgggugcagcccacugagagcaucgugcgguuccccaacauuaccaaccugugucccuucggcgagguguucaacgccacccgguucgccagcguguacgccuggaaccggaagcggaucagcaacugcguggccgacuacagcgugcuguacaacagcgccagcuucagcaccuucaagugcuacggcgugagcccuaccaagcugaacgaccugugcuucaccaacguguacgcugacagcuucgugauccggggcgacgaggugcggcagaucgcccccggccagaccggcaagaucgccgacuacaacuacaagcugcccgacgacuucaccggcugcgugaucgccuggaacagcaacaaccuggacagcaaggugggcggcaacuacaacuaccuguaccggcuguuccguaagagcaaccugaagccauucgagcgggacaucagcaccgagaucuaccaggccggcagcacccccugcaacggugugaagggcuuuaacugcuacuucccccugcagagcuacggcuuccagcccaccaacggcgugggcuaccagcccuaccgggugguggugcugagcuucgagcugcugcacgcccccgccaccgugugcggcccuaaaaagagcaccaaccuggugaagaacaagugcgugaacuucaauuucaacggccugaccggcaccggcgugcugaccgagagcaacaagaaguuccugcccuuccagcaguucggccgggauaucgccgacaccaccgacgcagugcgggacccccagacccuggagauccuggacaucaccccaugcagcuucggcggcgugagcgucaucacccccggcacaaacaccagcaaccagguggccgugcuguaccagggagugaacugcaccgaggugcccguggccauccacgccgaccagcugacccccaccuggcggguguacagcaccggcagcaacguguuccagacccgggccggcugccugaucggcgccgagcacgugaacaacuccuacgagugcgacauccccaucggcgcuggcaucugcgccagcuaccagacccagaccaacagcccccggcgggcccggagcguggccagccagagcaucaucgccuacaccaugagcuuaggcgccgagaacagcguggccuacagcaacaacagcaucgcgaucccuaccaacuucaccaucagcgugaccaccgagauacugcccgugagcaugaccaagaccagcguggacuguaccauguacaucugcggcgacagcaccgagugcagcaaccugcugcugcaguacggcagcuucugcacccagcugaaccgggcccugaccggcaucgccguggagcaggacaagaacacccaagagguguucgcccaggugaagcagaucuacaagacucccccaaucaaggacuucggcggcuucaacuucagccagauccugcccgaccccagcaagcccagcaagcggagcuucaucgaggaccugcuguucaacaaggugacccuggccgacgccggcuucaucaagcaguacggcgacugccugggggauaucgccgcucgggaccugaucugcgcccagaaguucaacggccugaccgugcugcccccucugcugaccgacgagaugaucgcccaguacaccagcgcccugcuugccggcaccaucaccagcggcuggaccuucggcgccggcgcagcccugcagauccccuucgccaugcagauggccuaccgguucaacggcaucggcgugacccagaacgugcuguacgagaaccagaagcugaucgccaaccaguucaacagcgccaucggcaagauccaggacagccugagcagcaccgccagcgcccugggcaagcugcaggacguggugaaccagaacgcucaggcccugaacacccuggugaagcagcugagcagcaacuucggcgccaucagcucagugcugaaugacauccugagcaggcuggaucccccagaggccgaggugcagaucgaccggcugaucaccggccggcugcagagccugcagaccuacgugacccagcagcugauccgggccgccgagauccgggccagcgccaaccuggcagccaccaagaugagcgagugcgugcugggccagagcaagcggguggacuuuugcggcaagggcuaccaccugaugagcuucccccagagcgcuccccacggcgugguguuccuccacgugacauacguccccgcccaggagaagaacuucaccaccgcccccgccauuugccacgacggcaaggcccacuucccccgggagggaguguucgugagcaacggcacccacugguucgugacccagcggaacuucuacgagccucagaucaucaccaccgacaacaccuucgugagcggcaacugcgacguggugaucggcaucgugaacaacaccguguacgacccccugcagcccgagcuggacagcuucaaggaggagcuggacaaguacuucaagaaccacaccagcccagacguggaccugggcgacaucagcggcaucaacgccagcguggugaacauccagaaggagaucgaccggcugaacgagguggccaagaaccugaacgagagccugaucgaccugcaggagcugggcaaguacgagcaguacaucaaguggcccugguacaucuggcugggcuucaucgccggccugaucgccaucgugauggugaccaucaugcugugcugcaugaccagcugcuguagcugccugaagggcugcugcagcugcggcagcugcugcaaguucgacgaggacgacagcgagcccgugcugaagggcgugaagcugcacuacaccugaggacuaguguccaccugucccuccugggcugcuggauugucucguuuuccugccaaauaaacaggaucagcgcuuuacagaucuaaaaaaaaaaaaaaaaaaaaaaaaaaaaaaaaaaaaaaaaaaaaaaaaaaaaaaaaaaaaaaaaaaaaaaaaaaaaaaaaaaaaaaaaaaaaaaaaaaaa

SEQ ID NO: 25347 - RNA, 4105 nt, Artificial Sequence
  SARS-CoV-2/Wuhan/WIV05/2019__EPI_ISL_402128 spike protein mRNA gc (1-1273)(K986P_V987P_K986P_V987P_L18F_T20N_P26S_D138Y_R190S_K417T _E484K_N501Y_D614G_H655Y_T1027I)
aggagacccgugacccggaaguuguacggcuacgcgacuuucccucccacaaacccucgcgcccuuccuuuccuacuugggcccggcagaaagcuuaccauguucguguuccuggugcugcugccccuggugagcagccagugcgugaacuucaccaaccggacccagcugcccagcgccuacaccaacagcuucacccggggcguguacuacccugacaagguguuccggagcagcgugcugcacagcacccaggaccuguuccugcccuucuucagcaacgugaccugguuccacgccauccacgugagcggcaccaacggcaccaagcgguucgacaaccccgugcugccauucaacgacggcguguacuucgccagcaccgagaagucaaacaucauccggggcuggaucuuuggcaccacccuggacagcaagacccagagccugcugaucgugaacaacgccacaaacguggugaucaaggugugcgaguuccaguucugcaacuaccccuuccugggcguguacuaccacaagaacaacaagagcuggauggagagcgaguuccgggucuacagcagcgcuaauaacugcaccuucgaguacgugagccagcccuuccugauggaccuggagggcaagcagggcaacuucaagaaccucagcgaguucguguucaagaacaucgacggcuacuucaagaucuacagcaagcacacccccaucaaccuggugcgggaucugccccagggauucagcgcccuggagccccugguggaccugccuaucggcaucaacaucacccgguuccagacccugcuggcccugcacaggagcuaccugacccccggcgacagcagcagcggcuggaccgccggcgccgccgcauacuacgugggcuaccugcagccccggaccuuccugcugaaguacaacgagaacggcaccaucaccgacgccguggacugcgcccuggacccacugagcgagaccaagugcacccuaaagagcuucaccguggagaagggcaucuaccagaccagcaacuuccgggugcagcccaccgagagcaucgugcgguuccccaacauuacuaaccugugucccuucggcgagguguucaacgccacccgguucgccagcguguacgccuggaaccggaagcggaucagcaacugcguggccgacuacagcgugcuguacaacagcgccagcuucagcaccuucaagugcuacggcgugagccccaccaagcugaacgaccugugcuucaccaacguguacgcugacagcuucgugauccggggcgacgaggugcggcagaucgccccuggccagaccggcaccaucgccgacuacaacuacaagcugcccgacgacuucaccggcugcgugaucgccuggaacagcaacaaccuggacagcaaggugggcggcaacuacaacuaccuguaccggcuguuccguaagagcaaccugaagcccuuugagcgggacaucagcaccgagaucuaccaggccggcagcaccccaugcaacggugugaagggcuucaacugcuacuucccccugcagagcuacggcuuccagcccaccuacggcgugggcuaccagcccuaccgggugguggugcugagcuucgagcugcugcacgcccccgccaccgugugcggccccaaaaagagcaccaaccuggugaagaacaagugcgugaacuucaauuucaacggccugaccggcaccggcgugcugaccgagagcaacaagaaguuccugccuuuccagcaguucggccgggacaucgccgauaccaccgacgcagugcgggacccccagacccuggagauccuggacaucacccccugcagcuucggcggcgugagcgucaucaccccaggcacaaacaccagcaaccagguggccgugcuguaccagggagugaacugcaccgaggugcccguggccauccacgccgaccagcugacccccaccuggcggguguacuccaccggcagcaacguguuccagacccgggccggcugccugaucggcgccgaguacgugaacaacagcuacgagugcgacauccccaucggcgcuggcaucugcgccagcuaccagacccagaccaacagcccccggcgggcccggagcguggccagccagagcaucaucgccuacaccaugagccugggcgccgagaacagcguggccuacagcaacaacagcaucgcgauccccaccaacuucaccaucagcgugaccaccgagauauuaccugugagcaugaccaagaccagcguggacuguaccauguacaucugcggcgacagcaccgagugcagcaaccugcugcugcaguacggcagcuucugcacccagcugaaccgggcccugaccggcaucgccguggagcaggacaagaacacccaagagguguucgcccaggugaagcagaucuacaagacuccacccaucaaggacuucggcggcuucaacuucagccagauccugcccgaccccagcaagcccagcaagcggagcuucaucgaggaccugcuguucaacaaggugacccuggccgacgccggcuucaucaagcaguacggcgacugccugggggacaucgccgcucgggaucugaucugcgcccagaaguucaacggccugaccgugcugccuccccugcugaccgacgagaugaucgcccaguacaccagcgcccugcuggccggcaccaucaccagcggcuggaccuucggcgccggcgcagcccuucagauccccuucgccaugcagauggccuaccgguucaacggcaucggcgugacccagaacgugcuguacgagaaccagaagcugaucgccaaccaguucaacagcgccaucggcaagauccaggacagccugagcagcaccgccagcgcccugggcaagcugcaggacguggugaaccagaacgcucaggcccugaacacccuggugaagcagcugagcucaaacuuuggcgccaucagcagcgugcugaaugacauccugagccggcuggacccacccgaggccgaggugcagaucgacaggcugaucaccggccggcugcagagccugcagaccuacgugacccagcagcugauccgggccgccgagauccgggccagcgccaaccuggcagccauuaagaugagcgagugcgugcugggccagagcaagcggguggacuucugcggcaagggcuaccaccugaugagcuucccccagagcgcuccccacggcgugguguuccugcacgugaccuacguccccgcccaggagaagaacuucacaaccgcccccgccaucugccacgacggcaaggcccacuucccccgggagggaguguucgugagcaacggcacccacugguucgugacccagcggaacuucuacgagccccagaucaucaccaccgacaacaccuucgugagcggcaacugcgacguggugaucggcaucgugaacaacaccguguacgacccucuccagcccgagcuggacagcuucaaggaggagcuggacaaguacuucaagaaccacaccagccccgacguggaccugggcgauaucagcggcaucaacgccagcguggugaacauccagaaggagaucgaccggcugaacgagguggccaagaaccugaacgagagccugaucgaccugcaggagcugggcaaguacgagcaguacaucaaguggccaugguacaucuggcugggcuucaucgccggccugaucgccaucgugauggugaccaucaugcugugcugcaugaccagcugcuguagcugccugaagggcugcugcagcugcggcagcugcugcaaguucgacgaggacgacagcgagcccgugcugaagggcgugaagcugcacuacaccugaggacuaguguccaccugucccuccugggcugcuggauugucucguuuuccugccaaauaaacaggaucagcgcuuuacagaucuaaaaaaaaaaaaaaaaaaaaaaaaaaaaaaaaaaaaaaaaaaaaaaaaaaaaaaaaaaaaaaaaaaaaaaaaaaaaaaaaaaaaaaaaaaaaaaaaaaaa

SEQ ID NO: 25348 - RNA, 4105 nt, Artificial Sequence
  SARS-CoV-2/Wuhan/WIV05/2019__EPI_ISL_402128 spike protein mRNA gc (1-1273)(K986P_V987P_K986P_V987P_S13I_W152C_L452R_D614G)
aggagacccgugacccggaaguuguacggcuacgcgacuuucccucccacaaacccucgcgcccuuccuuuccuacuugggcccggcagaaagcuuaccauguucguguuccuggugcugcugccccuggugagcauccagugcgugaaccugaccacccggacccagcugcccccugccuacaccaacagcuucacccggggcguguacuaccccgacaagguguuccggagcagcgugcugcacagcacccaggaccuguuccugcccuucuucagcaacgugaccugguuccacgccauccacgugagcggcaccaacggcaccaagcgguucgacaacccagugcugcccuucaacgacggcguguacuucgccagcaccgagaagucaaacaucauccggggcuggaucuucggcaccacccuggacagcaagacacagagccugcugaucgugaacaacgccaccaacguggugaucaaggugugcgaguuucaguucugcaacgaccccuuccugggcguguacuaccacaagaacaacaagagcugcauggagagcgaguuccgggucuacagcagcgcuaacaauugcaccuucgaguacgugagccagcccuuccugauggaccucgagggcaagcagggcaacuucaagaaccugcgggaguucguguucaagaacaucgauggcuacuucaagaucuacagcaagcacacccccaucaaccuggugcgggaccugccccagggauucagcgcccuggagccucugguggaccugcccaucggcaucaacaucaccagguuccagacccugcuggcccugcaccggagcuaccugacccccggcgacagcagcagcggcuggaccgccggcgccgccgcauacuacgugggcuaccugcagccacggaccuuccugcugaaguacaacgagaacggcaccaucaccgacgccguggacugcgcccuggacccccugagcgagaccaaguguacccuaaagagcuucaccguggagaagggcaucuaccagaccagcaacuuccgggugcagcccacugagagcauugugcgguuccccaacaucaccaaccugugccccuucggcgagguguucaacgccacccgguucgccagcguguacgccuggaaccggaagcggaucagcaacugcguggccgacuacagcgugcuguacaacagcgccagcuucagcaccuucaagugcuacggcgugagcccuaccaagcugaacgaccugugcuucaccaacguguacgcugacagcuucgugauccggggcgacgaggugcggcagaucgcccccggccagaccggcaagaucgccgacuacaacuacaagcugcccgacgacuucaccggcugcgugaucgccuggaacagcaacaaccuggacagcaaggugggcggcaacuacaacuaccgguaccggcuguuccguaagagcaaccugaagccauucgagcgggacaucagcaccgagaucuaccaggccggcagcacccccugcaacgguguggagggcuuuaacugcuacuucccccugcagagcuacggcuuccagcccaccaacggcgugggcuaccagcccuaccgggugguggugcugagcuucgagcugcugcacgcccccgccaccgugugcggcccuaaaaagagcaccaaccuggugaagaacaagugcgugaacuucaauuucaacggccugaccggcaccggcgugcugaccgagagcaacaagaaguuccugcccuuccagcaguucggccgggauaucgccgacaccaccgacgcagugcgggacccccagacccuggagauccuggacaucaccccaugcagcuucggcggcgugagcgucaucacccccggcacaaacaccagcaaccagguggccgugcuguaccagggagugaacugcaccgaggugcccguggccauccacgccgaccagcugacccccaccuggcggguguacagcaccggcagcaacguguuccagacccgggccggcugccugaucggcgccgagcacgugaacaacagcuacgagugcgacauccccaucggcgcuggcaucugugccuccuaccagacccagaccaacagcccccggcgggcccggagcguggccagccagagcaucaucgccuacaccaugagccugggcgccgagaacagcguggccuacagcaacaacagcaucgcgaucccuaccaacuucaccauaagcgugaccaccgagaucuuacccgugagcaugaccaagaccagcguggacugcaccauguacaucugcggcgacagcaccgagugcagcaaccugcugcugcaguacggcagcuucugcacccagcugaaccgggcccugaccggcaucgccguggagcaggacaagaacacccaagagguguucgcccaggugaagcagaucuacaagacucccccaaucaaggacuucggcggcuucaacuucagccagauccugcccgaccccagcaagcccagcaagcggagcuucaucgaggaccugcuguucaacaaggugacccuggccgacgccggcuucaucaagcaguacggcgacugccugggggauaucgccgcucgggaccugaucugcgcccagaaguucaacggccugaccgugcugcccccucugcugaccgacgagaugaucgcccaguacaccagcgcccugcuggccggcaccaucaccagcggcuggaccuucggcgccggcgcagcccuucagauccccuucgccaugcagauggccuacagguucaacggcaucggcgugacccagaacgugcuguacgagaaccagaagcugaucgccaaccaguucaacagcgccaucggcaagauccaggacagccugagcagcaccgccagcgcccugggcaagcugcaggacguggugaaccagaacgcucaggcccugaacacccuggugaagcagcugagcagcaacuucggcgccaucagcagcgugcugaaugacauccugucacggcuggaucccccagaggccgaggugcagaucgaccggcugaucaccggccggcugcagagccugcagaccuacgugacccagcagcugauccgggccgccgagauucgggccagcgccaaccuggcagccaccaagaugagcgagugcgugcugggccagagcaagcggguggacuuuugcggcaagggcuaccaccugaugagcuucccccagagcgcuccccacggcgugguguuccugcacgugacauacguccccgcccaggagaagaacuucaccaccgcccccgccaucugccacgacggcaaggcccacuucccccgggagggaguguucgugagcaacggcacccacugguucgugacccagcggaacuucuacgagccucagaucaucaccaccgacaacaccuucgugagcggcaacugcgacguggugaucggcaucgugaacaacaccguguacgacccccuccagcccgagcuggacagcuucaaggaggagcuggacaaguacuucaagaaccacaccagcccagacguggaccugggcgacaucagcggcaucaacgccagcguggugaacauccagaaggagaucgaccggcugaacgagguggccaagaaccugaacgagagccugaucgaccugcaggagcugggcaaguacgagcaguacaucaaguggcccugguacaucuggcugggcuucaucgccggccugaucgccaucgugauggugaccaucaugcugugcugcaugaccagcuguugcagcugccugaagggcugcugcagcugcggcagcugcugcaaguucgacgaggacgacagcgagcccgugcugaagggcgugaagcugcacuacaccugaggacuaguguccaccugucccuccugggcugcuggauugucucguuuuccugccaaauaaacaggaucagcgcuuuacagaucuaaaaaaaaaaaaaaaaaaaaaaaaaaaaaaaaaaaaaaaaaaaaaaaaaaaaaaaaaaaaaaaaaaaaaaaaaaaaaaaaaaaaaaaaaaaaaaaaaaaa

SEQ ID NO: 25349 - RNA, 4105 nt, Artificial Sequence
  SARS-CoV-2/Wuhan/WIV05/2019__EPI_ISL_402128 spike protein mRNA gc mod (1-1273)(K986P_V987P)
aggagacccgugacccggaaguuguacggcuacgcgacuuucccucccacaaacccucgcgcccuuccuuuccuacuugggcccggcagaaagcuuaccauguucguguuucuggugcugcugccccugguguccagccagugugugaaccugaccaccagaacacagcugccuccagccuacaccaacagcuucaccagaggcguguacuaccccgacaagguguucagauccagcgugcugcacucuacccaggaccuguuccugccuuucuucagcaacgugaccugguuccacgccauccacguguccggcaccaauggcaccaagagauucgacaaccccgugcugcccuucaacgacgggguguacuuugccagcaccgagaaguccaacaucaucagaggcuggaucuucggcaccacacuggacagcaagacccagagccugcugaucgugaacaacgccaccaacguggucaucaaagugugcgaguuccaguucugcaacgaccccuuccugggcgucuacuaccacaagaacaacaagagcuggauggaaagcgaguuccggguguacagcagcgccaacaacugcaccuucgaguacgugucccagccuuuccugauggaccuggaaggcaagcagggcaacuucaagaaccugcgcgaguucguguucaagaacaucgacggcuacuucaaaaucuacagcaagcacaccccuaucaaccucgugcgggaucugccucagggcuucucugcucuggaaccccugguggaucugcccaucggcaucaacaucacccgguuucagacacugcuggcccugcacagaagcuaccugacaccuggcgauagcagcagcggauggacagcuggugccgccgcuuacuaugugggcuaccugcagccuagaaccuuccugcugaaguacaacgagaacggcaccaucaccgacgccguggauugugcucuggauccucugagcgagacaaagugcacccugaaguccuucaccguggaaaagggcaucuaccagaccagcaacuuccgggugcagcccaccgaauccaucgugcgguuccccaauaucaccaaucugugccccuucggcgagguguucaaugccaccagauucgccucuguguacgccuggaaccggaagcggaucagcaauugcguggccgacuacuccgugcuguacaacuccgccagcuucagcaccuucaagugcuacggcguguccccuaccaagcugaacgaccugugcuucacaaacguguacgccgacagcuucgugauccggggagaugaagugcggcagauugccccuggacagacaggcaagaucgccgacuacaacuacaagcugcccgacgacuucaccggcugugugauugccuggaacagcaacaaccuggacuccaaagucggcggcaacuacaauuaccuguaccggcuguuccggaaguccaaucugaagcccuucgagcgggacaucagcaccgaaaucuaucaggccggcagcaccccuugcaacggcguggaaggcuucaacugcuacuucccacugcaguccuacggcuuucagcccacaaauggcgugggcuaucagcccuacagagugguggugcugagcuucgaacugcugcaugcuccugccacagugugcggcccuaagaaaagcaccaaucucgugaagaacaaaugcgugaacuucaacuucaacggccugaccggcaccggcgugcugacagagagcaacaagaaguuccugccauuccagcaguuuggccgggauaucgccgauaccacagacgccguuagagauccccagacacuggaaauccuggacaucaccccaugcagcuucggcggagugucugugaucaccccuggcaccaacaccagcaaucagguggcagugcuguaccaggacgugaacuguaccgaagugcccguggccauucacgccgaucagcugacaccuacauggcggguguacuccaccggcagcaauguguuucagaccagagccggcugucugaucggagccgagcacgugaacaauagcuacgagugcgacauccccaucggcgcuggcaucugugccagcuaccagacacagacaaacagccccagacgggcuagaagcguggccagccagagcaucauugccuacacaaugucucugggcgccgagaacagcguggccuacuccaacaacucuaucgcuauccccaccaacuucaccaucagcgugaccaccgagauccugccuguguccaugaccaagaccagcguggacugcaccauguacaucugcggcgauuccaccgagugcuccaaccugcugcugcaguacggcagcuucugcacccagcugaauagagcccugacagggaucgccguggaacaggacaagaacacccaagagguguucgcccaagugaagcaaaucuacaagaccccuccuaucaaggacuucggcggcuucaauuucagccagauucugcccgauccuagcaagcccagcaagcggagcuucaucgaggaccugcuguucaacaaagugacacuggccgacgccggcuucaucaagcaguauggcgauugucugggcgacauugccgccagggaucugauuugcgcccagaaguuuaacggacugacagugcugccuccucugcugaccgaugagaugaucgcccaguacacaucugcccugcuggccggcacaaucacaagcggcuggacauuuggagcuggcgccgcucugcagauccccuuugcuaugcagauggccuaccgguucaacggcaucggagugacccagaaugugcuguacgagaaccagaagcugaucgccaaccaguucaacagcgccaucggcaagauccaggacagccugagcagcacagcaagcgcccugggaaagcugcaggacguggucaaccagaaugcccaggcacugaacacccuggucaagcagcuguccuccaacuucggcgccaucagcucugugcugaacgauauccugagcagacuggacccuccugaggccgaggugcagaucgacagacugaucacaggcagacugcagagccuccagacauacgugacccagcagcugaucagagccgccgagauuagagccucugccaaucuggccgccaccaagaugucugagugugugcugggccagagcaagagaguggacuuuugcggcaagggcuaccaccugaugagcuucccucagucugccccucacggcgugguguuucugcacgugacauaugugcccgcucaagagaagaauuucaccaccgcuccagccaucugccacgacggcaaagcccacuuuccuagagaaggcguguucguguccaacggcacccauugguucgugacacagcggaacuucuacgagccccagaucaucaccaccgacaacaccuucgugucuggcaacugcgacguugugaucggcauugugaacaauaccguguacgacccucugcagcccgagcuggacagcuucaaagaggaacuggacaaguacuuuaagaaccacacaagccccgacguggaccugggcgauaucagcggaaucaaugccagcgucgugaacauccagaaagagaucgaccggcugaacgagguggccaagaaucugaacgagagccugaucgaccugcaagaacuggggaaguacgagcaguacaucaaguggcccugguacaucuggcugggcuuuaucgccggacugauugccaucgugauggucacaaucaugcuguguugcaugaccagcugcuguagcugccugaagggcuguuguagcuguggcagcugcugcaaguucgacgaggacgauucugagcccgugcugaagggcgugaaacugcacuacaccugaggacuaguguccaccugucccuccugggcugcuggauugucucguuuuccugccaaauaaacaggaucagcgcuuuacagaucuaaaaaaaaaaaaaaaaaaaaaaaaaaaaaaaaaaaaaaaaaaaaaaaaaaaaaaaaaaaaaaaaaaaaaaaaaaaaaaaaaaaaaaaaaaaaaaaaaaaa

SEQ ID NO: 25350 - RNA, 4105 nt, Artificial Sequence
  SARS-CoV-2/Wuhan/WIV05/2019__EPI_ISL_402128 spike protein mRNA gc mod (1-1273)(K986P_V987P_ D614G)
aggagacccgugacccggaaguuguacggcuacgcgacuuucccucccacaaacccucgcgcccuuccuuuccuacuugggcccggcagaaagcuuaccauguucguguuucuggugcugcugccccugguguccagccagugugugaaccugaccaccagaacacagcugccuccagccuacaccaacagcuucaccagaggcguguacuaccccgacaagguguucagauccagcgugcugcacucuacccaggaccuguuccugccuuucuucagcaacgugaccugguuccacgccauccacguguccggcaccaauggcaccaagagauucgacaaccccgugcugcccuucaacgacgggguguacuuugccagcaccgagaaguccaacaucaucagaggcuggaucuucggcaccacacuggacagcaagacccagagccugcugaucgugaacaacgccaccaacguggucaucaaagugugcgaguuccaguucugcaacgaccccuuccugggcgucuacuaccacaagaacaacaagagcuggauggaaagcgaguuccggguguacagcagcgccaacaacugcaccuucgaguacgugucccagccuuuccugauggaccuggaaggcaagcagggcaacuucaagaaccugcgcgaguucguguucaagaacaucgacggcuacuucaaaaucuacagcaagcacaccccuaucaaccucgugcgggaucugccucagggcuucucugcucuggaaccccugguggaucugcccaucggcaucaacaucacccgguuucagacacugcuggcccugcacagaagcuaccugacaccuggcgauagcagcagcggauggacagcuggugccgccgcuuacuaugugggcuaccugcagccuagaaccuuccugcugaaguacaacgagaacggcaccaucaccgacgccguggauugugcucuggauccucugagcgagacaaagugcacccugaaguccuucaccguggaaaagggcaucuaccagaccagcaacuuccgggugcagcccaccgaauccaucgugcgguuccccaauaucaccaaucugugccccuucggcgagguguucaaugccaccagauucgccucuguguacgccuggaaccggaagcggaucagcaauugcguggccgacuacuccgugcuguacaacuccgccagcuucagcaccuucaagugcuacggcguguccccuaccaagcugaacgaccugugcuucacaaacguguacgccgacagcuucgugauccggggagaugaagugcggcagauugccccuggacagacaggcaagaucgccgacuacaacuacaagcugcccgacgacuucaccggcugugugauugccuggaacagcaacaaccuggacuccaaagucggcggcaacuacaauuaccuguaccggcuguuccggaaguccaaucugaagcccuucgagcgggacaucagcaccgaaaucuaucaggccggcagcaccccuugcaacggcguggaaggcuucaacugcuacuucccacugcaguccuacggcuuucagcccacaaauggcgugggcuaucagcccuacagagugguggugcugagcuucgaacugcugcaugcuccugccacagugugcggcccuaagaaaagcaccaaucucgugaagaacaaaugcgugaacuucaacuucaacggccugaccggcaccggcgugcugacagagagcaacaagaaguuccugccauuccagcaguuuggccgggauaucgccgauaccacagacgccguuagagauccccagacacuggaaauccuggacaucaccccaugcagcuucggcggagugucugugaucaccccuggcaccaacaccagcaaucagguggcagugcuguaccagggcgugaacuguaccgaagugcccguggccauucacgccgaucagcugacaccuacauggcggguguacuccaccggcagcaauguguuucagaccagagccggcugucugaucggagccgagcacgugaacaauagcuacgagugcgacauccccaucggcgcuggcaucugugccagcuaccagacacagacaaacagccccagacgggcuagaagcguggccagccagagcaucauugccuacacaaugucucugggcgccgagaacagcguggccuacuccaacaacucuaucgcuauccccaccaacuucaccaucagcgugaccaccgagauccugccuguguccaugaccaagaccagcguggacugcaccauguacaucugcggcgauuccaccgagugcuccaaccugcugcugcaguacggcagcuucugcacccagcugaauagagcccugacagggaucgccguggaacaggacaagaacacccaagagguguucgcccaagugaagcaaaucuacaagaccccuccuaucaaggacuucggcggcuucaauuucagccagauucugcccgauccuagcaagcccagcaagcggagcuucaucgaggaccugcuguucaacaaagugacacuggccgacgccggcuucaucaagcaguauggcgauugucugggcgacauugccgccagggaucugauuugcgcccagaaguuuaacggacugacagugcugccuccucugcugaccgaugagaugaucgcccaguacacaucugcccugcuggccggcacaaucacaagcggcuggacauuuggagcuggcgccgcucugcagauccccuuugcuaugcagauggccuaccgguucaacggcaucggagugacccagaaugugcuguacgagaaccagaagcugaucgccaaccaguucaacagcgccaucggcaagauccaggacagccugagcagcacagcaagcgcccugggaaagcugcaggacguggucaaccagaaugcccaggcacugaacacccuggucaagcagcuguccuccaacuucggcgccaucagcucugugcugaacgauauccugagcagacuggacccuccugaggccgaggugcagaucgacagacugaucacaggcagacugcagagccuccagacauacgugacccagcagcugaucagagccgccgagauuagagccucugccaaucuggccgccaccaagaugucugagugugugcugggccagagcaagagaguggacuuuugcggcaagggcuaccaccugaugagcuucccucagucugccccucacggcgugguguuucugcacgugacauaugugcccgcucaagagaagaauuucaccaccgcuccagccaucugccacgacggcaaagcccacuuuccuagagaaggcguguucguguccaacggcacccauugguucgugacacagcggaacuucuacgagccccagaucaucaccaccgacaacaccuucgugucuggcaacugcgacguugugaucggcauugugaacaauaccguguacgacccucugcagcccgagcuggacagcuucaaagaggaacuggacaaguacuuuaagaaccacacaagccccgacguggaccugggcgauaucagcggaaucaaugccagcgucgugaacauccagaaagagaucgaccggcugaacgagguggccaagaaucugaacgagagccugaucgaccugcaagaacuggggaaguacgagcaguacaucaaguggcccugguacaucuggcugggcuuuaucgccggacugauugccaucgugauggucacaaucaugcuguguugcaugaccagcugcuguagcugccugaagggcuguuguagcuguggcagcugcugcaaguucgacgaggacgauucugagcccgugcugaagggcgugaaacugcacuacaccugaggacuaguguccaccugucccuccugggcugcuggauugucucguuuuccugccaaauaaacaggaucagcgcuuuacagaucuaaaaaaaaaaaaaaaaaaaaaaaaaaaaaaaaaaaaaaaaaaaaaaaaaaaaaaaaaaaaaaaaaaaaaaaaaaaaaaaaaaaaaaaaaaaaaaaaaaaa

SEQ ID NO: 25351 - RNA, 4105 nt, Artificial Sequence
  SARS-CoV-2/Wuhan/WIV05/2019__EPI_ISL_402128 spike protein mRNA gc mod (1-1273)(K986P_V987P_A222V_D614G)
aggagacccgugacccggaaguuguacggcuacgcgacuuucccucccacaaacccucgcgcccuuccuuuccuacuugggcccggcagaaagcuuaccauguucguguuucuggugcugcugccccugguguccagccagugugugaaccugaccaccagaacacagcugccuccagccuacaccaacagcuucaccagaggcguguacuaccccgacaagguguucagauccagcgugcugcacucuacccaggaccuguuccugccuuucuucagcaacgugaccugguuccacgccauccacguguccggcaccaauggcaccaagagauucgacaaccccgugcugcccuucaacgacgggguguacuuugccagcaccgagaaguccaacaucaucagaggcuggaucuucggcaccacacuggacagcaagacccagagccugcugaucgugaacaacgccaccaacguggucaucaaagugugcgaguuccaguucugcaacgaccccuuccugggcgucuacuaccacaagaacaacaagagcuggauggaaagcgaguuccggguguacagcagcgccaacaacugcaccuucgaguacgugucccagccuuuccugauggaccuggaaggcaagcagggcaacuucaagaaccugcgcgaguucguguucaagaacaucgacggcuacuucaaaaucuacagcaagcacaccccuaucaaccucgugcgggaucugccucagggcuucucugugcuggaaccccugguggaucugcccaucggcaucaacaucacccgguuucagacacugcuggcccugcacagaagcuaccugacaccuggcgauagcagcagcggauggacagcuggugccgccgcuuacuaugugggcuaccugcagccuagaaccuuccugcugaaguacaacgagaacggcaccaucaccgacgccguggauugugcucuggauccucugagcgagacaaagugcacccugaaguccuucaccguggaaaagggcaucuaccagaccagcaacuuccgggugcagcccaccgaauccaucgugcgguuccccaauaucaccaaucugugccccuucggcgagguguucaaugccaccagauucgccucuguguacgccuggaaccggaagcggaucagcaauugcguggccgacuacuccgugcuguacaacuccgccagcuucagcaccuucaagugcuacggcguguccccuaccaagcugaacgaccugugcuucacaaacguguacgccgacagcuucgugauccggggagaugaagugcggcagauugccccuggacagacaggcaagaucgccgacuacaacuacaagcugcccgacgacuucaccggcugugugauugccuggaacagcaacaaccuggacuccaaagucggcggcaacuacaauuaccuguaccggcuguuccggaaguccaaucugaagcccuucgagcgggacaucagcaccgaaaucuaucaggccggcagcaccccuugcaacggcguggaaggcuucaacugcuacuucccacugcaguccuacggcuuucagcccacaaauggcgugggcuaucagcccuacagagugguggugcugagcuucgaacugcugcaugcuccugccacagugugcggcccuaagaaaagcaccaaucucgugaagaacaaaugcgugaacuucaacuucaacggccugaccggcaccggcgugcugacagagagcaacaagaaguuccugccauuccagcaguuuggccgggauaucgccgauaccacagacgccguuagagauccccagacacuggaaauccuggacaucaccccaugcagcuucggcggagugucugugaucaccccuggcaccaacaccagcaaucagguggcagugcuguaccagggcgugaacuguaccgaagugcccguggccauucacgccgaucagcugacaccuacauggcggguguacuccaccggcagcaauguguuucagaccagagccggcugucugaucggagccgagcacgugaacaauagcuacgagugcgacauccccaucggcgcuggcaucugugccagcuaccagacacagacaaacagccccagacgggcuagaagcguggccagccagagcaucauugccuacacaaugucucugggcgccgagaacagcguggccuacuccaacaacucuaucgcuauccccaccaacuucaccaucagcgugaccaccgagauccugccuguguccaugaccaagaccagcguggacugcaccauguacaucugcggcgauuccaccgagugcuccaaccugcugcugcaguacggcagcuucugcacccagcugaauagagcccugacagggaucgccguggaacaggacaagaacacccaagagguguucgcccaagugaagcaaaucuacaagaccccuccuaucaaggacuucggcggcuucaauuucagccagauucugcccgauccuagcaagcccagcaagcggagcuucaucgaggaccugcuguucaacaaagugacacuggccgacgccggcuucaucaagcaguauggcgauugucugggcgacauugccgccagggaucugauuugcgcccagaaguuuaacggacugacagugcugccuccucugcugaccgaugagaugaucgcccaguacacaucugcccugcuggccggcacaaucacaagcggcuggacauuuggagcuggcgccgcucugcagauccccuuugcuaugcagauggccuaccgguucaacggcaucggagugacccagaaugugcuguacgagaaccagaagcugaucgccaaccaguucaacagcgccaucggcaagauccaggacagccugagcagcacagcaagcgcccugggaaagcugcaggacguggucaaccagaaugcccaggcacugaacacccuggucaagcagcuguccuccaacuucggcgccaucagcucugugcugaacgauauccugagcagacuggacccuccugaggccgaggugcagaucgacagacugaucacaggcagacugcagagccuccagacauacgugacccagcagcugaucagagccgccgagauuagagccucugccaaucuggccgccaccaagaugucugagugugugcugggccagagcaagagaguggacuuuugcggcaagggcuaccaccugaugagcuucccucagucugccccucacggcgugguguuucugcacgugacauaugugcccgcucaagagaagaauuucaccaccgcuccagccaucugccacgacggcaaagcccacuuuccuagagaaggcguguucguguccaacggcacccauugguucgugacacagcggaacuucuacgagccccagaucaucaccaccgacaacaccuucgugucuggcaacugcgacguugugaucggcauugugaacaauaccguguacgacccucugcagcccgagcuggacagcuucaaagaggaacuggacaaguacuuuaagaaccacacaagccccgacguggaccugggcgauaucagcggaaucaaugccagcgucgugaacauccagaaagagaucgaccggcugaacgagguggccaagaaucugaacgagagccugaucgaccugcaagaacuggggaaguacgagcaguacaucaaguggcccugguacaucuggcugggcuuuaucgccggacugauugccaucgugauggucacaaucaugcuguguugcaugaccagcugcuguagcugccugaagggcuguuguagcuguggcagcugcugcaaguucgacgaggacgauucugagcccgugcugaagggcgugaaacugcacuacaccugaggacuaguguccaccugucccuccugggcugcuggauugucucguuuuccugccaaauaaacaggaucagcgcuuuacagaucuaaaaaaaaaaaaaaaaaaaaaaaaaaaaaaaaaaaaaaaaaaaaaaaaaaaaaaaaaaaaaaaaaaaaaaaaaaaaaaaaaaaaaaaaaaaaaaaaaaaa

SEQ ID NO: 25352 - RNA, 4105 nt, Artificial Sequence
  SARS-CoV-2/Wuhan/WIV05/2019__EPI_ISL_402128 spike protein mRNA gc mod (1-1273)(K986P_V987P_N439K_D614G)
aggagacccgugacccggaaguuguacggcuacgcgacuuucccucccacaaacccucgcgcccuuccuuuccuacuugggcccggcagaaagcuuaccauguucguguuucuggugcugcugccccugguguccagccagugugugaaccugaccaccagaacacagcugccuccagccuacaccaacagcuucaccagaggcguguacuaccccgacaagguguucagauccagcgugcugcacucuacccaggaccuguuccugccuuucuucagcaacgugaccugguuccacgccauccacguguccggcaccaauggcaccaagagauucgacaaccccgugcugcccuucaacgacgggguguacuuugccagcaccgagaaguccaacaucaucagaggcuggaucuucggcaccacacuggacagcaagacccagagccugcugaucgugaacaacgccaccaacguggucaucaaagugugcgaguuccaguucugcaacgaccccuuccugggcgucuacuaccacaagaacaacaagagcuggauggaaagcgaguuccggguguacagcagcgccaacaacugcaccuucgaguacgugucccagccuuuccugauggaccuggaaggcaagcagggcaacuucaagaaccugcgcgaguucguguucaagaacaucgacggcuacuucaaaaucuacagcaagcacaccccuaucaaccucgugcgggaucugccucagggcuucucugcucuggaaccccugguggaucugcccaucggcaucaacaucacccgguuucagacacugcuggcccugcacagaagcuaccugacaccuggcgauagcagcagcggauggacagcuggugccgccgcuuacuaugugggcuaccugcagccuagaaccuuccugcugaaguacaacgagaacggcaccaucaccgacgccguggauugugcucuggauccucugagcgagacaaagugcacccugaaguccuucaccguggaaaagggcaucuaccagaccagcaacuuccgggugcagcccaccgaauccaucgugcgguuccccaauaucaccaaucugugccccuucggcgagguguucaaugccaccagauucgccucuguguacgccuggaaccggaagcggaucagcaauugcguggccgacuacuccgugcuguacaacuccgccagcuucagcaccuucaagugcuacggcguguccccuaccaagcugaacgaccugugcuucacaaacguguacgccgacagcuucgugauccggggagaugaagugcggcagauugccccuggacagacaggcaagaucgccgacuacaacuacaagcugcccgacgacuucaccggcugugugauugccuggaacagcaagaaccuggacuccaaagucggcggcaacuacaauuaccuguaccggcuguuccggaaguccaaucugaagcccuucgagcgggacaucagcaccgaaaucuaucaggccggcagcaccccuugcaacggcguggaaggcuucaacugcuacuucccacugcaguccuacggcuuucagcccacaaauggcgugggcuaucagcccuacagagugguggugcugagcuucgaacugcugcaugcuccugccacagugugcggcccuaagaaaagcaccaaucucgugaagaacaaaugcgugaacuucaacuucaacggccugaccggcaccggcgugcugacagagagcaacaagaaguuccugccauuccagcaguuuggccgggauaucgccgauaccacagacgccguuagagauccccagacacuggaaauccuggacaucaccccaugcagcuucggcggagugucugugaucaccccuggcaccaacaccagcaaucagguggcagugcuguaccagggcgugaacuguaccgaagugcccguggccauucacgccgaucagcugacaccuacauggcggguguacuccaccggcagcaauguguuucagaccagagccggcugucugaucggagccgagcacgugaacaauagcuacgagugcgacauccccaucggcgcuggcaucugugccagcuaccagacacagacaaacagccccagacgggcuagaagcguggccagccagagcaucauugccuacacaaugucucugggcgccgagaacagcguggccuacuccaacaacucuaucgcuauccccaccaacuucaccaucagcgugaccaccgagauccugccuguguccaugaccaagaccagcguggacugcaccauguacaucugcggcgauuccaccgagugcuccaaccugcugcugcaguacggcagcuucugcacccagcugaauagagcccugacagggaucgccguggaacaggacaagaacacccaagagguguucgcccaagugaagcaaaucuacaagaccccuccuaucaaggacuucggcggcuucaauuucagccagauucugcccgauccuagcaagcccagcaagcggagcuucaucgaggaccugcuguucaacaaagugacacuggccgacgccggcuucaucaagcaguauggcgauugucugggcgacauugccgccagggaucugauuugcgcccagaaguuuaacggacugacagugcugccuccucugcugaccgaugagaugaucgcccaguacacaucugcccugcuggccggcacaaucacaagcggcuggacauuuggagcuggcgccgcucugcagauccccuuugcuaugcagauggccuaccgguucaacggcaucggagugacccagaaugugcuguacgagaaccagaagcugaucgccaaccaguucaacagcgccaucggcaagauccaggacagccugagcagcacagcaagcgcccugggaaagcugcaggacguggucaaccagaaugcccaggcacugaacacccuggucaagcagcuguccuccaacuucggcgccaucagcucugugcugaacgauauccugagcagacuggacccuccugaggccgaggugcagaucgacagacugaucacaggcagacugcagagccuccagacauacgugacccagcagcugaucagagccgccgagauuagagccucugccaaucuggccgccaccaagaugucugagugugugcugggccagagcaagagaguggacuuuugcggcaagggcuaccaccugaugagcuucccucagucugccccucacggcgugguguuucugcacgugacauaugugcccgcucaagagaagaauuucaccaccgcuccagccaucugccacgacggcaaagcccacuuuccuagagaaggcguguucguguccaacggcacccauugguucgugacacagcggaacuucuacgagccccagaucaucaccaccgacaacaccuucgugucuggcaacugcgacguugugaucggcauugugaacaauaccguguacgacccucugcagcccgagcuggacagcuucaaagaggaacuggacaaguacuuuaagaaccacacaagccccgacguggaccugggcgauaucagcggaaucaaugccagcgucgugaacauccagaaagagaucgaccggcugaacgagguggccaagaaucugaacgagagccugaucgaccugcaagaacuggggaaguacgagcaguacaucaaguggcccugguacaucuggcugggcuuuaucgccggacugauugccaucgugauggucacaaucaugcuguguugcaugaccagcugcuguagcugccugaagggcuguuguagcuguggcagcugcugcaaguucgacgaggacgauucugagcccgugcugaagggcgugaaacugcacuacaccugaggacuaguguccaccugucccuccugggcugcuggauugucucguuuuccugccaaauaaacaggaucagcgcuuuacagaucuaaaaaaaaaaaaaaaaaaaaaaaaaaaaaaaaaaaaaaaaaaaaaaaaaaaaaaaaaaaaaaaaaaaaaaaaaaaaaaaaaaaaaaaaaaaaaaaaaaaa

SEQ ID NO: 25353 - RNA, 4105 nt, Artificial Sequence
  SARS-CoV-2/Wuhan/WIV05/2019__EPI_ISL_402128 spike protein mRNA gc mod (1-1273)(K986P_V987P_S477N_D614G)
aggagacccgugacccggaaguuguacggcuacgcgacuuucccucccacaaacccucgcgcccuuccuuuccuacuugggcccggcagaaagcuuaccauguucguguuucuggugcugcugccccugguguccagccagugugugaaccugaccaccagaacacagcugccuccagccuacaccaacagcuucaccagaggcguguacuaccccgacaagguguucagauccagcgugcugcacucuacccaggaccuguuccugccuuucuucagcaacgugaccugguuccacgccauccacguguccggcaccaauggcaccaagagauucgacaaccccgugcugcccuucaacgacgggguguacuuugccagcaccgagaaguccaacaucaucagaggcuggaucuucggcaccacacuggacagcaagacccagagccugcugaucgugaacaacgccaccaacguggucaucaaagugugcgaguuccaguucugcaacgaccccuuccugggcgucuacuaccacaagaacaacaagagcuggauggaaagcgaguuccggguguacagcagcgccaacaacugcaccuucgaguacgugucccagccuuuccugauggaccuggaaggcaagcagggcaacuucaagaaccugcgcgaguucguguucaagaacaucgacggcuacuucaaaaucuacagcaagcacaccccuaucaaccucgugcgggaucugccucagggcuucucugcucuggaaccccugguggaucugcccaucggcaucaacaucacccgguuucagacacugcuggcccugcacagaagcuaccugacaccuggcgauagcagcagcggauggacagcuggugccgccgcuuacuaugugggcuaccugcagccuagaaccuuccugcugaaguacaacgagaacggcaccaucaccgacgccguggauugugcucuggauccucugagcgagacaaagugcacccugaaguccuucaccguggaaaagggcaucuaccagaccagcaacuuccgggugcagcccaccgaauccaucgugcgguuccccaauaucaccaaucugugccccuucggcgagguguucaaugccaccagauucgccucuguguacgccuggaaccggaagcggaucagcaauugcguggccgacuacuccgugcuguacaacuccgccagcuucagcaccuucaagugcuacggcguguccccuaccaagcugaacgaccugugcuucacaaacguguacgccgacagcuucgugauccggggagaugaagugcggcagauugccccuggacagacaggcaagaucgccgacuacaacuacaagcugcccgacgacuucaccggcugugugauugccuggaacagcaacaaccuggacuccaaagucggcggcaacuacaauuaccuguaccggcuguuccggaaguccaaucugaagcccuucgagcgggacaucagcaccgaaaucuaucaggccggcaacaccccuugcaacggcguggaaggcuucaacugcuacuucccacugcaguccuacggcuuucagcccacaaauggcgugggcuaucagcccuacagagugguggugcugagcuucgaacugcugcaugcuccugccacagugugcggcccuaagaaaagcaccaaucucgugaagaacaaaugcgugaacuucaacuucaacggccugaccggcaccggcgugcugacagagagcaacaagaaguuccugccauuccagcaguuuggccgggauaucgccgauaccacagacgccguuagagauccccagacacuggaaauccuggacaucaccccaugcagcuucggcggagugucugugaucaccccuggcaccaacaccagcaaucagguggcagugcuguaccagggcgugaacuguaccgaagugcccguggccauucacgccgaucagcugacaccuacauggcggguguacuccaccggcagcaauguguuucagaccagagccggcugucugaucggagccgagcacgugaacaauagcuacgagugcgacauccccaucggcgcuggcaucugugccagcuaccagacacagacaaacagccccagacgggcuagaagcguggccagccagagcaucauugccuacacaaugucucugggcgccgagaacagcguggccuacuccaacaacucuaucgcuauccccaccaacuucaccaucagcgugaccaccgagauccugccuguguccaugaccaagaccagcguggacugcaccauguacaucugcggcgauuccaccgagugcuccaaccugcugcugcaguacggcagcuucugcacccagcugaauagagcccugacagggaucgccguggaacaggacaagaacacccaagagguguucgcccaagugaagcaaaucuacaagaccccuccuaucaaggacuucggcggcuucaauuucagccagauucugcccgauccuagcaagcccagcaagcggagcuucaucgaggaccugcuguucaacaaagugacacuggccgacgccggcuucaucaagcaguauggcgauugucugggcgacauugccgccagggaucugauuugcgcccagaaguuuaacggacugacagugcugccuccucugcugaccgaugagaugaucgcccaguacacaucugcccugcuggccggcacaaucacaagcggcuggacauuuggagcuggcgccgcucugcagauccccuuugcuaugcagauggccuaccgguucaacggcaucggagugacccagaaugugcuguacgagaaccagaagcugaucgccaaccaguucaacagcgccaucggcaagauccaggacagccugagcagcacagcaagcgcccugggaaagcugcaggacguggucaaccagaaugcccaggcacugaacacccuggucaagcagcuguccuccaacuucggcgccaucagcucugugcugaacgauauccugagcagacuggacccuccugaggccgaggugcagaucgacagacugaucacaggcagacugcagagccuccagacauacgugacccagcagcugaucagagccgccgagauuagagccucugccaaucuggccgccaccaagaugucugagugugugcugggccagagcaagagaguggacuuuugcggcaagggcuaccaccugaugagcuucccucagucugccccucacggcgugguguuucugcacgugacauaugugcccgcucaagagaagaauuucaccaccgcuccagccaucugccacgacggcaaagcccacuuuccuagagaaggcguguucguguccaacggcacccauugguucgugacacagcggaacuucuacgagccccagaucaucaccaccgacaacaccuucgugucuggcaacugcgacguugugaucggcauugugaacaauaccguguacgacccucugcagcccgagcuggacagcuucaaagaggaacuggacaaguacuuuaagaaccacacaagccccgacguggaccugggcgauaucagcggaaucaaugccagcgucgugaacauccagaaagagaucgaccggcugaacgagguggccaagaaucugaacgagagccugaucgaccugcaagaacuggggaaguacgagcaguacaucaaguggcccugguacaucuggcugggcuuuaucgccggacugauugccaucgugauggucacaaucaugcuguguugcaugaccagcugcuguagcugccugaagggcuguuguagcuguggcagcugcugcaaguucgacgaggacgauucugagcccgugcugaagggcgugaaacugcacuacaccugaggacuaguguccaccugucccuccugggcugcuggauugucucguuuuccugccaaauaaacaggaucagcgcuuuacagaucuaaaaaaaaaaaaaaaaaaaaaaaaaaaaaaaaaaaaaaaaaaaaaaaaaaaaaaaaaaaaaaaaaaaaaaaaaaaaaaaaaaaaaaaaaaaaaaaaaaaa

SEQ ID NO: 25354 - RNA, 4105 nt, Artificial Sequence
  SARS-CoV-2/Wuhan/WIV05/2019__EPI_ISL_402128 spike protein mRNA gc mod (1-1273)(K986P_V987P_N501Y_D614G)
aggagacccgugacccggaaguuguacggcuacgcgacuuucccucccacaaacccucgcgcccuuccuuuccuacuugggcccggcagaaagcuuaccauguucguguuucuggugcugcugccccugguguccagccagugugugaaccugaccaccagaacacagcugccuccagccuacaccaacagcuucaccagaggcguguacuaccccgacaagguguucagauccagcgugcugcacucuacccaggaccuguuccugccuuucuucagcaacgugaccugguuccacgccauccacguguccggcaccaauggcaccaagagauucgacaaccccgugcugcccuucaacgacgggguguacuuugccagcaccgagaaguccaacaucaucagaggcuggaucuucggcaccacacuggacagcaagacccagagccugcugaucgugaacaacgccaccaacguggucaucaaagugugcgaguuccaguucugcaacgaccccuuccugggcgucuacuaccacaagaacaacaagagcuggauggaaagcgaguuccggguguacagcagcgccaacaacugcaccuucgaguacgugucccagccuuuccugauggaccuggaaggcaagcagggcaacuucaagaaccugcgcgaguucguguucaagaacaucgacggcuacuucaaaaucuacagcaagcacaccccuaucaaccucgugcgggaucugccucagggcuucucugcucuggaaccccugguggaucugcccaucggcaucaacaucacccgguuucagacacugcuggcccugcacagaagcuaccugacaccuggcgauagcagcagcggauggacagcuggugccgccgcuuacuaugugggcuaccugcagccuagaaccuuccugcugaaguacaacgagaacggcaccaucaccgacgccguggauugugcucuggauccucugagcgagacaaagugcacccugaaguccuucaccguggaaaagggcaucuaccagaccagcaacuuccgggugcagcccaccgaauccaucgugcgguuccccaauaucaccaaucugugccccuucggcgagguguucaaugccaccagauucgccucuguguacgccuggaaccggaagcggaucagcaauugcguggccgacuacuccgugcuguacaacuccgccagcuucagcaccuucaagugcuacggcguguccccuaccaagcugaacgaccugugcuucacaaacguguacgccgacagcuucgugauccggggagaugaagugcggcagauugccccuggacagacaggcaagaucgccgacuacaacuacaagcugcccgacgacuucaccggcugugugauugccuggaacagcaacaaccuggacuccaaagucggcggcaacuacaauuaccuguaccggcuguuccggaaguccaaucugaagcccuucgagcgggacaucagcaccgaaaucuaucaggccggcagcaccccuugcaacggcguggaaggcuucaacugcuacuucccacugcaguccuacggcuuucagcccacauacggcgugggcuaucagcccuacagagugguggugcugagcuucgaacugcugcaugcuccugccacagugugcggcccuaagaaaagcaccaaucucgugaagaacaaaugcgugaacuucaacuucaacggccugaccggcaccggcgugcugacagagagcaacaagaaguuccugccauuccagcaguuuggccgggauaucgccgauaccacagacgccguuagagauccccagacacuggaaauccuggacaucaccccaugcagcuucggcggagugucugugaucaccccuggcaccaacaccagcaaucagguggcagugcuguaccagggcgugaacuguaccgaagugcccguggccauucacgccgaucagcugacaccuacauggcggguguacuccaccggcagcaauguguuucagaccagagccggcugucugaucggagccgagcacgugaacaauagcuacgagugcgacauccccaucggcgcuggcaucugugccagcuaccagacacagacaaacagccccagacgggcuagaagcguggccagccagagcaucauugccuacacaaugucucugggcgccgagaacagcguggccuacuccaacaacucuaucgcuauccccaccaacuucaccaucagcgugaccaccgagauccugccuguguccaugaccaagaccagcguggacugcaccauguacaucugcggcgauuccaccgagugcuccaaccugcugcugcaguacggcagcuucugcacccagcugaauagagcccugacagggaucgccguggaacaggacaagaacacccaagagguguucgcccaagugaagcaaaucuacaagaccccuccuaucaaggacuucggcggcuucaauuucagccagauucugcccgauccuagcaagcccagcaagcggagcuucaucgaggaccugcuguucaacaaagugacacuggccgacgccggcuucaucaagcaguauggcgauugucugggcgacauugccgccagggaucugauuugcgcccagaaguuuaacggacugacagugcugccuccucugcugaccgaugagaugaucgcccaguacacaucugcccugcuggccggcacaaucacaagcggcuggacauuuggagcuggcgccgcucugcagauccccuuugcuaugcagauggccuaccgguucaacggcaucggagugacccagaaugugcuguacgagaaccagaagcugaucgccaaccaguucaacagcgccaucggcaagauccaggacagccugagcagcacagcaagcgcccugggaaagcugcaggacguggucaaccagaaugcccaggcacugaacacccuggucaagcagcuguccuccaacuucggcgccaucagcucugugcugaacgauauccugagcagacuggacccuccugaggccgaggugcagaucgacagacugaucacaggcagacugcagagccuccagacauacgugacccagcagcugaucagagccgccgagauuagagccucugccaaucuggccgccaccaagaugucugagugugugcugggccagagcaagagaguggacuuuugcggcaagggcuaccaccugaugagcuucccucagucugccccucacggcgugguguuucugcacgugacauaugugcccgcucaagagaagaauuucaccaccgcuccagccaucugccacgacggcaaagcccacuuuccuagagaaggcguguucguguccaacggcacccauugguucgugacacagcggaacuucuacgagccccagaucaucaccaccgacaacaccuucgugucuggcaacugcgacguugugaucggcauugugaacaauaccguguacgacccucugcagcccgagcuggacagcuucaaagaggaacuggacaaguacuuuaagaaccacacaagccccgacguggaccugggcgauaucagcggaaucaaugccagcgucgugaacauccagaaagagaucgaccggcugaacgagguggccaagaaucugaacgagagccugaucgaccugcaagaacuggggaaguacgagcaguacaucaaguggcccugguacaucuggcugggcuuuaucgccggacugauugccaucgugauggucacaaucaugcuguguugcaugaccagcugcuguagcugccugaagggcuguuguagcuguggcagcugcugcaaguucgacgaggacgauucugagcccgugcugaagggcgugaaacugcacuacaccugaggacuaguguccaccugucccuccugggcugcuggauugucucguuuuccugccaaauaaacaggaucagcgcuuuacagaucuaaaaaaaaaaaaaaaaaaaaaaaaaaaaaaaaaaaaaaaaaaaaaaaaaaaaaaaaaaaaaaaaaaaaaaaaaaaaaaaaaaaaaaaaaaaaaaaaaaaa

SEQ ID NO: 25355 - RNA, 4099 nt, Artificial Sequence
  SARS-CoV-2/Wuhan/WIV05/2019__EPI_ISL_402128 spike protein mRNA gc mod (1-1273)(K986P_V987P_H69del_V70del_D614G)
aggagacccgugacccggaaguuguacggcuacgcgacuuucccucccacaaacccucgcgcccuuccuuuccuacuugggcccggcagaaagcuuaccauguucguguuucuggugcugcugccccugguguccagccagugugugaaccugaccaccagaacacagcugccuccagccuacaccaacagcuucaccagaggcguguacuaccccgacaagguguucagauccagcgugcugcacucuacccaggaccuguuccugccuuucuucagcaacgugaccugguuccacgccaucuccggcaccaauggcaccaagagauucgacaaccccgugcugcccuucaacgacgggguguacuuugccagcaccgagaaguccaacaucaucagaggcuggaucuucggcaccacacuggacagcaagacccagagccugcugaucgugaacaacgccaccaacguggucaucaaagugugcgaguuccaguucugcaacgaccccuuccugggcgucuacuaccacaagaacaacaagagcuggauggaaagcgaguuccggguguacagcagcgccaacaacugcaccuucgaguacgugucccagccuuuccugauggaccuggaaggcaagcagggcaacuucaagaaccugcgcgaguucguguucaagaacaucgacggcuacuucaaaaucuacagcaagcacaccccuaucaaccucgugcgggaucugccucagggcuucucugcucuggaaccccugguggaucugcccaucggcaucaacaucacccgguuucagacacugcuggcccugcacagaagcuaccugacaccuggcgauagcagcagcggauggacagcuggugccgccgcuuacuaugugggcuaccugcagccuagaaccuuccugcugaaguacaacgagaacggcaccaucaccgacgccguggauugugcucuggauccucugagcgagacaaagugcacccugaaguccuucaccguggaaaagggcaucuaccagaccagcaacuuccgggugcagcccaccgaauccaucgugcgguuccccaauaucaccaaucugugccccuucggcgagguguucaaugccaccagauucgccucuguguacgccuggaaccggaagcggaucagcaauugcguggccgacuacuccgugcuguacaacuccgccagcuucagcaccuucaagugcuacggcguguccccuaccaagcugaacgaccugugcuucacaaacguguacgccgacagcuucgugauccggggagaugaagugcggcagauugccccuggacagacaggcaagaucgccgacuacaacuacaagcugcccgacgacuucaccggcugugugauugccuggaacagcaacaaccuggacuccaaagucggcggcaacuacaauuaccuguaccggcuguuccggaaguccaaucugaagcccuucgagcgggacaucagcaccgaaaucuaucaggccggcagcaccccuugcaacggcguggaaggcuucaacugcuacuucccacugcaguccuacggcuuucagcccacaaauggcgugggcuaucagcccuacagagugguggugcugagcuucgaacugcugcaugcuccugccacagugugcggcccuaagaaaagcaccaaucucgugaagaacaaaugcgugaacuucaacuucaacggccugaccggcaccggcgugcugacagagagcaacaagaaguuccugccauuccagcaguuuggccgggauaucgccgauaccacagacgccguuagagauccccagacacuggaaauccuggacaucaccccaugcagcuucggcggagugucugugaucaccccuggcaccaacaccagcaaucagguggcagugcuguaccagggcgugaacuguaccgaagugcccguggccauucacgccgaucagcugacaccuacauggcggguguacuccaccggcagcaauguguuucagaccagagccggcugucugaucggagccgagcacgugaacaauagcuacgagugcgacauccccaucggcgcuggcaucugugccagcuaccagacacagacaaacagccccagacgggcuagaagcguggccagccagagcaucauugccuacacaaugucucugggcgccgagaacagcguggccuacuccaacaacucuaucgcuauccccaccaacuucaccaucagcgugaccaccgagauccugccuguguccaugaccaagaccagcguggacugcaccauguacaucugcggcgauuccaccgagugcuccaaccugcugcugcaguacggcagcuucugcacccagcugaauagagcccugacagggaucgccguggaacaggacaagaacacccaagagguguucgcccaagugaagcaaaucuacaagaccccuccuaucaaggacuucggcggcuucaauuucagccagauucugcccgauccuagcaagcccagcaagcggagcuucaucgaggaccugcuguucaacaaagugacacuggccgacgccggcuucaucaagcaguauggcgauugucugggcgacauugccgccagggaucugauuugcgcccagaaguuuaacggacugacagugcugccuccucugcugaccgaugagaugaucgcccaguacacaucugcccugcuggccggcacaaucacaagcggcuggacauuuggagcuggcgccgcucugcagauccccuuugcuaugcagauggccuaccgguucaacggcaucggagugacccagaaugugcuguacgagaaccagaagcugaucgccaaccaguucaacagcgccaucggcaagauccaggacagccugagcagcacagcaagcgcccugggaaagcugcaggacguggucaaccagaaugcccaggcacugaacacccuggucaagcagcuguccuccaacuucggcgccaucagcucugugcugaacgauauccugagcagacuggacccuccugaggccgaggugcagaucgacagacugaucacaggcagacugcagagccuccagacauacgugacccagcagcugaucagagccgccgagauuagagccucugccaaucuggccgccaccaagaugucugagugugugcugggccagagcaagagaguggacuuuugcggcaagggcuaccaccugaugagcuucccucagucugccccucacggcgugguguuucugcacgugacauaugugcccgcucaagagaagaauuucaccaccgcuccagccaucugccacgacggcaaagcccacuuuccuagagaaggcguguucguguccaacggcacccauugguucgugacacagcggaacuucuacgagccccagaucaucaccaccgacaacaccuucgugucuggcaacugcgacguugugaucggcauugugaacaauaccguguacgacccucugcagcccgagcuggacagcuucaaagaggaacuggacaaguacuuuaagaaccacacaagccccgacguggaccugggcgauaucagcggaaucaaugccagcgucgugaacauccagaaagagaucgaccggcugaacgagguggccaagaaucugaacgagagccugaucgaccugcaagaacuggggaaguacgagcaguacaucaaguggcccugguacaucuggcugggcuuuaucgccggacugauugccaucgugauggucacaaucaugcuguguugcaugaccagcugcuguagcugccugaagggcuguuguagcuguggcagcugcugcaaguucgacgaggacgauucugagcccgugcugaagggcgugaaacugcacuacaccugaggacuaguguccaccugucccuccugggcugcuggauugucucguuuuccugccaaauaaacaggaucagcgcuuuacagaucuaaaaaaaaaaaaaaaaaaaaaaaaaaaaaaaaaaaaaaaaaaaaaaaaaaaaaaaaaaaaaaaaaaaaaaaaaaaaaaaaaaaaaaaaaaaaaaaaaaaa

SEQ ID NO: 25356 - RNA, 4105 nt, Artificial Sequence
  SARS-CoV-2/Wuhan/WIV05/2019__EPI_ISL_402128 spike protein mRNA gc mod (1-1273)(K986P_V987P_Y453F_D614G)
aggagacccgugacccggaaguuguacggcuacgcgacuuucccucccacaaacccucgcgcccuuccuuuccuacuugggcccggcagaaagcuuaccauguucguguuucuggugcugcugccccugguguccagccagugugugaaccugaccaccagaacacagcugccuccagccuacaccaacagcuucaccagaggcguguacuaccccgacaagguguucagauccagcgugcugcacucuacccaggaccuguuccugccuuucuucagcaacgugaccugguuccacgccauccacguguccggcaccaauggcaccaagagauucgacaaccccgugcugcccuucaacgacgggguguacuuugccagcaccgagaaguccaacaucaucagaggcuggaucuucggcaccacacuggacagcaagacccagagccugcugaucgugaacaacgccaccaacguggucaucaaagugugcgaguuccaguucugcaacgaccccuuccugggcgucuacuaccacaagaacaacaagagcuggauggaaagcgaguuccggguguacagcagcgccaacaacugcaccuucgaguacgugucccagccuuuccugauggaccuggaaggcaagcagggcaacuucaagaaccugcgcgaguucguguucaagaacaucgacggcuacuucaaaaucuacagcaagcacaccccuaucaaccucgugcgggaucugccucagggcuucucugcucuggaaccccugguggaucugcccaucggcaucaacaucacccgguuucagacacugcuggcccugcacagaagcuaccugacaccuggcgauagcagcagcggauggacagcuggugccgccgcuuacuaugugggcuaccugcagccuagaaccuuccugcugaaguacaacgagaacggcaccaucaccgacgccguggauugugcucuggauccucugagcgagacaaagugcacccugaaguccuucaccguggaaaagggcaucuaccagaccagcaacuuccgggugcagcccaccgaauccaucgugcgguuccccaauaucaccaaucugugccccuucggcgagguguucaaugccaccagauucgccucuguguacgccuggaaccggaagcggaucagcaauugcguggccgacuacuccgugcuguacaacuccgccagcuucagcaccuucaagugcuacggcguguccccuaccaagcugaacgaccugugcuucacaaacguguacgccgacagcuucgugauccggggagaugaagugcggcagauugccccuggacagacaggcaagaucgccgacuacaacuacaagcugcccgacgacuucaccggcugugugauugccuggaacagcaacaaccuggacuccaaagucggcggcaacuacaauuaccuguuccggcuguuccggaaguccaaucugaagcccuucgagcgggacaucagcaccgaaaucuaucaggccggcagcaccccuugcaacggcguggaaggcuucaacugcuacuucccacugcaguccuacggcuuucagcccacaaauggcgugggcuaucagcccuacagagugguggugcugagcuucgaacugcugcaugcuccugccacagugugcggcccuaagaaaagcaccaaucucgugaagaacaaaugcgugaacuucaacuucaacggccugaccggcaccggcgugcugacagagagcaacaagaaguuccugccauuccagcaguuuggccgggauaucgccgauaccacagacgccguuagagauccccagacacuggaaauccuggacaucaccccaugcagcuucggcggagugucugugaucaccccuggcaccaacaccagcaaucagguggcagugcuguaccagggcgugaacuguaccgaagugcccguggccauucacgccgaucagcugacaccuacauggcggguguacuccaccggcagcaauguguuucagaccagagccggcugucugaucggagccgagcacgugaacaauagcuacgagugcgacauccccaucggcgcuggcaucugugccagcuaccagacacagacaaacagccccagacgggcuagaagcguggccagccagagcaucauugccuacacaaugucucugggcgccgagaacagcguggccuacuccaacaacucuaucgcuauccccaccaacuucaccaucagcgugaccaccgagauccugccuguguccaugaccaagaccagcguggacugcaccauguacaucugcggcgauuccaccgagugcuccaaccugcugcugcaguacggcagcuucugcacccagcugaauagagcccugacagggaucgccguggaacaggacaagaacacccaagagguguucgcccaagugaagcaaaucuacaagaccccuccuaucaaggacuucggcggcuucaauuucagccagauucugcccgauccuagcaagcccagcaagcggagcuucaucgaggaccugcuguucaacaaagugacacuggccgacgccggcuucaucaagcaguauggcgauugucugggcgacauugccgccagggaucugauuugcgcccagaaguuuaacggacugacagugcugccuccucugcugaccgaugagaugaucgcccaguacacaucugcccugcuggccggcacaaucacaagcggcuggacauuuggagcuggcgccgcucugcagauccccuuugcuaugcagauggccuaccgguucaacggcaucggagugacccagaaugugcuguacgagaaccagaagcugaucgccaaccaguucaacagcgccaucggcaagauccaggacagccugagcagcacagcaagcgcccugggaaagcugcaggacguggucaaccagaaugcccaggcacugaacacccuggucaagcagcuguccuccaacuucggcgccaucagcucugugcugaacgauauccugagcagacuggacccuccugaggccgaggugcagaucgacagacugaucacaggcagacugcagagccuccagacauacgugacccagcagcugaucagagccgccgagauuagagccucugccaaucuggccgccaccaagaugucugagugugugcugggccagagcaagagaguggacuuuugcggcaagggcuaccaccugaugagcuucccucagucugccccucacggcgugguguuucugcacgugacauaugugcccgcucaagagaagaauuucaccaccgcuccagccaucugccacgacggcaaagcccacuuuccuagagaaggcguguucguguccaacggcacccauugguucgugacacagcggaacuucuacgagccccagaucaucaccaccgacaacaccuucgugucuggcaacugcgacguugugaucggcauugugaacaauaccguguacgacccucugcagcccgagcuggacagcuucaaagaggaacuggacaaguacuuuaagaaccacacaagccccgacguggaccugggcgauaucagcggaaucaaugccagcgucgugaacauccagaaagagaucgaccggcugaacgagguggccaagaaucugaacgagagccugaucgaccugcaagaacuggggaaguacgagcaguacaucaaguggcccugguacaucuggcugggcuuuaucgccggacugauugccaucgugauggucacaaucaugcuguguugcaugaccagcugcuguagcugccugaagggcuguuguagcuguggcagcugcugcaaguucgacgaggacgauucugagcccgugcugaagggcgugaaacugcacuacaccugaggacuaguguccaccugucccuccugggcugcuggauugucucguuuuccugccaaauaaacaggaucagcgcuuuacagaucuaaaaaaaaaaaaaaaaaaaaaaaaaaaaaaaaaaaaaaaaaaaaaaaaaaaaaaaaaaaaaaaaaaaaaaaaaaaaaaaaaaaaaaaaaaaaaaaaaaaa

SEQ ID NO: 25357 - RNA, 4105 nt, Artificial Sequence
  SARS-CoV-2/Wuhan/WIV05/2019__EPI_ISL_402128 spike protein mRNA gc mod (1-1273)(K986P_V987P_D614G_I692V)
aggagacccgugacccggaaguuguacggcuacgcgacuuucccucccacaaacccucgcgcccuuccuuuccuacuugggcccggcagaaagcuuaccauguucguguuucuggugcugcugccccugguguccagccagugugugaaccugaccaccagaacacagcugccuccagccuacaccaacagcuucaccagaggcguguacuaccccgacaagguguucagauccagcgugcugcacucuacccaggaccuguuccugccuuucuucagcaacgugaccugguuccacgccauccacguguccggcaccaauggcaccaagagauucgacaaccccgugcugcccuucaacgacgggguguacuuugccagcaccgagaaguccaacaucaucagaggcuggaucuucggcaccacacuggacagcaagacccagagccugcugaucgugaacaacgccaccaacguggucaucaaagugugcgaguuccaguucugcaacgaccccuuccugggcgucuacuaccacaagaacaacaagagcuggauggaaagcgaguuccggguguacagcagcgccaacaacugcaccuucgaguacgugucccagccuuuccugauggaccuggaaggcaagcagggcaacuucaagaaccugcgcgaguucguguucaagaacaucgacggcuacuucaaaaucuacagcaagcacaccccuaucaaccucgugcgggaucugccucagggcuucucugcucuggaaccccugguggaucugcccaucggcaucaacaucacccgguuucagacacugcuggcccugcacagaagcuaccugacaccuggcgauagcagcagcggauggacagcuggugccgccgcuuacuaugugggcuaccugcagccuagaaccuuccugcugaaguacaacgagaacggcaccaucaccgacgccguggauugugcucuggauccucugagcgagacaaagugcacccugaaguccuucaccguggaaaagggcaucuaccagaccagcaacuuccgggugcagcccaccgaauccaucgugcgguuccccaauaucaccaaucugugccccuucggcgagguguucaaugccaccagauucgccucuguguacgccuggaaccggaagcggaucagcaauugcguggccgacuacuccgugcuguacaacuccgccagcuucagcaccuucaagugcuacggcguguccccuaccaagcugaacgaccugugcuucacaaacguguacgccgacagcuucgugauccggggagaugaagugcggcagauugccccuggacagacaggcaagaucgccgacuacaacuacaagcugcccgacgacuucaccggcugugugauugccuggaacagcaacaaccuggacuccaaagucggcggcaacuacaauuaccuguaccggcuguuccggaaguccaaucugaagcccuucgagcgggacaucagcaccgaaaucuaucaggccggcagcaccccuugcaacggcguggaaggcuucaacugcuacuucccacugcaguccuacggcuuucagcccacaaauggcgugggcuaucagcccuacagagugguggugcugagcuucgaacugcugcaugcuccugccacagugugcggcccuaagaaaagcaccaaucucgugaagaacaaaugcgugaacuucaacuucaacggccugaccggcaccggcgugcugacagagagcaacaagaaguuccugccauuccagcaguuuggccgggauaucgccgauaccacagacgccguuagagauccccagacacuggaaauccuggacaucaccccaugcagcuucggcggagugucugugaucaccccuggcaccaacaccagcaaucagguggcagugcuguaccagggcgugaacuguaccgaagugcccguggccauucacgccgaucagcugacaccuacauggcggguguacuccaccggcagcaauguguuucagaccagagccggcugucugaucggagccgagcacgugaacaauagcuacgagugcgacauccccaucggcgcuggcaucugugccagcuaccagacacagacaaacagccccagacgggcuagaagcguggccagccagagcgugauugccuacacaaugucucugggcgccgagaacagcguggccuacuccaacaacucuaucgcuauccccaccaacuucaccaucagcgugaccaccgagauccugccuguguccaugaccaagaccagcguggacugcaccauguacaucugcggcgauuccaccgagugcuccaaccugcugcugcaguacggcagcuucugcacccagcugaauagagcccugacagggaucgccguggaacaggacaagaacacccaagagguguucgcccaagugaagcaaaucuacaagaccccuccuaucaaggacuucggcggcuucaauuucagccagauucugcccgauccuagcaagcccagcaagcggagcuucaucgaggaccugcuguucaacaaagugacacuggccgacgccggcuucaucaagcaguauggcgauugucugggcgacauugccgccagggaucugauuugcgcccagaaguuuaacggacugacagugcugccuccucugcugaccgaugagaugaucgcccaguacacaucugcccugcuggccggcacaaucacaagcggcuggacauuuggagcuggcgccgcucugcagauccccuuugcuaugcagauggccuaccgguucaacggcaucggagugacccagaaugugcuguacgagaaccagaagcugaucgccaaccaguucaacagcgccaucggcaagauccaggacagccugagcagcacagcaagcgcccugggaaagcugcaggacguggucaaccagaaugcccaggcacugaacacccuggucaagcagcuguccuccaacuucggcgccaucagcucugugcugaacgauauccugagcagacuggacccuccugaggccgaggugcagaucgacagacugaucacaggcagacugcagagccuccagacauacgugacccagcagcugaucagagccgccgagauuagagccucugccaaucuggccgccaccaagaugucugagugugugcugggccagagcaagagaguggacuuuugcggcaagggcuaccaccugaugagcuucccucagucugccccucacggcgugguguuucugcacgugacauaugugcccgcucaagagaagaauuucaccaccgcuccagccaucugccacgacggcaaagcccacuuuccuagagaaggcguguucguguccaacggcacccauugguucgugacacagcggaacuucuacgagccccagaucaucaccaccgacaacaccuucgugucuggcaacugcgacguugugaucggcauugugaacaauaccguguacgacccucugcagcccgagcuggacagcuucaaagaggaacuggacaaguacuuuaagaaccacacaagccccgacguggaccugggcgauaucagcggaaucaaugccagcgucgugaacauccagaaagagaucgaccggcugaacgagguggccaagaaucugaacgagagccugaucgaccugcaagaacuggggaaguacgagcaguacaucaaguggcccugguacaucuggcugggcuuuaucgccggacugauugccaucgugauggucacaaucaugcuguguugcaugaccagcugcuguagcugccugaagggcuguuguagcuguggcagcugcugcaaguucgacgaggacgauucugagcccgugcugaagggcgugaaacugcacuacaccugaggacuaguguccaccugucccuccugggcugcuggauugucucguuuuccugccaaauaaacaggaucagcgcuuuacagaucuaaaaaaaaaaaaaaaaaaaaaaaaaaaaaaaaaaaaaaaaaaaaaaaaaaaaaaaaaaaaaaaaaaaaaaaaaaaaaaaaaaaaaaaaaaaaaaaaaaaa

SEQ ID NO: 25358 - RNA, 4105 nt, Artificial Sequence
  SARS-CoV-2/Wuhan/WIV05/2019__EPI_ISL_402128 spike protein mRNA gc mod (1-1273)(K986P_V987P_D614G_M1229I)
aggagacccgugacccggaaguuguacggcuacgcgacuuucccucccacaaacccucgcgcccuuccuuuccuacuugggcccggcagaaagcuuaccauguucguguuucuggugcugcugccccugguguccagccagugugugaaccugaccaccagaacacagcugccuccagccuacaccaacagcuucaccagaggcguguacuaccccgacaagguguucagauccagcgugcugcacucuacccaggaccuguuccugccuuucuucagcaacgugaccugguuccacgccauccacguguccggcaccaauggcaccaagagauucgacaaccccgugcugcccuucaacgacgggguguacuuugccagcaccgagaaguccaacaucaucagaggcuggaucuucggcaccacacuggacagcaagacccagagccugcugaucgugaacaacgccaccaacguggucaucaaagugugcgaguuccaguucugcaacgaccccuuccugggcgucuacuaccacaagaacaacaagagcuggauggaaagcgaguuccggguguacagcagcgccaacaacugcaccuucgaguacgugucccagccuuuccugauggaccuggaaggcaagcagggcaacuucaagaaccugcgcgaguucguguucaagaacaucgacggcuacuucaaaaucuacagcaagcacaccccuaucaaccucgugcgggaucugccucagggcuucucugcucuggaaccccugguggaucugcccaucggcaucaacaucacccgguuucagacacugcuggcccugcacagaagcuaccugacaccuggcgauagcagcagcggauggacagcuggugccgccgcuuacuaugugggcuaccugcagccuagaaccuuccugcugaaguacaacgagaacggcaccaucaccgacgccguggauugugcucuggauccucugagcgagacaaagugcacccugaaguccuucaccguggaaaagggcaucuaccagaccagcaacuuccgggugcagcccaccgaauccaucgugcgguuccccaauaucaccaaucugugccccuucggcgagguguucaaugccaccagauucgccucuguguacgccuggaaccggaagcggaucagcaauugcguggccgacuacuccgugcuguacaacuccgccagcuucagcaccuucaagugcuacggcguguccccuaccaagcugaacgaccugugcuucacaaacguguacgccgacagcuucgugauccggggagaugaagugcggcagauugccccuggacagacaggcaagaucgccgacuacaacuacaagcugcccgacgacuucaccggcugugugauugccuggaacagcaacaaccuggacuccaaagucggcggcaacuacaauuaccuguaccggcuguuccggaaguccaaucugaagcccuucgagcgggacaucagcaccgaaaucuaucaggccggcagcaccccuugcaacggcguggaaggcuucaacugcuacuucccacugcaguccuacggcuuucagcccacaaauggcgugggcuaucagcccuacagagugguggugcugagcuucgaacugcugcaugcuccugccacagugugcggcccuaagaaaagcaccaaucucgugaagaacaaaugcgugaacuucaacuucaacggccugaccggcaccggcgugcugacagagagcaacaagaaguuccugccauuccagcaguuuggccgggauaucgccgauaccacagacgccguuagagauccccagacacuggaaauccuggacaucaccccaugcagcuucggcggagugucugugaucaccccuggcaccaacaccagcaaucagguggcagugcuguaccagggcgugaacuguaccgaagugcccguggccauucacgccgaucagcugacaccuacauggcggguguacuccaccggcagcaauguguuucagaccagagccggcugucugaucggagccgagcacgugaacaauagcuacgagugcgacauccccaucggcgcuggcaucugugccagcuaccagacacagacaaacagccccagacgggcuagaagcguggccagccagagcaucauugccuacacaaugucucugggcgccgagaacagcguggccuacuccaacaacucuaucgcuauccccaccaacuucaccaucagcgugaccaccgagauccugccuguguccaugaccaagaccagcguggacugcaccauguacaucugcggcgauuccaccgagugcuccaaccugcugcugcaguacggcagcuucugcacccagcugaauagagcccugacagggaucgccguggaacaggacaagaacacccaagagguguucgcccaagugaagcaaaucuacaagaccccuccuaucaaggacuucggcggcuucaauuucagccagauucugcccgauccuagcaagcccagcaagcggagcuucaucgaggaccugcuguucaacaaagugacacuggccgacgccggcuucaucaagcaguauggcgauugucugggcgacauugccgccagggaucugauuugcgcccagaaguuuaacggacugacagugcugccuccucugcugaccgaugagaugaucgcccaguacacaucugcccugcuggccggcacaaucacaagcggcuggacauuuggagcuggcgccgcucugcagauccccuuugcuaugcagauggccuaccgguucaacggcaucggagugacccagaaugugcuguacgagaaccagaagcugaucgccaaccaguucaacagcgccaucggcaagauccaggacagccugagcagcacagcaagcgcccugggaaagcugcaggacguggucaaccagaaugcccaggcacugaacacccuggucaagcagcuguccuccaacuucggcgccaucagcucugugcugaacgauauccugagcagacuggacccuccugaggccgaggugcagaucgacagacugaucacaggcagacugcagagccuccagacauacgugacccagcagcugaucagagccgccgagauuagagccucugccaaucuggccgccaccaagaugucugagugugugcugggccagagcaagagaguggacuuuugcggcaagggcuaccaccugaugagcuucccucagucugccccucacggcgugguguuucugcacgugacauaugugcccgcucaagagaagaauuucaccaccgcuccagccaucugccacgacggcaaagcccacuuuccuagagaaggcguguucguguccaacggcacccauugguucgugacacagcggaacuucuacgagccccagaucaucaccaccgacaacaccuucgugucuggcaacugcgacguugugaucggcauugugaacaauaccguguacgacccucugcagcccgagcuggacagcuucaaagaggaacuggacaaguacuuuaagaaccacacaagccccgacguggaccugggcgauaucagcggaaucaaugccagcgucgugaacauccagaaagagaucgaccggcugaacgagguggccaagaaucugaacgagagccugaucgaccugcaagaacuggggaaguacgagcaguacaucaaguggcccugguacaucuggcugggcuuuaucgccggacugauugccaucgugaucgucacaaucaugcuguguugcaugaccagcugcuguagcugccugaagggcuguuguagcuguggcagcugcugcaaguucgacgaggacgauucugagcccgugcugaagggcgugaaacugcacuacaccugaggacuaguguccaccugucccuccugggcugcuggauugucucguuuuccugccaaauaaacaggaucagcgcuuuacagaucuaaaaaaaaaaaaaaaaaaaaaaaaaaaaaaaaaaaaaaaaaaaaaaaaaaaaaaaaaaaaaaaaaaaaaaaaaaaaaaaaaaaaaaaaaaaaaaaaaaaa

SEQ ID NO: 25359 - RNA, 4099 nt, Artificial Sequence
  SARS-CoV-2/Wuhan/WIV05/2019__EPI_ISL_402128 spike protein mRNA gc mod (1-1273)(K986P_V987P_H69del_V70del_A222V_Y453F_S477N_D614G_I692V)
aggagacccgugacccggaaguuguacggcuacgcgacuuucccucccacaaacccucgcgcccuuccuuuccuacuugggcccggcagaaagcuuaccauguucguguuucuggugcugcugccccugguguccagccagugugugaaccugaccaccagaacacagcugccuccagccuacaccaacagcuucaccagaggcguguacuaccccgacaagguguucagauccagcgugcugcacucuacccaggaccuguuccugccuuucuucagcaacgugaccugguuccacgccaucuccggcaccaauggcaccaagagauucgacaaccccgugcugcccuucaacgacgggguguacuuugccagcaccgagaaguccaacaucaucagaggcuggaucuucggcaccacacuggacagcaagacccagagccugcugaucgugaacaacgccaccaacguggucaucaaagugugcgaguuccaguucugcaacgaccccuuccugggcgucuacuaccacaagaacaacaagagcuggauggaaagcgaguuccggguguacagcagcgccaacaacugcaccuucgaguacgugucccagccuuuccugauggaccuggaaggcaagcagggcaacuucaagaaccugcgcgaguucguguucaagaacaucgacggcuacuucaaaaucuacagcaagcacaccccuaucaaccucgugcgggaucugccucagggcuucucugugcuggaaccccugguggaucugcccaucggcaucaacaucacccgguuucagacacugcuggcccugcacagaagcuaccugacaccuggcgauagcagcagcggauggacagcuggugccgccgcuuacuaugugggcuaccugcagccuagaaccuuccugcugaaguacaacgagaacggcaccaucaccgacgccguggauugugcucuggauccucugagcgagacaaagugcacccugaaguccuucaccguggaaaagggcaucuaccagaccagcaacuuccgggugcagcccaccgaauccaucgugcgguuccccaauaucaccaaucugugccccuucggcgagguguucaaugccaccagauucgccucuguguacgccuggaaccggaagcggaucagcaauugcguggccgacuacuccgugcuguacaacuccgccagcuucagcaccuucaagugcuacggcguguccccuaccaagcugaacgaccugugcuucacaaacguguacgccgacagcuucgugauccggggagaugaagugcggcagauugccccuggacagacaggcaagaucgccgacuacaacuacaagcugcccgacgacuucaccggcugugugauugccuggaacagcaacaaccuggacuccaaagucggcggcaacuacaauuaccuguuccggcuguuccggaaguccaaucugaagcccuucgagcgggacaucagcaccgaaaucuaucaggccggcaacaccccuugcaacggcguggaaggcuucaacugcuacuucccacugcaguccuacggcuuucagcccacaaauggcgugggcuaucagcccuacagagugguggugcugagcuucgaacugcugcaugcuccugccacagugugcggcccuaagaaaagcaccaaucucgugaagaacaaaugcgugaacuucaacuucaacggccugaccggcaccggcgugcugacagagagcaacaagaaguuccugccauuccagcaguuuggccgggauaucgccgauaccacagacgccguuagagauccccagacacuggaaauccuggacaucaccccaugcagcuucggcggagugucugugaucaccccuggcaccaacaccagcaaucagguggcagugcuguaccagggcgugaacuguaccgaagugcccguggccauucacgccgaucagcugacaccuacauggcggguguacuccaccggcagcaauguguuucagaccagagccggcugucugaucggagccgagcacgugaacaauagcuacgagugcgacauccccaucggcgcuggcaucugugccagcuaccagacacagacaaacagccccagacgggcuagaagcguggccagccagagcgugauugccuacacaaugucucugggcgccgagaacagcguggccuacuccaacaacucuaucgcuauccccaccaacuucaccaucagcgugaccaccgagauccugccuguguccaugaccaagaccagcguggacugcaccauguacaucugcggcgauuccaccgagugcuccaaccugcugcugcaguacggcagcuucugcacccagcugaauagagcccugacagggaucgccguggaacaggacaagaacacccaagagguguucgcccaagugaagcaaaucuacaagaccccuccuaucaaggacuucggcggcuucaauuucagccagauucugcccgauccuagcaagcccagcaagcggagcuucaucgaggaccugcuguucaacaaagugacacuggccgacgccggcuucaucaagcaguauggcgauugucugggcgacauugccgccagggaucugauuugcgcccagaaguuuaacggacugacagugcugccuccucugcugaccgaugagaugaucgcccaguacacaucugcccugcuggccggcacaaucacaagcggcuggacauuuggagcuggcgccgcucugcagauccccuuugcuaugcagauggccuaccgguucaacggcaucggagugacccagaaugugcuguacgagaaccagaagcugaucgccaaccaguucaacagcgccaucggcaagauccaggacagccugagcagcacagcaagcgcccugggaaagcugcaggacguggucaaccagaaugcccaggcacugaacacccuggucaagcagcuguccuccaacuucggcgccaucagcucugugcugaacgauauccugagcagacuggacccuccugaggccgaggugcagaucgacagacugaucacaggcagacugcagagccuccagacauacgugacccagcagcugaucagagccgccgagauuagagccucugccaaucuggccgccaccaagaugucugagugugugcugggccagagcaagagaguggacuuuugcggcaagggcuaccaccugaugagcuucccucagucugccccucacggcgugguguuucugcacgugacauaugugcccgcucaagagaagaauuucaccaccgcuccagccaucugccacgacggcaaagcccacuuuccuagagaaggcguguucguguccaacggcacccauugguucgugacacagcggaacuucuacgagccccagaucaucaccaccgacaacaccuucgugucuggcaacugcgacguugugaucggcauugugaacaauaccguguacgacccucugcagcccgagcuggacagcuucaaagaggaacuggacaaguacuuuaagaaccacacaagccccgacguggaccugggcgauaucagcggaaucaaugccagcgucgugaacauccagaaagagaucgaccggcugaacgagguggccaagaaucugaacgagagccugaucgaccugcaagaacuggggaaguacgagcaguacaucaaguggcccugguacaucuggcugggcuuuaucgccggacugauugccaucgugauggucacaaucaugcuguguugcaugaccagcugcuguagcugccugaagggcuguuguagcuguggcagcugcugcaaguucgacgaggacgauucugagcccgugcugaagggcgugaaacugcacuacaccugaggacuaguguccaccugucccuccugggcugcuggauugucucguuuuccugccaaauaaacaggaucagcgcuuuacagaucuaaaaaaaaaaaaaaaaaaaaaaaaaaaaaaaaaaaaaaaaaaaaaaaaaaaaaaaaaaaaaaaaaaaaaaaaaaaaaaaaaaaaaaaaaaaaaaaaaaaa

SEQ ID NO: 25360 - RNA, 4099 nt, Artificial Sequence
  SARS-CoV-2/Wuhan/WIV05/2019__EPI_ISL_402128 spike protein mRNA gc mod (1-1273)(K986P_V987P_H69del_V70del_Y453F_D614G_I692V_M1229I)
aggagacccgugacccggaaguuguacggcuacgcgacuuucccucccacaaacccucgcgcccuuccuuuccuacuugggcccggcagaaagcuuaccauguucguguuucuggugcugcugccccugguguccagccagugugugaaccugaccaccagaacacagcugccuccagccuacaccaacagcuucaccagaggcguguacuaccccgacaagguguucagauccagcgugcugcacucuacccaggaccuguuccugccuuucuucagcaacgugaccugguuccacgccaucuccggcaccaauggcaccaagagauucgacaaccccgugcugcccuucaacgacgggguguacuuugccagcaccgagaaguccaacaucaucagaggcuggaucuucggcaccacacuggacagcaagacccagagccugcugaucgugaacaacgccaccaacguggucaucaaagugugcgaguuccaguucugcaacgaccccuuccugggcgucuacuaccacaagaacaacaagagcuggauggaaagcgaguuccggguguacagcagcgccaacaacugcaccuucgaguacgugucccagccuuuccugauggaccuggaaggcaagcagggcaacuucaagaaccugcgcgaguucguguucaagaacaucgacggcuacuucaaaaucuacagcaagcacaccccuaucaaccucgugcgggaucugccucagggcuucucugcucuggaaccccugguggaucugcccaucggcaucaacaucacccgguuucagacacugcuggcccugcacagaagcuaccugacaccuggcgauagcagcagcggauggacagcuggugccgccgcuuacuaugugggcuaccugcagccuagaaccuuccugcugaaguacaacgagaacggcaccaucaccgacgccguggauugugcucuggauccucugagcgagacaaagugcacccugaaguccuucaccguggaaaagggcaucuaccagaccagcaacuuccgggugcagcccaccgaauccaucgugcgguuccccaauaucaccaaucugugccccuucggcgagguguucaaugccaccagauucgccucuguguacgccuggaaccggaagcggaucagcaauugcguggccgacuacuccgugcuguacaacuccgccagcuucagcaccuucaagugcuacggcguguccccuaccaagcugaacgaccugugcuucacaaacguguacgccgacagcuucgugauccggggagaugaagugcggcagauugccccuggacagacaggcaagaucgccgacuacaacuacaagcugcccgacgacuucaccggcugugugauugccuggaacagcaacaaccuggacuccaaagucggcggcaacuacaauuaccuguuccggcuguuccggaaguccaaucugaagcccuucgagcgggacaucagcaccgaaaucuaucaggccggcagcaccccuugcaacggcguggaaggcuucaacugcuacuucccacugcaguccuacggcuuucagcccacaaauggcgugggcuaucagcccuacagagugguggugcugagcuucgaacugcugcaugcuccugccacagugugcggcccuaagaaaagcaccaaucucgugaagaacaaaugcgugaacuucaacuucaacggccugaccggcaccggcgugcugacagagagcaacaagaaguuccugccauuccagcaguuuggccgggauaucgccgauaccacagacgccguuagagauccccagacacuggaaauccuggacaucaccccaugcagcuucggcggagugucugugaucaccccuggcaccaacaccagcaaucagguggcagugcuguaccagggcgugaacuguaccgaagugcccguggccauucacgccgaucagcugacaccuacauggcggguguacuccaccggcagcaauguguuucagaccagagccggcugucugaucggagccgagcacgugaacaauagcuacgagugcgacauccccaucggcgcuggcaucugugccagcuaccagacacagacaaacagccccagacgggcuagaagcguggccagccagagcgugauugccuacacaaugucucugggcgccgagaacagcguggccuacuccaacaacucuaucgcuauccccaccaacuucaccaucagcgugaccaccgagauccugccuguguccaugaccaagaccagcguggacugcaccauguacaucugcggcgauuccaccgagugcuccaaccugcugcugcaguacggcagcuucugcacccagcugaauagagcccugacagggaucgccguggaacaggacaagaacacccaagagguguucgcccaagugaagcaaaucuacaagaccccuccuaucaaggacuucggcggcuucaauuucagccagauucugcccgauccuagcaagcccagcaagcggagcuucaucgaggaccugcuguucaacaaagugacacuggccgacgccggcuucaucaagcaguauggcgauugucugggcgacauugccgccagggaucugauuugcgcccagaaguuuaacggacugacagugcugccuccucugcugaccgaugagaugaucgcccaguacacaucugcccugcuggccggcacaaucacaagcggcuggacauuuggagcuggcgccgcucugcagauccccuuugcuaugcagauggccuaccgguucaacggcaucggagugacccagaaugugcuguacgagaaccagaagcugaucgccaaccaguucaacagcgccaucggcaagauccaggacagccugagcagcacagcaagcgcccugggaaagcugcaggacguggucaaccagaaugcccaggcacugaacacccuggucaagcagcuguccuccaacuucggcgccaucagcucugugcugaacgauauccugagcagacuggacccuccugaggccgaggugcagaucgacagacugaucacaggcagacugcagagccuccagacauacgugacccagcagcugaucagagccgccgagauuagagccucugccaaucuggccgccaccaagaugucugagugugugcugggccagagcaagagaguggacuuuugcggcaagggcuaccaccugaugagcuucccucagucugccccucacggcgugguguuucugcacgugacauaugugcccgcucaagagaagaauuucaccaccgcuccagccaucugccacgacggcaaagcccacuuuccuagagaaggcguguucguguccaacggcacccauugguucgugacacagcggaacuucuacgagccccagaucaucaccaccgacaacaccuucgugucuggcaacugcgacguugugaucggcauugugaacaauaccguguacgacccucugcagcccgagcuggacagcuucaaagaggaacuggacaaguacuuuaagaaccacacaagccccgacguggaccugggcgauaucagcggaaucaaugccagcgucgugaacauccagaaagagaucgaccggcugaacgagguggccaagaaucugaacgagagccugaucgaccugcaagaacuggggaaguacgagcaguacaucaaguggcccugguacaucuggcugggcuuuaucgccggacugauugccaucgugaucgucacaaucaugcuguguugcaugaccagcugcuguagcugccugaagggcuguuguagcuguggcagcugcugcaaguucgacgaggacgauucugagcccgugcugaagggcgugaaacugcacuacaccugaggacuaguguccaccugucccuccugggcugcuggauugucucguuuuccugccaaauaaacaggaucagcgcuuuacagaucuaaaaaaaaaaaaaaaaaaaaaaaaaaaaaaaaaaaaaaaaaaaaaaaaaaaaaaaaaaaaaaaaaaaaaaaaaaaaaaaaaaaaaaaaaaaaaaaaaaaa

SEQ ID NO: 25361 - RNA, 4096 nt, Artificial Sequence
  SARS-CoV-2/Wuhan/WIV05/2019__EPI_ISL_402128 spike protein mRNA gc mod (1-1273)(K986P_V987P_K986P_V987P_H69del_V70del_Y144del_N501Y_A570 D_D614G_P681H_T716I_S982A_D1118H)
aggagacccgugacccggaaguuguacggcuacgcgacuuucccucccacaaacccucgcgcccuuccuuuccuacuugggcccggcagaaagcuuaccauguucguguuucuggugcugcugccccugguguccagccagugugugaaccugaccaccagaacacagcugccuccagccuacaccaacagcuucaccagaggcguguacuaccccgacaagguguucagauccagcgugcugcacucuacccaggaccuguuccugccuuucuucagcaacgugaccugguuccacgccaucuccggcaccaauggcaccaagagauucgacaaccccgugcugcccuucaacgacgggguguacuuugccagcaccgagaaguccaacaucaucagaggcuggaucuucggcaccacacuggacagcaagacccagagccugcugaucgugaacaacgccaccaacguggucaucaaagugugcgaguuccaguucugcaacgaccccuuccugggcgucuaccacaagaacaacaagagcuggauggaaagcgaguuccggguguacagcagcgccaacaacugcaccuucgaguacgugucccagccuuuccugauggaccuggaaggcaagcagggcaacuucaagaaccugcgcgaguucguguucaagaacaucgacggcuacuucaaaaucuacagcaagcacaccccuaucaaccucgugcgggaucugccucagggcuucucugcucuggaaccccugguggaucugcccaucggcaucaacaucacccgguuucagacacugcuggcccugcacagaagcuaccugacaccuggcgauagcagcagcggauggacagcuggugccgccgcuuacuaugugggcuaccugcagccuagaaccuuccugcugaaguacaacgagaacggcaccaucaccgacgccguggauugugcucuggauccucugagcgagacaaagugcacccugaaguccuucaccguggaaaagggcaucuaccagaccagcaacuuccgggugcagcccaccgaauccaucgugcgguuccccaauaucaccaaucugugccccuucggcgagguguucaaugccaccagauucgccucuguguacgccuggaaccggaagcggaucagcaauugcguggccgacuacuccgugcuguacaacuccgccagcuucagcaccuucaagugcuacggcguguccccuaccaagcugaacgaccugugcuucacaaacguguacgccgacagcuucgugauccggggagaugaagugcggcagauugccccuggacagacaggcaagaucgccgacuacaacuacaagcugcccgacgacuucaccggcugugugauugccuggaacagcaacaaccuggacuccaaagucggcggcaacuacaauuaccuguaccggcuguuccggaaguccaaucugaagcccuucgagcgggacaucagcaccgaaaucuaucaggccggcagcaccccuugcaacggcguggaaggcuucaacugcuacuucccacugcaguccuacggcuuucagcccacauacggcgugggcuaucagcccuacagagugguggugcugagcuucgaacugcugcaugcuccugccacagugugcggcccuaagaaaagcaccaaucucgugaagaacaaaugcgugaacuucaacuucaacggccugaccggcaccggcgugcugacagagagcaacaagaaguuccugccauuccagcaguuuggccgggauaucgacgauaccacagacgccguuagagauccccagacacuggaaauccuggacaucaccccaugcagcuucggcggagugucugugaucaccccuggcaccaacaccagcaaucagguggcagugcuguaccagggcgugaacuguaccgaagugcccguggccauucacgccgaucagcugacaccuacauggcggguguacuccaccggcagcaauguguuucagaccagagccggcugucugaucggagccgagcacgugaacaauagcuacgagugcgacauccccaucggcgcuggcaucugugccagcuaccagacacagacaaacagccacagacgggcuagaagcguggccagccagagcaucauugccuacacaaugucucugggcgccgagaacagcguggccuacuccaacaacucuaucgcuauccccaucaacuucaccaucagcgugaccaccgagauccugccuguguccaugaccaagaccagcguggacugcaccauguacaucugcggcgauuccaccgagugcuccaaccugcugcugcaguacggcagcuucugcacccagcugaauagagcccugacagggaucgccguggaacaggacaagaacacccaagagguguucgcccaagugaagcaaaucuacaagaccccuccuaucaaggacuucggcggcuucaauuucagccagauucugcccgauccuagcaagcccagcaagcggagcuucaucgaggaccugcuguucaacaaagugacacuggccgacgccggcuucaucaagcaguauggcgauugucugggcgacauugccgccagggaucugauuugcgcccagaaguuuaacggacugacagugcugccuccucugcugaccgaugagaugaucgcccaguacacaucugcccugcuggccggcacaaucacaagcggcuggacauuuggagcuggcgccgcucugcagauccccuuugcuaugcagauggccuaccgguucaacggcaucggagugacccagaaugugcuguacgagaaccagaagcugaucgccaaccaguucaacagcgccaucggcaagauccaggacagccugagcagcacagcaagcgcccugggaaagcugcaggacguggucaaccagaaugcccaggcacugaacacccuggucaagcagcuguccuccaacuucggcgccaucagcucugugcugaacgauauccuggccagacuggacccuccugaggccgaggugcagaucgacagacugaucacaggcagacugcagagccuccagacauacgugacccagcagcugaucagagccgccgagauuagagccucugccaaucuggccgccaccaagaugucugagugugugcugggccagagcaagagaguggacuuuugcggcaagggcuaccaccugaugagcuucccucagucugccccucacggcgugguguuucugcacgugacauaugugcccgcucaagagaagaauuucaccaccgcuccagccaucugccacgacggcaaagcccacuuuccuagagaaggcguguucguguccaacggcacccauugguucgugacacagcggaacuucuacgagccccagaucaucaccacccacaacaccuucgugucuggcaacugcgacguugugaucggcauugugaacaauaccguguacgacccucugcagcccgagcuggacagcuucaaagaggaacuggacaaguacuuuaagaaccacacaagccccgacguggaccugggcgauaucagcggaaucaaugccagcgucgugaacauccagaaagagaucgaccggcugaacgagguggccaagaaucugaacgagagccugaucgaccugcaagaacuggggaaguacgagcaguacaucaaguggcccugguacaucuggcugggcuuuaucgccggacugauugccaucgugauggucacaaucaugcuguguugcaugaccagcugcuguagcugccugaagggcuguuguagcuguggcagcugcugcaaguucgacgaggacgauucugagcccgugcugaagggcgugaaacugcacuacaccugaggacuaguguccaccugucccuccugggcugcuggauugucucguuuuccugccaaauaaacaggaucagcgcuuuacagaucuaaaaaaaaaaaaaaaaaaaaaaaaaaaaaaaaaaaaaaaaaaaaaaaaaaaaaaaaaaaaaaaaaaaaaaaaaaaaaaaaaaaaaaaaaaaaaaaaaaaa

SEQ ID NO: 25362 - RNA, 4105 nt, Artificial Sequence
  SARS-CoV-2/Wuhan/WIV05/2019__EPI_ISL_402128 spike protein mRNA gc mod (1-1273)(K986P_V987P_K986P_V987P_K417N_E484K_N501Y_D614G)
aggagacccgugacccggaaguuguacggcuacgcgacuuucccucccacaaacccucgcgcccuuccuuuccuacuugggcccggcagaaagcuuaccauguucguguuucuggugcugcugccccugguguccagccagugugugaaccugaccaccagaacacagcugccuccagccuacaccaacagcuucaccagaggcguguacuaccccgacaagguguucagauccagcgugcugcacucuacccaggaccuguuccugccuuucuucagcaacgugaccugguuccacgccauccacguguccggcaccaauggcaccaagagauucgacaaccccgugcugcccuucaacgacgggguguacuuugccagcaccgagaaguccaacaucaucagaggcuggaucuucggcaccacacuggacagcaagacccagagccugcugaucgugaacaacgccaccaacguggucaucaaagugugcgaguuccaguucugcaacgaccccuuccugggcgucuacuaccacaagaacaacaagagcuggauggaaagcgaguuccggguguacagcagcgccaacaacugcaccuucgaguacgugucccagccuuuccugauggaccuggaaggcaagcagggcaacuucaagaaccugcgcgaguucguguucaagaacaucgacggcuacuucaaaaucuacagcaagcacaccccuaucaaccucgugcgggaucugccucagggcuucucugcucuggaaccccugguggaucugcccaucggcaucaacaucacccgguuucagacacugcuggcccugcacagaagcuaccugacaccuggcgauagcagcagcggauggacagcuggugccgccgcuuacuaugugggcuaccugcagccuagaaccuuccugcugaaguacaacgagaacggcaccaucaccgacgccguggauugugcucuggauccucugagcgagacaaagugcacccugaaguccuucaccguggaaaagggcaucuaccagaccagcaacuuccgggugcagcccaccgaauccaucgugcgguuccccaauaucaccaaucugugccccuucggcgagguguucaaugccaccagauucgccucuguguacgccuggaaccggaagcggaucagcaauugcguggccgacuacuccgugcuguacaacuccgccagcuucagcaccuucaagugcuacggcguguccccuaccaagcugaacgaccugugcuucacaaacguguacgccgacagcuucgugauccggggagaugaagugcggcagauugccccuggacagacaggcaacaucgccgacuacaacuacaagcugcccgacgacuucaccggcugugugauugccuggaacagcaacaaccuggacuccaaagucggcggcaacuacaauuaccuguaccggcuguuccggaaguccaaucugaagcccuucgagcgggacaucagcaccgaaaucuaucaggccggcagcaccccuugcaacggcgugaagggcuucaacugcuacuucccacugcaguccuacggcuuucagcccacauacggcgugggcuaucagcccuacagagugguggugcugagcuucgaacugcugcaugcuccugccacagugugcggcccuaagaaaagcaccaaucucgugaagaacaaaugcgugaacuucaacuucaacggccugaccggcaccggcgugcugacagagagcaacaagaaguuccugccauuccagcaguuuggccgggauaucgccgauaccacagacgccguuagagauccccagacacuggaaauccuggacaucaccccaugcagcuucggcggagugucugugaucaccccuggcaccaacaccagcaaucagguggcagugcuguaccagggcgugaacuguaccgaagugcccguggccauucacgccgaucagcugacaccuacauggcggguguacuccaccggcagcaauguguuucagaccagagccggcugucugaucggagccgagcacgugaacaauagcuacgagugcgacauccccaucggcgcuggcaucugugccagcuaccagacacagacaaacagccccagacgggcuagaagcguggccagccagagcaucauugccuacacaaugucucugggcgccgagaacagcguggccuacuccaacaacucuaucgcuauccccaccaacuucaccaucagcgugaccaccgagauccugccuguguccaugaccaagaccagcguggacugcaccauguacaucugcggcgauuccaccgagugcuccaaccugcugcugcaguacggcagcuucugcacccagcugaauagagcccugacagggaucgccguggaacaggacaagaacacccaagagguguucgcccaagugaagcaaaucuacaagaccccuccuaucaaggacuucggcggcuucaauuucagccagauucugcccgauccuagcaagcccagcaagcggagcuucaucgaggaccugcuguucaacaaagugacacuggccgacgccggcuucaucaagcaguauggcgauugucugggcgacauugccgccagggaucugauuugcgcccagaaguuuaacggacugacagugcugccuccucugcugaccgaugagaugaucgcccaguacacaucugcccugcuggccggcacaaucacaagcggcuggacauuuggagcuggcgccgcucugcagauccccuuugcuaugcagauggccuaccgguucaacggcaucggagugacccagaaugugcuguacgagaaccagaagcugaucgccaaccaguucaacagcgccaucggcaagauccaggacagccugagcagcacagcaagcgcccugggaaagcugcaggacguggucaaccagaaugcccaggcacugaacacccuggucaagcagcuguccuccaacuucggcgccaucagcucugugcugaacgauauccugagcagacuggacccuccugaggccgaggugcagaucgacagacugaucacaggcagacugcagagccuccagacauacgugacccagcagcugaucagagccgccgagauuagagccucugccaaucuggccgccaccaagaugucugagugugugcugggccagagcaagagaguggacuuuugcggcaagggcuaccaccugaugagcuucccucagucugccccucacggcgugguguuucugcacgugacauaugugcccgcucaagagaagaauuucaccaccgcuccagccaucugccacgacggcaaagcccacuuuccuagagaaggcguguucguguccaacggcacccauugguucgugacacagcggaacuucuacgagccccagaucaucaccaccgacaacaccuucgugucuggcaacugcgacguugugaucggcauugugaacaauaccguguacgacccucugcagcccgagcuggacagcuucaaagaggaacuggacaaguacuuuaagaaccacacaagccccgacguggaccugggcgauaucagcggaaucaaugccagcgucgugaacauccagaaagagaucgaccggcugaacgagguggccaagaaucugaacgagagccugaucgaccugcaagaacuggggaaguacgagcaguacaucaaguggcccugguacaucuggcugggcuuuaucgccggacugauugccaucgugauggucacaaucaugcuguguugcaugaccagcugcuguagcugccugaagggcuguuguagcuguggcagcugcugcaaguucgacgaggacgauucugagcccgugcugaagggcgugaaacugcacuacaccugaggacuaguguccaccugucccuccugggcugcuggauugucucguuuuccugccaaauaaacaggaucagcgcuuuacagaucuaaaaaaaaaaaaaaaaaaaaaaaaaaaaaaaaaaaaaaaaaaaaaaaaaaaaaaaaaaaaaaaaaaaaaaaaaaaaaaaaaaaaaaaaaaaaaaaaaaaa

SEQ ID NO: 25363 - RNA, 4096 nt, Artificial Sequence
  SARS-CoV-2/Wuhan/WIV05/2019__EPI_ISL_402128 spike protein mRNA gc mod (1-1273)(K986P_V987P_K986P_V987P_L18F_D80A_D215G_L242del_A243del_ L244del_R246I_K417N_E484K_N501Y_D614G_A701V)
aggagacccgugacccggaaguuguacggcuacgcgacuuucccucccacaaacccucgcgcccuuccuuuccuacuugggcccggcagaaagcuuaccauguucguguuucuggugcugcugccccugguguccagccagugugugaacuucaccaccagaacacagcugccuccagccuacaccaacagcuucaccagaggcguguacuaccccgacaagguguucagauccagcgugcugcacucuacccaggaccuguuccugccuuucuucagcaacgugaccugguuccacgccauccacguguccggcaccaauggcaccaagagauucgccaaccccgugcugcccuucaacgacgggguguacuuugccagcaccgagaaguccaacaucaucagaggcuggaucuucggcaccacacuggacagcaagacccagagccugcugaucgugaacaacgccaccaacguggucaucaaagugugcgaguuccaguucugcaacgaccccuuccugggcgucuacuaccacaagaacaacaagagcuggauggaaagcgaguuccggguguacagcagcgccaacaacugcaccuucgaguacgugucccagccuuuccugauggaccuggaaggcaagcagggcaacuucaagaaccugcgcgaguucguguucaagaacaucgacggcuacuucaaaaucuacagcaagcacaccccuaucaaccucgugcggggccugccucagggcuucucugcucuggaaccccugguggaucugcccaucggcaucaacaucacccgguuucagacacugcacaucagcuaccugacaccuggcgauagcagcagcggauggacagcuggugccgccgcuuacuaugugggcuaccugcagccuagaaccuuccugcugaaguacaacgagaacggcaccaucaccgacgccguggauugugcucuggauccucugagcgagacaaagugcacccugaaguccuucaccguggaaaagggcaucuaccagaccagcaacuuccgggugcagcccaccgaauccaucgugcgguuccccaauaucaccaaucugugccccuucggcgagguguucaaugccaccagauucgccucuguguacgccuggaaccggaagcggaucagcaauugcguggccgacuacuccgugcuguacaacuccgccagcuucagcaccuucaagugcuacggcguguccccuaccaagcugaacgaccugugcuucacaaacguguacgccgacagcuucgugauccggggagaugaagugcggcagauugccccuggacagacaggcaacaucgccgacuacaacuacaagcugcccgacgacuucaccggcugugugauugccuggaacagcaacaaccuggacuccaaagucggcggcaacuacaauuaccuguaccggcuguuccggaaguccaaucugaagcccuucgagcgggacaucagcaccgaaaucuaucaggccggcagcaccccuugcaacggcgugaagggcuucaacugcuacuucccacugcaguccuacggcuuucagcccacauacggcgugggcuaucagcccuacagagugguggugcugagcuucgaacugcugcaugcuccugccacagugugcggcccuaagaaaagcaccaaucucgugaagaacaaaugcgugaacuucaacuucaacggccugaccggcaccggcgugcugacagagagcaacaagaaguuccugccauuccagcaguuuggccgggauaucgccgauaccacagacgccguuagagauccccagacacuggaaauccuggacaucaccccaugcagcuucggcggagugucugugaucaccccuggcaccaacaccagcaaucagguggcagugcuguaccagggcgugaacuguaccgaagugcccguggccauucacgccgaucagcugacaccuacauggcggguguacuccaccggcagcaauguguuucagaccagagccggcugucugaucggagccgagcacgugaacaauagcuacgagugcgacauccccaucggcgcuggcaucugugccagcuaccagacacagacaaacagccccagacgggcuagaagcguggccagccagagcaucauugccuacacaaugucucugggcguggagaacagcguggccuacuccaacaacucuaucgcuauccccaccaacuucaccaucagcgugaccaccgagauccugccuguguccaugaccaagaccagcguggacugcaccauguacaucugcggcgauuccaccgagugcuccaaccugcugcugcaguacggcagcuucugcacccagcugaauagagcccugacagggaucgccguggaacaggacaagaacacccaagagguguucgcccaagugaagcaaaucuacaagaccccuccuaucaaggacuucggcggcuucaauuucagccagauucugcccgauccuagcaagcccagcaagcggagcuucaucgaggaccugcuguucaacaaagugacacuggccgacgccggcuucaucaagcaguauggcgauugucugggcgacauugccgccagggaucugauuugcgcccagaaguuuaacggacugacagugcugccuccucugcugaccgaugagaugaucgcccaguacacaucugcccugcuggccggcacaaucacaagcggcuggacauuuggagcuggcgccgcucugcagauccccuuugcuaugcagauggccuaccgguucaacggcaucggagugacccagaaugugcuguacgagaaccagaagcugaucgccaaccaguucaacagcgccaucggcaagauccaggacagccugagcagcacagcaagcgcccugggaaagcugcaggacguggucaaccagaaugcccaggcacugaacacccuggucaagcagcuguccuccaacuucggcgccaucagcucugugcugaacgauauccugagcagacuggacccuccugaggccgaggugcagaucgacagacugaucacaggcagacugcagagccuccagacauacgugacccagcagcugaucagagccgccgagauuagagccucugccaaucuggccgccaccaagaugucugagugugugcugggccagagcaagagaguggacuuuugcggcaagggcuaccaccugaugagcuucccucagucugccccucacggcgugguguuucugcacgugacauaugugcccgcucaagagaagaauuucaccaccgcuccagccaucugccacgacggcaaagcccacuuuccuagagaaggcguguucguguccaacggcacccauugguucgugacacagcggaacuucuacgagccccagaucaucaccaccgacaacaccuucgugucuggcaacugcgacguugugaucggcauugugaacaauaccguguacgacccucugcagcccgagcuggacagcuucaaagaggaacuggacaaguacuuuaagaaccacacaagccccgacguggaccugggcgauaucagcggaaucaaugccagcgucgugaacauccagaaagagaucgaccggcugaacgagguggccaagaaucugaacgagagccugaucgaccugcaagaacuggggaaguacgagcaguacaucaaguggcccugguacaucuggcugggcuuuaucgccggacugauugccaucgugauggucacaaucaugcuguguugcaugaccagcugcuguagcugccugaagggcuguuguagcuguggcagcugcugcaaguucgacgaggacgauucugagcccgugcugaagggcgugaaacugcacuacaccugaggacuaguguccaccugucccuccugggcugcuggauugucucguuuuccugccaaauaaacaggaucagcgcuuuacagaucuaaaaaaaaaaaaaaaaaaaaaaaaaaaaaaaaaaaaaaaaaaaaaaaaaaaaaaaaaaaaaaaaaaaaaaaaaaaaaaaaaaaaaaaaaaaaaaaaaaaa

SEQ ID NO: 25364 - RNA, 4105 nt, Artificial Sequence
  SARS-CoV-2/Wuhan/WIV05/2019__EPI_ISL_402128 spike protein mRNA gc mod (1-1273)(K986P_V987P_K986P_V987P_E484K_D614G)
aggagacccgugacccggaaguuguacggcuacgcgacuuucccucccacaaacccucgcgcccuuccuuuccuacuugggcccggcagaaagcuuaccauguucguguuucuggugcugcugccccugguguccagccagugugugaaccugaccaccagaacacagcugccuccagccuacaccaacagcuucaccagaggcguguacuaccccgacaagguguucagauccagcgugcugcacucuacccaggaccuguuccugccuuucuucagcaacgugaccugguuccacgccauccacguguccggcaccaauggcaccaagagauucgacaaccccgugcugcccuucaacgacgggguguacuuugccagcaccgagaaguccaacaucaucagaggcuggaucuucggcaccacacuggacagcaagacccagagccugcugaucgugaacaacgccaccaacguggucaucaaagugugcgaguuccaguucugcaacgaccccuuccugggcgucuacuaccacaagaacaacaagagcuggauggaaagcgaguuccggguguacagcagcgccaacaacugcaccuucgaguacgugucccagccuuuccugauggaccuggaaggcaagcagggcaacuucaagaaccugcgcgaguucguguucaagaacaucgacggcuacuucaaaaucuacagcaagcacaccccuaucaaccucgugcgggaucugccucagggcuucucugcucuggaaccccugguggaucugcccaucggcaucaacaucacccgguuucagacacugcuggcccugcacagaagcuaccugacaccuggcgauagcagcagcggauggacagcuggugccgccgcuuacuaugugggcuaccugcagccuagaaccuuccugcugaaguacaacgagaacggcaccaucaccgacgccguggauugugcucuggauccucugagcgagacaaagugcacccugaaguccuucaccguggaaaagggcaucuaccagaccagcaacuuccgggugcagcccaccgaauccaucgugcgguuccccaauaucaccaaucugugccccuucggcgagguguucaaugccaccagauucgccucuguguacgccuggaaccggaagcggaucagcaauugcguggccgacuacuccgugcuguacaacuccgccagcuucagcaccuucaagugcuacggcguguccccuaccaagcugaacgaccugugcuucacaaacguguacgccgacagcuucgugauccggggagaugaagugcggcagauugccccuggacagacaggcaagaucgccgacuacaacuacaagcugcccgacgacuucaccggcugugugauugccuggaacagcaacaaccuggacuccaaagucggcggcaacuacaauuaccuguaccggcuguuccggaaguccaaucugaagcccuucgagcgggacaucagcaccgaaaucuaucaggccggcagcaccccuugcaacggcgugaagggcuucaacugcuacuucccacugcaguccuacggcuuucagcccacaaauggcgugggcuaucagcccuacagagugguggugcugagcuucgaacugcugcaugcuccugccacagugugcggcccuaagaaaagcaccaaucucgugaagaacaaaugcgugaacuucaacuucaacggccugaccggcaccggcgugcugacagagagcaacaagaaguuccugccauuccagcaguuuggccgggauaucgccgauaccacagacgccguuagagauccccagacacuggaaauccuggacaucaccccaugcagcuucggcggagugucugugaucaccccuggcaccaacaccagcaaucagguggcagugcuguaccagggcgugaacuguaccgaagugcccguggccauucacgccgaucagcugacaccuacauggcggguguacuccaccggcagcaauguguuucagaccagagccggcugucugaucggagccgagcacgugaacaauagcuacgagugcgacauccccaucggcgcuggcaucugugccagcuaccagacacagacaaacagccccagacgggcuagaagcguggccagccagagcaucauugccuacacaaugucucugggcgccgagaacagcguggccuacuccaacaacucuaucgcuauccccaccaacuucaccaucagcgugaccaccgagauccugccuguguccaugaccaagaccagcguggacugcaccauguacaucugcggcgauuccaccgagugcuccaaccugcugcugcaguacggcagcuucugcacccagcugaauagagcccugacagggaucgccguggaacaggacaagaacacccaagagguguucgcccaagugaagcaaaucuacaagaccccuccuaucaaggacuucggcggcuucaauuucagccagauucugcccgauccuagcaagcccagcaagcggagcuucaucgaggaccugcuguucaacaaagugacacuggccgacgccggcuucaucaagcaguauggcgauugucugggcgacauugccgccagggaucugauuugcgcccagaaguuuaacggacugacagugcugccuccucugcugaccgaugagaugaucgcccaguacacaucugcccugcuggccggcacaaucacaagcggcuggacauuuggagcuggcgccgcucugcagauccccuuugcuaugcagauggccuaccgguucaacggcaucggagugacccagaaugugcuguacgagaaccagaagcugaucgccaaccaguucaacagcgccaucggcaagauccaggacagccugagcagcacagcaagcgcccugggaaagcugcaggacguggucaaccagaaugcccaggcacugaacacccuggucaagcagcuguccuccaacuucggcgccaucagcucugugcugaacgauauccugagcagacuggacccuccugaggccgaggugcagaucgacagacugaucacaggcagacugcagagccuccagacauacgugacccagcagcugaucagagccgccgagauuagagccucugccaaucuggccgccaccaagaugucugagugugugcugggccagagcaagagaguggacuuuugcggcaagggcuaccaccugaugagcuucccucagucugccccucacggcgugguguuucugcacgugacauaugugcccgcucaagagaagaauuucaccaccgcuccagccaucugccacgacggcaaagcccacuuuccuagagaaggcguguucguguccaacggcacccauugguucgugacacagcggaacuucuacgagccccagaucaucaccaccgacaacaccuucgugucuggcaacugcgacguugugaucggcauugugaacaauaccguguacgacccucugcagcccgagcuggacagcuucaaagaggaacuggacaaguacuuuaagaaccacacaagccccgacguggaccugggcgauaucagcggaaucaaugccagcgucgugaacauccagaaagagaucgaccggcugaacgagguggccaagaaucugaacgagagccugaucgaccugcaagaacuggggaaguacgagcaguacaucaaguggcccugguacaucuggcugggcuuuaucgccggacugauugccaucgugauggucacaaucaugcuguguugcaugaccagcugcuguagcugccugaagggcuguuguagcuguggcagcugcugcaaguucgacgaggacgauucugagcccgugcugaagggcgugaaacugcacuacaccugaggacuaguguccaccugucccuccugggcugcuggauugucucguuuuccugccaaauaaacaggaucagcgcuuuacagaucuaaaaaaaaaaaaaaaaaaaaaaaaaaaaaaaaaaaaaaaaaaaaaaaaaaaaaaaaaaaaaaaaaaaaaaaaaaaaaaaaaaaaaaaaaaaaaaaaaaaa

SEQ ID NO: 25365 - RNA, 4105 nt, Artificial Sequence
  SARS-CoV-2/Wuhan/WIV05/2019__EPI_ISL_402128 spike protein mRNA gc mod (1-1273)(K986P_V987P_K986P_V987P_L18F_T20N_P26S_D138Y_R190S_K417T _E484K_N501Y_D614G_H655Y_T1027I)
aggagacccgugacccggaaguuguacggcuacgcgacuuucccucccacaaacccucgcgcccuuccuuuccuacuugggcccggcagaaagcuuaccauguucguguuucuggugcugcugccccugguguccagccagugugugaacuucaccaacagaacacagcugccuagcgccuacaccaacagcuucaccagaggcguguacuaccccgacaagguguucagauccagcgugcugcacucuacccaggaccuguuccugccuuucuucagcaacgugaccugguuccacgccauccacguguccggcaccaauggcaccaagagauucgacaaccccgugcugcccuucaacgacgggguguacuuugccagcaccgagaaguccaacaucaucagaggcuggaucuucggcaccacacuggacagcaagacccagagccugcugaucgugaacaacgccaccaacguggucaucaaagugugcgaguuccaguucugcaacuaccccuuccugggcgucuacuaccacaagaacaacaagagcuggauggaaagcgaguuccggguguacagcagcgccaacaacugcaccuucgaguacgugucccagccuuuccugauggaccuggaaggcaagcagggcaacuucaagaaccugagcgaguucguguucaagaacaucgacggcuacuucaaaaucuacagcaagcacaccccuaucaaccucgugcgggaucugccucagggcuucucugcucuggaaccccugguggaucugcccaucggcaucaacaucacccgguuucagacacugcuggcccugcacagaagcuaccugacaccuggcgauagcagcagcggauggacagcuggugccgccgcuuacuaugugggcuaccugcagccuagaaccuuccugcugaaguacaacgagaacggcaccaucaccgacgccguggauugugcucuggauccucugagcgagacaaagugcacccugaaguccuucaccguggaaaagggcaucuaccagaccagcaacuuccgggugcagcccaccgaauccaucgugcgguuccccaauaucaccaaucugugccccuucggcgagguguucaaugccaccagauucgccucuguguacgccuggaaccggaagcggaucagcaauugcguggccgacuacuccgugcuguacaacuccgccagcuucagcaccuucaagugcuacggcguguccccuaccaagcugaacgaccugugcuucacaaacguguacgccgacagcuucgugauccggggagaugaagugcggcagauugccccuggacagacaggcaccaucgccgacuacaacuacaagcugcccgacgacuucaccggcugugugauugccuggaacagcaacaaccuggacuccaaagucggcggcaacuacaauuaccuguaccggcuguuccggaaguccaaucugaagcccuucgagcgggacaucagcaccgaaaucuaucaggccggcagcaccccuugcaacggcgugaagggcuucaacugcuacuucccacugcaguccuacggcuuucagcccacauacggcgugggcuaucagcccuacagagugguggugcugagcuucgaacugcugcaugcuccugccacagugugcggcccuaagaaaagcaccaaucucgugaagaacaaaugcgugaacuucaacuucaacggccugaccggcaccggcgugcugacagagagcaacaagaaguuccugccauuccagcaguuuggccgggauaucgccgauaccacagacgccguuagagauccccagacacuggaaauccuggacaucaccccaugcagcuucggcggagugucugugaucaccccuggcaccaacaccagcaaucagguggcagugcuguaccagggcgugaacuguaccgaagugcccguggccauucacgccgaucagcugacaccuacauggcggguguacuccaccggcagcaauguguuucagaccagagccggcugucugaucggagccgaguacgugaacaauagcuacgagugcgacauccccaucggcgcuggcaucugugccagcuaccagacacagacaaacagccccagacgggcuagaagcguggccagccagagcaucauugccuacacaaugucucugggcgccgagaacagcguggccuacuccaacaacucuaucgcuauccccaccaacuucaccaucagcgugaccaccgagauccugccuguguccaugaccaagaccagcguggacugcaccauguacaucugcggcgauuccaccgagugcuccaaccugcugcugcaguacggcagcuucugcacccagcugaauagagcccugacagggaucgccguggaacaggacaagaacacccaagagguguucgcccaagugaagcaaaucuacaagaccccuccuaucaaggacuucggcggcuucaauuucagccagauucugcccgauccuagcaagcccagcaagcggagcuucaucgaggaccugcuguucaacaaagugacacuggccgacgccggcuucaucaagcaguauggcgauugucugggcgacauugccgccagggaucugauuugcgcccagaaguuuaacggacugacagugcugccuccucugcugaccgaugagaugaucgcccaguacacaucugcccugcuggccggcacaaucacaagcggcuggacauuuggagcuggcgccgcucugcagauccccuuugcuaugcagauggccuaccgguucaacggcaucggagugacccagaaugugcuguacgagaaccagaagcugaucgccaaccaguucaacagcgccaucggcaagauccaggacagccugagcagcacagcaagcgcccugggaaagcugcaggacguggucaaccagaaugcccaggcacugaacacccuggucaagcagcuguccuccaacuucggcgccaucagcucugugcugaacgauauccugagcagacuggacccuccugaggccgaggugcagaucgacagacugaucacaggcagacugcagagccuccagacauacgugacccagcagcugaucagagccgccgagauuagagccucugccaaucuggccgccaucaagaugucugagugugugcugggccagagcaagagaguggacuuuugcggcaagggcuaccaccugaugagcuucccucagucugccccucacggcgugguguuucugcacgugacauaugugcccgcucaagagaagaauuucaccaccgcuccagccaucugccacgacggcaaagcccacuuuccuagagaaggcguguucguguccaacggcacccauugguucgugacacagcggaacuucuacgagccccagaucaucaccaccgacaacaccuucgugucuggcaacugcgacguugugaucggcauugugaacaauaccguguacgacccucugcagcccgagcuggacagcuucaaagaggaacuggacaaguacuuuaagaaccacacaagccccgacguggaccugggcgauaucagcggaaucaaugccagcgucgugaacauccagaaagagaucgaccggcugaacgagguggccaagaaucugaacgagagccugaucgaccugcaagaacuggggaaguacgagcaguacaucaaguggcccugguacaucuggcugggcuuuaucgccggacugauugccaucgugauggucacaaucaugcuguguugcaugaccagcugcuguagcugccugaagggcuguuguagcuguggcagcugcugcaaguucgacgaggacgauucugagcccgugcugaagggcgugaaacugcacuacaccugaggacuaguguccaccugucccuccugggcugcuggauugucucguuuuccugccaaauaaacaggaucagcgcuuuacagaucuaaaaaaaaaaaaaaaaaaaaaaaaaaaaaaaaaaaaaaaaaaaaaaaaaaaaaaaaaaaaaaaaaaaaaaaaaaaaaaaaaaaaaaaaaaaaaaaaaaaa

SEQ ID NO: 25366 - RNA, 4105 nt, Artificial Sequence
  SARS-CoV-2/Wuhan/WIV05/2019__EPI_ISL_402128 spike protein mRNA gc mod (1-1273)(K986P_V987P_K986P_V987P_S13I_W152C_L452R_D614G)
aggagacccgugacccggaaguuguacggcuacgcgacuuucccucccacaaacccucgcgcccuuccuuuccuacuugggcccggcagaaagcuuaccauguucguguuucuggugcugcugccccugguguccauccagugugugaaccugaccaccagaacacagcugccuccagccuacaccaacagcuucaccagaggcguguacuaccccgacaagguguucagauccagcgugcugcacucuacccaggaccuguuccugccuuucuucagcaacgugaccugguuccacgccauccacguguccggcaccaauggcaccaagagauucgacaaccccgugcugcccuucaacgacgggguguacuuugccagcaccgagaaguccaacaucaucagaggcuggaucuucggcaccacacuggacagcaagacccagagccugcugaucgugaacaacgccaccaacguggucaucaaagugugcgaguuccaguucugcaacgaccccuuccugggcgucuacuaccacaagaacaacaagagcugcauggaaagcgaguuccggguguacagcagcgccaacaacugcaccuucgaguacgugucccagccuuuccugauggaccuggaaggcaagcagggcaacuucaagaaccugcgcgaguucguguucaagaacaucgacggcuacuucaaaaucuacagcaagcacaccccuaucaaccucgugcgggaucugccucagggcuucucugcucuggaaccccugguggaucugcccaucggcaucaacaucacccgguuucagacacugcuggcccugcacagaagcuaccugacaccuggcgauagcagcagcggauggacagcuggugccgccgcuuacuaugugggcuaccugcagccuagaaccuuccugcugaaguacaacgagaacggcaccaucaccgacgccguggauugugcucuggauccucugagcgagacaaagugcacccugaaguccuucaccguggaaaagggcaucuaccagaccagcaacuuccgggugcagcccaccgaauccaucgugcgguuccccaauaucaccaaucugugccccuucggcgagguguucaaugccaccagauucgccucuguguacgccuggaaccggaagcggaucagcaauugcguggccgacuacuccgugcuguacaacuccgccagcuucagcaccuucaagugcuacggcguguccccuaccaagcugaacgaccugugcuucacaaacguguacgccgacagcuucgugauccggggagaugaagugcggcagauugccccuggacagacaggcaagaucgccgacuacaacuacaagcugcccgacgacuucaccggcugugugauugccuggaacagcaacaaccuggacuccaaagucggcggcaacuacaauuaccgcuaccggcuguuccggaaguccaaucugaagcccuucgagcgggacaucagcaccgaaaucuaucaggccggcagcaccccuugcaacggcguggaaggcuucaacugcuacuucccacugcaguccuacggcuuucagcccacaaauggcgugggcuaucagcccuacagagugguggugcugagcuucgaacugcugcaugcuccugccacagugugcggcccuaagaaaagcaccaaucucgugaagaacaaaugcgugaacuucaacuucaacggccugaccggcaccggcgugcugacagagagcaacaagaaguuccugccauuccagcaguuuggccgggauaucgccgauaccacagacgccguuagagauccccagacacuggaaauccuggacaucaccccaugcagcuucggcggagugucugugaucaccccuggcaccaacaccagcaaucagguggcagugcuguaccagggcgugaacuguaccgaagugcccguggccauucacgccgaucagcugacaccuacauggcggguguacuccaccggcagcaauguguuucagaccagagccggcugucugaucggagccgagcacgugaacaauagcuacgagugcgacauccccaucggcgcuggcaucugugccagcuaccagacacagacaaacagccccagacgggcuagaagcguggccagccagagcaucauugccuacacaaugucucugggcgccgagaacagcguggccuacuccaacaacucuaucgcuauccccaccaacuucaccaucagcgugaccaccgagauccugccuguguccaugaccaagaccagcguggacugcaccauguacaucugcggcgauuccaccgagugcuccaaccugcugcugcaguacggcagcuucugcacccagcugaauagagcccugacagggaucgccguggaacaggacaagaacacccaagagguguucgcccaagugaagcaaaucuacaagaccccuccuaucaaggacuucggcggcuucaauuucagccagauucugcccgauccuagcaagcccagcaagcggagcuucaucgaggaccugcuguucaacaaagugacacuggccgacgccggcuucaucaagcaguauggcgauugucugggcgacauugccgccagggaucugauuugcgcccagaaguuuaacggacugacagugcugccuccucugcugaccgaugagaugaucgcccaguacacaucugcccugcuggccggcacaaucacaagcggcuggacauuuggagcuggcgccgcucugcagauccccuuugcuaugcagauggccuaccgguucaacggcaucggagugacccagaaugugcuguacgagaaccagaagcugaucgccaaccaguucaacagcgccaucggcaagauccaggacagccugagcagcacagcaagcgcccugggaaagcugcaggacguggucaaccagaaugcccaggcacugaacacccuggucaagcagcuguccuccaacuucggcgccaucagcucugugcugaacgauauccugagcagacuggacccuccugaggccgaggugcagaucgacagacugaucacaggcagacugcagagccuccagacauacgugacccagcagcugaucagagccgccgagauuagagccucugccaaucuggccgccaccaagaugucugagugugugcugggccagagcaagagaguggacuuuugcggcaagggcuaccaccugaugagcuucccucagucugccccucacggcgugguguuucugcacgugacauaugugcccgcucaagagaagaauuucaccaccgcuccagccaucugccacgacggcaaagcccacuuuccuagagaaggcguguucguguccaacggcacccauugguucgugacacagcggaacuucuacgagccccagaucaucaccaccgacaacaccuucgugucuggcaacugcgacguugugaucggcauugugaacaauaccguguacgacccucugcagcccgagcuggacagcuucaaagaggaacuggacaaguacuuuaagaaccacacaagccccgacguggaccugggcgauaucagcggaaucaaugccagcgucgugaacauccagaaagagaucgaccggcugaacgagguggccaagaaucugaacgagagccugaucgaccugcaagaacuggggaaguacgagcaguacaucaaguggcccugguacaucuggcugggcuuuaucgccggacugauugccaucgugauggucacaaucaugcuguguugcaugaccagcugcuguagcugccugaagggcuguuguagcuguggcagcugcugcaaguucgacgaggacgauucugagcccgugcugaagggcgugaaacugcacuacaccugaggacuaguguccaccugucccuccugggcugcuggauugucucguuuuccugccaaauaaacaggaucagcgcuuuacagaucuaaaaaaaaaaaaaaaaaaaaaaaaaaaaaaaaaaaaaaaaaaaaaaaaaaaaaaaaaaaaaaaaaaaaaaaaaaaaaaaaaaaaaaaaaaaaaaaaaaaa

SEQ ID NO: 25367 - RNA, 4105 nt, Artificial Sequence
  SARS-CoV-2/Wuhan/WIV05/2019__EPI_ISL_402128 spike protein mRNA gc mod (1-1273)(K986P_V987P)
aggagacccgugacccggaaguuguacggcuacgcgacuuucccucccacaaacccucgcgcccuuccuuuccuacuugggcccggcagaaagcuuaccauguucguguuccuggugcugcugccucugguguccagccagugugugaaccugaccaccagaacacagcugccuccagccuacaccaacagcuuuaccagaggcguguacuaccccgacaagguguucagauccagcgugcugcacucuacccaggaccuguuccugccuuucuucagcaacgugaccugguuccacgccauccacguguccggcaccaauggcaccaagagauucgacaaccccgugcugcccuucaacgacgggguguacuuugccagcaccgagaaguccaacaucaucagaggcuggaucuucggcaccacacuggacagcaagacccagagccugcugaucgugaacaacgccaccaacguggucaucaaagugugcgaguuccaguucugcaacgaccccuuccugggcgucuacuaccacaagaacaacaagagcuggauggaaagcgaguuccggguguacagcagcgccaacaacugcaccuucgaguacgugucccagccuuuccugauggaccuggaaggcaagcagggcaacuucaagaaccugcgcgaguucguguuuaagaacaucgacggcuacuucaagaucuacagcaagcacaccccuaucaaccucgugcgggaucugccucagggcuucucugcucuggaaccccugguggaucugcccaucggcaucaacaucacccgguuucagacacugcuggcccugcacagaagcuaccugacaccuggcgauagcagcagcggauggacagcuggugccgccgcuuacuaugugggcuaccugcagccuagaaccuuccugcugaaguacaacgagaacggcaccaucaccgacgccguggauugugcucuggauccucugagcgagacaaagugcacccugaaguccuucaccguggaaaagggcaucuaccagaccagcaacuuccgggugcagcccaccgaauccaucgugcgguuccccaauaucaccaaucugugccccuucggcgagguguucaaugccaccagauucgccucuguguacgccuggaaccggaagcggaucagcaauugcguggccgacuacuccgugcuguacaacuccgccagcuucagcaccuucaagugcuacggcguguccccuaccaagcugaacgaccugugcuucacaaacguguacgccgacagcuucgugauccggggagaugaagugcggcagauugccccuggacagacaggcaagaucgccgacuacaacuacaagcugcccgacgacuucaccggcugugugauugccuggaacagcaacaaccuggacuccaaagucggcggcaacuacaauuaccuguaccggcuguuccggaaguccaaucugaagcccuucgagcgggacaucuccaccgagaucuaucaggccggcagcaccccuuguaacggcguggaaggcuucaacugcuacuucccacugcaguccuacggcuuucagcccacaaauggcgugggcuaucagcccuacagagugguggugcugagcuucgaacugcugcaugccccugccacagugugcggcccuaagaaaagcaccaaucucgugaagaacaaaugcgugaacuucaacuucaacggccugaccggcaccggcgugcugacagagagcaacaagaaguuccugccauuccagcaguuuggccgggauaucgccgauaccacagacgccguuagagauccccagacacuggaaauccuggacaucaccccuugcagcuucggcggagugucugugaucaccccuggcaccaacaccagcaaucagguggcagugcuguaccaggacgugaacuguaccgaagugcccguggccauucacgccgaucagcugacaccuacauggcggguguacuccaccggcagcaauguguuucagaccagagccggcugucugaucggagccgagcacgugaacaauagcuacgagugcgacauccccaucggcgcuggaaucugcgccagcuaccagacacagacaaacagcccucggagagccagaagcguggccagccagagcaucauugccuacacaaugucucugggcgccgagaacagcguggccuacuccaacaacucuaucgcuauccccaccaacuucaccaucagcgugaccacagagauccugccuguguccaugaccaagaccagcguggacugcaccauguacaucugcggcgauuccaccgagugcuccaaccugcugcugcaguacggcagcuucugcacccagcugaauagagcccugacagggaucgccguggaacaggacaagaacacccaagagguguucgcccaagugaagcagaucuacaagaccccuccuaucaaggacuucggcggcuucaauuucagccagauucugcccgauccuagcaagcccagcaagcggagcuucaucgaggaccugcuguucaacaaagugacacuggccgacgccggcuucaucaagcaguauggcgauugucugggcgacauugccgccagggaucugauuugcgcccagaaguuuaacggacugacagugcugccuccucugcugaccgaugagaugaucgcccaguacacaucugcccugcuggccggcacaaucacaagcggcuggacauuuggagcaggcgccgcucugcagauccccuuugcuaugcagauggccuaccgguucaacggcaucggagugacccagaaugugcuguacgagaaccagaagcugaucgccaaccaguucaacagcgccaucggcaagauccaggacagccugagcagcacagcaagcgcccugggaaagcugcaggacguggucaaccagaaugcccaggcacugaacacccuggucaagcagcuguccuccaacuucggcgccaucagcucugugcugaacgauauccugagcagacuggacccuccugaggccgaggugcagaucgacagacugaucacaggcagacugcagagccuccagacauacgugacccagcagcugaucagagccgccgagauuagagccucugccaaucuggccgccaccaagaugucugagugugugcugggccagagcaagagaguggacuuuugcggcaagggcuaccaccugaugagcuucccucagucugccccucacggcgugguguuucugcacgugacauaugugcccgcucaagagaagaauuucaccaccgcuccagccaucugccacgacggcaaagcccacuuuccuagagaaggcguguucguguccaacggcacccauugguucgugacacagcggaacuucuacgagccccagaucaucaccaccgacaacaccuucgugucuggcaacugcgacgucgugaucggcauugugaacaauaccguguacgacccucugcagcccgagcuggacagcuucaaagaggaacuggacaaguacuuuaagaaccacacaagccccgacguggaccugggcgauaucagcggaaucaaugccagcgucgugaacauccagaaagagaucgaccggcugaacgagguggccaagaaucugaacgagagccugaucgaccugcaagaacuggggaaguacgagcaguacaucaaguggcccugguacaucuggcugggcuuuaucgccggacugauugccaucgugauggucacaaucaugcuguguugcaugaccagcugcuguagcugccugaagggcuguuguagcuguggcagcugcugcaaguucgacgaggacgauucugagcccgugcugaagggcgugaaacugcacuacacaugaggacuaguguccaccugucccuccugggcugcuggauugucucguuuuccugccaaauaaacaggaucagcgcuuuacagaucuaaaaaaaaaaaaaaaaaaaaaaaaaaaaaaaaaaaaaaaaaaaaaaaaaaaaaaaaaaaaaaaaaaaaaaaaaaaaaaaaaaaaaaaaaaaaaaaaaaaa

SEQ ID NO: 25368 - RNA, 4105 nt, Artificial Sequence
  SARS-CoV-2/Wuhan/WIV05/2019__EPI_ISL_402128 spike protein mRNA gc mod (1-1273)(K986P_V987P_ D614G)
aggagacccgugacccggaaguuguacggcuacgcgacuuucccucccacaaacccucgcgcccuuccuuuccuacuugggcccggcagaaagcuuaccauguucguguuccuggugcugcugccucugguguccagccagugugugaaccugaccaccagaacacagcugccuccagccuacaccaacagcuuuaccagaggcguguacuaccccgacaagguguucagauccagcgugcugcacucuacccaggaccuguuccugccuuucuucagcaacgugaccugguuccacgccauccacguguccggcaccaauggcaccaagagauucgacaaccccgugcugcccuucaacgacgggguguacuuugccagcaccgagaaguccaacaucaucagaggcuggaucuucggcaccacacuggacagcaagacccagagccugcugaucgugaacaacgccaccaacguggucaucaaagugugcgaguuccaguucugcaacgaccccuuccugggcgucuacuaccacaagaacaacaagagcuggauggaaagcgaguuccggguguacagcagcgccaacaacugcaccuucgaguacgugucccagccuuuccugauggaccuggaaggcaagcagggcaacuucaagaaccugcgcgaguucguguuuaagaacaucgacggcuacuucaagaucuacagcaagcacaccccuaucaaccucgugcgggaucugccucagggcuucucugcucuggaaccccugguggaucugcccaucggcaucaacaucacccgguuucagacacugcuggcccugcacagaagcuaccugacaccuggcgauagcagcagcggauggacagcuggugccgccgcuuacuaugugggcuaccugcagccuagaaccuuccugcugaaguacaacgagaacggcaccaucaccgacgccguggauugugcucuggauccucugagcgagacaaagugcacccugaaguccuucaccguggaaaagggcaucuaccagaccagcaacuuccgggugcagcccaccgaauccaucgugcgguuccccaauaucaccaaucugugccccuucggcgagguguucaaugccaccagauucgccucuguguacgccuggaaccggaagcggaucagcaauugcguggccgacuacuccgugcuguacaacuccgccagcuucagcaccuucaagugcuacggcguguccccuaccaagcugaacgaccugugcuucacaaacguguacgccgacagcuucgugauccggggagaugaagugcggcagauugccccuggacagacaggcaagaucgccgacuacaacuacaagcugcccgacgacuucaccggcugugugauugccuggaacagcaacaaccuggacuccaaagucggcggcaacuacaauuaccuguaccggcuguuccggaaguccaaucugaagcccuucgagcgggacaucuccaccgagaucuaucaggccggcagcaccccuuguaacggcguggaaggcuucaacugcuacuucccacugcaguccuacggcuuucagcccacaaauggcgugggcuaucagcccuacagagugguggugcugagcuucgaacugcugcaugccccugccacagugugcggcccuaagaaaagcaccaaucucgugaagaacaaaugcgugaacuucaacuucaacggccugaccggcaccggcgugcugacagagagcaacaagaaguuccugccauuccagcaguuuggccgggauaucgccgauaccacagacgccguuagagauccccagacacuggaaauccuggacaucaccccuugcagcuucggcggagugucugugaucaccccuggcaccaacaccagcaaucagguggcagugcuguaccagggcgugaacuguaccgaagugcccguggccauucacgccgaucagcugacaccuacauggcggguguacuccaccggcagcaauguguuucagaccagagccggcugucugaucggagccgagcacgugaacaauagcuacgagugcgacauccccaucggcgcuggaaucugcgccagcuaccagacacagacaaacagcccucggagagccagaagcguggccagccagagcaucauugccuacacaaugucucugggcgccgagaacagcguggccuacuccaacaacucuaucgcuauccccaccaacuucaccaucagcgugaccacagagauccugccuguguccaugaccaagaccagcguggacugcaccauguacaucugcggcgauuccaccgagugcuccaaccugcugcugcaguacggcagcuucugcacccagcugaauagagcccugacagggaucgccguggaacaggacaagaacacccaagagguguucgcccaagugaagcagaucuacaagaccccuccuaucaaggacuucggcggcuucaauuucagccagauucugcccgauccuagcaagcccagcaagcggagcuucaucgaggaccugcuguucaacaaagugacacuggccgacgccggcuucaucaagcaguauggcgauugucugggcgacauugccgccagggaucugauuugcgcccagaaguuuaacggacugacagugcugccuccucugcugaccgaugagaugaucgcccaguacacaucugcccugcuggccggcacaaucacaagcggcuggacauuuggagcaggcgccgcucugcagauccccuuugcuaugcagauggccuaccgguucaacggcaucggagugacccagaaugugcuguacgagaaccagaagcugaucgccaaccaguucaacagcgccaucggcaagauccaggacagccugagcagcacagcaagcgcccugggaaagcugcaggacguggucaaccagaaugcccaggcacugaacacccuggucaagcagcuguccuccaacuucggcgccaucagcucugugcugaacgauauccugagcagacuggacccuccugaggccgaggugcagaucgacagacugaucacaggcagacugcagagccuccagacauacgugacccagcagcugaucagagccgccgagauuagagccucugccaaucuggccgccaccaagaugucugagugugugcugggccagagcaagagaguggacuuuugcggcaagggcuaccaccugaugagcuucccucagucugccccucacggcgugguguuucugcacgugacauaugugcccgcucaagagaagaauuucaccaccgcuccagccaucugccacgacggcaaagcccacuuuccuagagaaggcguguucguguccaacggcacccauugguucgugacacagcggaacuucuacgagccccagaucaucaccaccgacaacaccuucgugucuggcaacugcgacgucgugaucggcauugugaacaauaccguguacgacccucugcagcccgagcuggacagcuucaaagaggaacuggacaaguacuuuaagaaccacacaagccccgacguggaccugggcgauaucagcggaaucaaugccagcgucgugaacauccagaaagagaucgaccggcugaacgagguggccaagaaucugaacgagagccugaucgaccugcaagaacuggggaaguacgagcaguacaucaaguggcccugguacaucuggcugggcuuuaucgccggacugauugccaucgugauggucacaaucaugcuguguugcaugaccagcugcuguagcugccugaagggcuguuguagcuguggcagcugcugcaaguucgacgaggacgauucugagcccgugcugaagggcgugaaacugcacuacacaugaggacuaguguccaccugucccuccugggcugcuggauugucucguuuuccugccaaauaaacaggaucagcgcuuuacagaucuaaaaaaaaaaaaaaaaaaaaaaaaaaaaaaaaaaaaaaaaaaaaaaaaaaaaaaaaaaaaaaaaaaaaaaaaaaaaaaaaaaaaaaaaaaaaaaaaaaaa

SEQ ID NO: 25369 - RNA, 4105 nt, Artificial Sequence
  SARS-CoV-2/Wuhan/WIV05/2019__EPI_ISL_402128 spike protein mRNA gc mod (1-1273)(K986P_V987P_A222V_D614G)
aggagacccgugacccggaaguuguacggcuacgcgacuuucccucccacaaacccucgcgcccuuccuuuccuacuugggcccggcagaaagcuuaccauguucguguuccuggugcugcugccucugguguccagccagugugugaaccugaccaccagaacacagcugccuccagccuacaccaacagcuuuaccagaggcguguacuaccccgacaagguguucagauccagcgugcugcacucuacccaggaccuguuccugccuuucuucagcaacgugaccugguuccacgccauccacguguccggcaccaauggcaccaagagauucgacaaccccgugcugcccuucaacgacgggguguacuuugccagcaccgagaaguccaacaucaucagaggcuggaucuucggcaccacacuggacagcaagacccagagccugcugaucgugaacaacgccaccaacguggucaucaaagugugcgaguuccaguucugcaacgaccccuuccugggcgucuacuaccacaagaacaacaagagcuggauggaaagcgaguuccggguguacagcagcgccaacaacugcaccuucgaguacgugucccagccuuuccugauggaccuggaaggcaagcagggcaacuucaagaaccugcgcgaguucguguuuaagaacaucgacggcuacuucaagaucuacagcaagcacaccccuaucaaccucgugcgggaucugccucagggcuucucugugcuggaaccccugguggaucugcccaucggcaucaacaucacccgguuucagacacugcuggcccugcacagaagcuaccugacaccuggcgauagcagcagcggauggacagcuggugccgccgcuuacuaugugggcuaccugcagccuagaaccuuccugcugaaguacaacgagaacggcaccaucaccgacgccguggauugugcucuggauccucugagcgagacaaagugcacccugaaguccuucaccguggaaaagggcaucuaccagaccagcaacuuccgggugcagcccaccgaauccaucgugcgguuccccaauaucaccaaucugugccccuucggcgagguguucaaugccaccagauucgccucuguguacgccuggaaccggaagcggaucagcaauugcguggccgacuacuccgugcuguacaacuccgccagcuucagcaccuucaagugcuacggcguguccccuaccaagcugaacgaccugugcuucacaaacguguacgccgacagcuucgugauccggggagaugaagugcggcagauugccccuggacagacaggcaagaucgccgacuacaacuacaagcugcccgacgacuucaccggcugugugauugccuggaacagcaacaaccuggacuccaaagucggcggcaacuacaauuaccuguaccggcuguuccggaaguccaaucugaagcccuucgagcgggacaucuccaccgagaucuaucaggccggcagcaccccuuguaacggcguggaaggcuucaacugcuacuucccacugcaguccuacggcuuucagcccacaaauggcgugggcuaucagcccuacagagugguggugcugagcuucgaacugcugcaugccccugccacagugugcggcccuaagaaaagcaccaaucucgugaagaacaaaugcgugaacuucaacuucaacggccugaccggcaccggcgugcugacagagagcaacaagaaguuccugccauuccagcaguuuggccgggauaucgccgauaccacagacgccguuagagauccccagacacuggaaauccuggacaucaccccuugcagcuucggcggagugucugugaucaccccuggcaccaacaccagcaaucagguggcagugcuguaccagggcgugaacuguaccgaagugcccguggccauucacgccgaucagcugacaccuacauggcggguguacuccaccggcagcaauguguuucagaccagagccggcugucugaucggagccgagcacgugaacaauagcuacgagugcgacauccccaucggcgcuggaaucugcgccagcuaccagacacagacaaacagcccucggagagccagaagcguggccagccagagcaucauugccuacacaaugucucugggcgccgagaacagcguggccuacuccaacaacucuaucgcuauccccaccaacuucaccaucagcgugaccacagagauccugccuguguccaugaccaagaccagcguggacugcaccauguacaucugcggcgauuccaccgagugcuccaaccugcugcugcaguacggcagcuucugcacccagcugaauagagcccugacagggaucgccguggaacaggacaagaacacccaagagguguucgcccaagugaagcagaucuacaagaccccuccuaucaaggacuucggcggcuucaauuucagccagauucugcccgauccuagcaagcccagcaagcggagcuucaucgaggaccugcuguucaacaaagugacacuggccgacgccggcuucaucaagcaguauggcgauugucugggcgacauugccgccagggaucugauuugcgcccagaaguuuaacggacugacagugcugccuccucugcugaccgaugagaugaucgcccaguacacaucugcccugcuggccggcacaaucacaagcggcuggacauuuggagcaggcgccgcucugcagauccccuuugcuaugcagauggccuaccgguucaacggcaucggagugacccagaaugugcuguacgagaaccagaagcugaucgccaaccaguucaacagcgccaucggcaagauccaggacagccugagcagcacagcaagcgcccugggaaagcugcaggacguggucaaccagaaugcccaggcacugaacacccuggucaagcagcuguccuccaacuucggcgccaucagcucugugcugaacgauauccugagcagacuggacccuccugaggccgaggugcagaucgacagacugaucacaggcagacugcagagccuccagacauacgugacccagcagcugaucagagccgccgagauuagagccucugccaaucuggccgccaccaagaugucugagugugugcugggccagagcaagagaguggacuuuugcggcaagggcuaccaccugaugagcuucccucagucugccccucacggcgugguguuucugcacgugacauaugugcccgcucaagagaagaauuucaccaccgcuccagccaucugccacgacggcaaagcccacuuuccuagagaaggcguguucguguccaacggcacccauugguucgugacacagcggaacuucuacgagccccagaucaucaccaccgacaacaccuucgugucuggcaacugcgacgucgugaucggcauugugaacaauaccguguacgacccucugcagcccgagcuggacagcuucaaagaggaacuggacaaguacuuuaagaaccacacaagccccgacguggaccugggcgauaucagcggaaucaaugccagcgucgugaacauccagaaagagaucgaccggcugaacgagguggccaagaaucugaacgagagccugaucgaccugcaagaacuggggaaguacgagcaguacaucaaguggcccugguacaucuggcugggcuuuaucgccggacugauugccaucgugauggucacaaucaugcuguguugcaugaccagcugcuguagcugccugaagggcuguuguagcuguggcagcugcugcaaguucgacgaggacgauucugagcccgugcugaagggcgugaaacugcacuacacaugaggacuaguguccaccugucccuccugggcugcuggauugucucguuuuccugccaaauaaacaggaucagcgcuuuacagaucuaaaaaaaaaaaaaaaaaaaaaaaaaaaaaaaaaaaaaaaaaaaaaaaaaaaaaaaaaaaaaaaaaaaaaaaaaaaaaaaaaaaaaaaaaaaaaaaaaaaa

SEQ ID NO: 25370 - RNA, 4105 nt, Artificial Sequence
  SARS-CoV-2/Wuhan/WIV05/2019__EPI_ISL_402128 spike protein mRNA gc mod (1-1273)(K986P_V987P_N439K_D614G)
aggagacccgugacccggaaguuguacggcuacgcgacuuucccucccacaaacccucgcgcccuuccuuuccuacuugggcccggcagaaagcuuaccauguucguguuccuggugcugcugccucugguguccagccagugugugaaccugaccaccagaacacagcugccuccagccuacaccaacagcuuuaccagaggcguguacuaccccgacaagguguucagauccagcgugcugcacucuacccaggaccuguuccugccuuucuucagcaacgugaccugguuccacgccauccacguguccggcaccaauggcaccaagagauucgacaaccccgugcugcccuucaacgacgggguguacuuugccagcaccgagaaguccaacaucaucagaggcuggaucuucggcaccacacuggacagcaagacccagagccugcugaucgugaacaacgccaccaacguggucaucaaagugugcgaguuccaguucugcaacgaccccuuccugggcgucuacuaccacaagaacaacaagagcuggauggaaagcgaguuccggguguacagcagcgccaacaacugcaccuucgaguacgugucccagccuuuccugauggaccuggaaggcaagcagggcaacuucaagaaccugcgcgaguucguguuuaagaacaucgacggcuacuucaagaucuacagcaagcacaccccuaucaaccucgugcgggaucugccucagggcuucucugcucuggaaccccugguggaucugcccaucggcaucaacaucacccgguuucagacacugcuggcccugcacagaagcuaccugacaccuggcgauagcagcagcggauggacagcuggugccgccgcuuacuaugugggcuaccugcagccuagaaccuuccugcugaaguacaacgagaacggcaccaucaccgacgccguggauugugcucuggauccucugagcgagacaaagugcacccugaaguccuucaccguggaaaagggcaucuaccagaccagcaacuuccgggugcagcccaccgaauccaucgugcgguuccccaauaucaccaaucugugccccuucggcgagguguucaaugccaccagauucgccucuguguacgccuggaaccggaagcggaucagcaauugcguggccgacuacuccgugcuguacaacuccgccagcuucagcaccuucaagugcuacggcguguccccuaccaagcugaacgaccugugcuucacaaacguguacgccgacagcuucgugauccggggagaugaagugcggcagauugccccuggacagacaggcaagaucgccgacuacaacuacaagcugcccgacgacuucaccggcugugugauugccuggaacagcaagaaccuggacuccaaagucggcggcaacuacaauuaccuguaccggcuguuccggaaguccaaucugaagcccuucgagcgggacaucuccaccgagaucuaucaggccggcagcaccccuuguaacggcguggaaggcuucaacugcuacuucccacugcaguccuacggcuuucagcccacaaauggcgugggcuaucagcccuacagagugguggugcugagcuucgaacugcugcaugccccugccacagugugcggcccuaagaaaagcaccaaucucgugaagaacaaaugcgugaacuucaacuucaacggccugaccggcaccggcgugcugacagagagcaacaagaaguuccugccauuccagcaguuuggccgggauaucgccgauaccacagacgccguuagagauccccagacacuggaaauccuggacaucaccccuugcagcuucggcggagugucugugaucaccccuggcaccaacaccagcaaucagguggcagugcuguaccagggcgugaacuguaccgaagugcccguggccauucacgccgaucagcugacaccuacauggcggguguacuccaccggcagcaauguguuucagaccagagccggcugucugaucggagccgagcacgugaacaauagcuacgagugcgacauccccaucggcgcuggaaucugcgccagcuaccagacacagacaaacagcccucggagagccagaagcguggccagccagagcaucauugccuacacaaugucucugggcgccgagaacagcguggccuacuccaacaacucuaucgcuauccccaccaacuucaccaucagcgugaccacagagauccugccuguguccaugaccaagaccagcguggacugcaccauguacaucugcggcgauuccaccgagugcuccaaccugcugcugcaguacggcagcuucugcacccagcugaauagagcccugacagggaucgccguggaacaggacaagaacacccaagagguguucgcccaagugaagcagaucuacaagaccccuccuaucaaggacuucggcggcuucaauuucagccagauucugcccgauccuagcaagcccagcaagcggagcuucaucgaggaccugcuguucaacaaagugacacuggccgacgccggcuucaucaagcaguauggcgauugucugggcgacauugccgccagggaucugauuugcgcccagaaguuuaacggacugacagugcugccuccucugcugaccgaugagaugaucgcccaguacacaucugcccugcuggccggcacaaucacaagcggcuggacauuuggagcaggcgccgcucugcagauccccuuugcuaugcagauggccuaccgguucaacggcaucggagugacccagaaugugcuguacgagaaccagaagcugaucgccaaccaguucaacagcgccaucggcaagauccaggacagccugagcagcacagcaagcgcccugggaaagcugcaggacguggucaaccagaaugcccaggcacugaacacccuggucaagcagcuguccuccaacuucggcgccaucagcucugugcugaacgauauccugagcagacuggacccuccugaggccgaggugcagaucgacagacugaucacaggcagacugcagagccuccagacauacgugacccagcagcugaucagagccgccgagauuagagccucugccaaucuggccgccaccaagaugucugagugugugcugggccagagcaagagaguggacuuuugcggcaagggcuaccaccugaugagcuucccucagucugccccucacggcgugguguuucugcacgugacauaugugcccgcucaagagaagaauuucaccaccgcuccagccaucugccacgacggcaaagcccacuuuccuagagaaggcguguucguguccaacggcacccauugguucgugacacagcggaacuucuacgagccccagaucaucaccaccgacaacaccuucgugucuggcaacugcgacgucgugaucggcauugugaacaauaccguguacgacccucugcagcccgagcuggacagcuucaaagaggaacuggacaaguacuuuaagaaccacacaagccccgacguggaccugggcgauaucagcggaaucaaugccagcgucgugaacauccagaaagagaucgaccggcugaacgagguggccaagaaucugaacgagagccugaucgaccugcaagaacuggggaaguacgagcaguacaucaaguggcccugguacaucuggcugggcuuuaucgccggacugauugccaucgugauggucacaaucaugcuguguugcaugaccagcugcuguagcugccugaagggcuguuguagcuguggcagcugcugcaaguucgacgaggacgauucugagcccgugcugaagggcgugaaacugcacuacacaugaggacuaguguccaccugucccuccugggcugcuggauugucucguuuuccugccaaauaaacaggaucagcgcuuuacagaucuaaaaaaaaaaaaaaaaaaaaaaaaaaaaaaaaaaaaaaaaaaaaaaaaaaaaaaaaaaaaaaaaaaaaaaaaaaaaaaaaaaaaaaaaaaaaaaaaaaaa

SEQ ID NO: 25371 - RNA, 4105 nt, Artificial Sequence
  SARS-CoV-2/Wuhan/WIV05/2019__EPI_ISL_402128 spike protein mRNA gc mod (1-1273)(K986P_V987P_S477N_D614G)
aggagacccgugacccggaaguuguacggcuacgcgacuuucccucccacaaacccucgcgcccuuccuuuccuacuugggcccggcagaaagcuuaccauguucguguuccuggugcugcugccucugguguccagccagugugugaaccugaccaccagaacacagcugccuccagccuacaccaacagcuuuaccagaggcguguacuaccccgacaagguguucagauccagcgugcugcacucuacccaggaccuguuccugccuuucuucagcaacgugaccugguuccacgccauccacguguccggcaccaauggcaccaagagauucgacaaccccgugcugcccuucaacgacgggguguacuuugccagcaccgagaaguccaacaucaucagaggcuggaucuucggcaccacacuggacagcaagacccagagccugcugaucgugaacaacgccaccaacguggucaucaaagugugcgaguuccaguucugcaacgaccccuuccugggcgucuacuaccacaagaacaacaagagcuggauggaaagcgaguuccggguguacagcagcgccaacaacugcaccuucgaguacgugucccagccuuuccugauggaccuggaaggcaagcagggcaacuucaagaaccugcgcgaguucguguuuaagaacaucgacggcuacuucaagaucuacagcaagcacaccccuaucaaccucgugcgggaucugccucagggcuucucugcucuggaaccccugguggaucugcccaucggcaucaacaucacccgguuucagacacugcuggcccugcacagaagcuaccugacaccuggcgauagcagcagcggauggacagcuggugccgccgcuuacuaugugggcuaccugcagccuagaaccuuccugcugaaguacaacgagaacggcaccaucaccgacgccguggauugugcucuggauccucugagcgagacaaagugcacccugaaguccuucaccguggaaaagggcaucuaccagaccagcaacuuccgggugcagcccaccgaauccaucgugcgguuccccaauaucaccaaucugugccccuucggcgagguguucaaugccaccagauucgccucuguguacgccuggaaccggaagcggaucagcaauugcguggccgacuacuccgugcuguacaacuccgccagcuucagcaccuucaagugcuacggcguguccccuaccaagcugaacgaccugugcuucacaaacguguacgccgacagcuucgugauccggggagaugaagugcggcagauugccccuggacagacaggcaagaucgccgacuacaacuacaagcugcccgacgacuucaccggcugugugauugccuggaacagcaacaaccuggacuccaaagucggcggcaacuacaauuaccuguaccggcuguuccggaaguccaaucugaagcccuucgagcgggacaucuccaccgagaucuaucaggccggcaacaccccuuguaacggcguggaaggcuucaacugcuacuucccacugcaguccuacggcuuucagcccacaaauggcgugggcuaucagcccuacagagugguggugcugagcuucgaacugcugcaugccccugccacagugugcggcccuaagaaaagcaccaaucucgugaagaacaaaugcgugaacuucaacuucaacggccugaccggcaccggcgugcugacagagagcaacaagaaguuccugccauuccagcaguuuggccgggauaucgccgauaccacagacgccguuagagauccccagacacuggaaauccuggacaucaccccuugcagcuucggcggagugucugugaucaccccuggcaccaacaccagcaaucagguggcagugcuguaccagggcgugaacuguaccgaagugcccguggccauucacgccgaucagcugacaccuacauggcggguguacuccaccggcagcaauguguuucagaccagagccggcugucugaucggagccgagcacgugaacaauagcuacgagugcgacauccccaucggcgcuggaaucugcgccagcuaccagacacagacaaacagcccucggagagccagaagcguggccagccagagcaucauugccuacacaaugucucugggcgccgagaacagcguggccuacuccaacaacucuaucgcuauccccaccaacuucaccaucagcgugaccacagagauccugccuguguccaugaccaagaccagcguggacugcaccauguacaucugcggcgauuccaccgagugcuccaaccugcugcugcaguacggcagcuucugcacccagcugaauagagcccugacagggaucgccguggaacaggacaagaacacccaagagguguucgcccaagugaagcagaucuacaagaccccuccuaucaaggacuucggcggcuucaauuucagccagauucugcccgauccuagcaagcccagcaagcggagcuucaucgaggaccugcuguucaacaaagugacacuggccgacgccggcuucaucaagcaguauggcgauugucugggcgacauugccgccagggaucugauuugcgcccagaaguuuaacggacugacagugcugccuccucugcugaccgaugagaugaucgcccaguacacaucugcccugcuggccggcacaaucacaagcggcuggacauuuggagcaggcgccgcucugcagauccccuuugcuaugcagauggccuaccgguucaacggcaucggagugacccagaaugugcuguacgagaaccagaagcugaucgccaaccaguucaacagcgccaucggcaagauccaggacagccugagcagcacagcaagcgcccugggaaagcugcaggacguggucaaccagaaugcccaggcacugaacacccuggucaagcagcuguccuccaacuucggcgccaucagcucugugcugaacgauauccugagcagacuggacccuccugaggccgaggugcagaucgacagacugaucacaggcagacugcagagccuccagacauacgugacccagcagcugaucagagccgccgagauuagagccucugccaaucuggccgccaccaagaugucugagugugugcugggccagagcaagagaguggacuuuugcggcaagggcuaccaccugaugagcuucccucagucugccccucacggcgugguguuucugcacgugacauaugugcccgcucaagagaagaauuucaccaccgcuccagccaucugccacgacggcaaagcccacuuuccuagagaaggcguguucguguccaacggcacccauugguucgugacacagcggaacuucuacgagccccagaucaucaccaccgacaacaccuucgugucuggcaacugcgacgucgugaucggcauugugaacaauaccguguacgacccucugcagcccgagcuggacagcuucaaagaggaacuggacaaguacuuuaagaaccacacaagccccgacguggaccugggcgauaucagcggaaucaaugccagcgucgugaacauccagaaagagaucgaccggcugaacgagguggccaagaaucugaacgagagccugaucgaccugcaagaacuggggaaguacgagcaguacaucaaguggcccugguacaucuggcugggcuuuaucgccggacugauugccaucgugauggucacaaucaugcuguguugcaugaccagcugcuguagcugccugaagggcuguuguagcuguggcagcugcugcaaguucgacgaggacgauucugagcccgugcugaagggcgugaaacugcacuacacaugaggacuaguguccaccugucccuccugggcugcuggauugucucguuuuccugccaaauaaacaggaucagcgcuuuacagaucuaaaaaaaaaaaaaaaaaaaaaaaaaaaaaaaaaaaaaaaaaaaaaaaaaaaaaaaaaaaaaaaaaaaaaaaaaaaaaaaaaaaaaaaaaaaaaaaaaaaa

SEQ ID NO: 25372 - RNA, 4105 nt, Artificial Sequence
  SARS-CoV-2/Wuhan/WIV05/2019__EPI_ISL_402128 spike protein mRNA gc mod (1-1273)(K986P_V987P_N501Y_D614G)
aggagacccgugacccggaaguuguacggcuacgcgacuuucccucccacaaacccucgcgcccuuccuuuccuacuugggcccggcagaaagcuuaccauguucguguuccuggugcugcugccucugguguccagccagugugugaaccugaccaccagaacacagcugccuccagccuacaccaacagcuuuaccagaggcguguacuaccccgacaagguguucagauccagcgugcugcacucuacccaggaccuguuccugccuuucuucagcaacgugaccugguuccacgccauccacguguccggcaccaauggcaccaagagauucgacaaccccgugcugcccuucaacgacgggguguacuuugccagcaccgagaaguccaacaucaucagaggcuggaucuucggcaccacacuggacagcaagacccagagccugcugaucgugaacaacgccaccaacguggucaucaaagugugcgaguuccaguucugcaacgaccccuuccugggcgucuacuaccacaagaacaacaagagcuggauggaaagcgaguuccggguguacagcagcgccaacaacugcaccuucgaguacgugucccagccuuuccugauggaccuggaaggcaagcagggcaacuucaagaaccugcgcgaguucguguuuaagaacaucgacggcuacuucaagaucuacagcaagcacaccccuaucaaccucgugcgggaucugccucagggcuucucugcucuggaaccccugguggaucugcccaucggcaucaacaucacccgguuucagacacugcuggcccugcacagaagcuaccugacaccuggcgauagcagcagcggauggacagcuggugccgccgcuuacuaugugggcuaccugcagccuagaaccuuccugcugaaguacaacgagaacggcaccaucaccgacgccguggauugugcucuggauccucugagcgagacaaagugcacccugaaguccuucaccguggaaaagggcaucuaccagaccagcaacuuccgggugcagcccaccgaauccaucgugcgguuccccaauaucaccaaucugugccccuucggcgagguguucaaugccaccagauucgccucuguguacgccuggaaccggaagcggaucagcaauugcguggccgacuacuccgugcuguacaacuccgccagcuucagcaccuucaagugcuacggcguguccccuaccaagcugaacgaccugugcuucacaaacguguacgccgacagcuucgugauccggggagaugaagugcggcagauugccccuggacagacaggcaagaucgccgacuacaacuacaagcugcccgacgacuucaccggcugugugauugccuggaacagcaacaaccuggacuccaaagucggcggcaacuacaauuaccuguaccggcuguuccggaaguccaaucugaagcccuucgagcgggacaucuccaccgagaucuaucaggccggcagcaccccuuguaacggcguggaaggcuucaacugcuacuucccacugcaguccuacggcuuucagcccacauacggcgugggcuaucagcccuacagagugguggugcugagcuucgaacugcugcaugccccugccacagugugcggcccuaagaaaagcaccaaucucgugaagaacaaaugcgugaacuucaacuucaacggccugaccggcaccggcgugcugacagagagcaacaagaaguuccugccauuccagcaguuuggccgggauaucgccgauaccacagacgccguuagagauccccagacacuggaaauccuggacaucaccccuugcagcuucggcggagugucugugaucaccccuggcaccaacaccagcaaucagguggcagugcuguaccagggcgugaacuguaccgaagugcccguggccauucacgccgaucagcugacaccuacauggcggguguacuccaccggcagcaauguguuucagaccagagccggcugucugaucggagccgagcacgugaacaauagcuacgagugcgacauccccaucggcgcuggaaucugcgccagcuaccagacacagacaaacagcccucggagagccagaagcguggccagccagagcaucauugccuacacaaugucucugggcgccgagaacagcguggccuacuccaacaacucuaucgcuauccccaccaacuucaccaucagcgugaccacagagauccugccuguguccaugaccaagaccagcguggacugcaccauguacaucugcggcgauuccaccgagugcuccaaccugcugcugcaguacggcagcuucugcacccagcugaauagagcccugacagggaucgccguggaacaggacaagaacacccaagagguguucgcccaagugaagcagaucuacaagaccccuccuaucaaggacuucggcggcuucaauuucagccagauucugcccgauccuagcaagcccagcaagcggagcuucaucgaggaccugcuguucaacaaagugacacuggccgacgccggcuucaucaagcaguauggcgauugucugggcgacauugccgccagggaucugauuugcgcccagaaguuuaacggacugacagugcugccuccucugcugaccgaugagaugaucgcccaguacacaucugcccugcuggccggcacaaucacaagcggcuggacauuuggagcaggcgccgcucugcagauccccuuugcuaugcagauggccuaccgguucaacggcaucggagugacccagaaugugcuguacgagaaccagaagcugaucgccaaccaguucaacagcgccaucggcaagauccaggacagccugagcagcacagcaagcgcccugggaaagcugcaggacguggucaaccagaaugcccaggcacugaacacccuggucaagcagcuguccuccaacuucggcgccaucagcucugugcugaacgauauccugagcagacuggacccuccugaggccgaggugcagaucgacagacugaucacaggcagacugcagagccuccagacauacgugacccagcagcugaucagagccgccgagauuagagccucugccaaucuggccgccaccaagaugucugagugugugcugggccagagcaagagaguggacuuuugcggcaagggcuaccaccugaugagcuucccucagucugccccucacggcgugguguuucugcacgugacauaugugcccgcucaagagaagaauuucaccaccgcuccagccaucugccacgacggcaaagcccacuuuccuagagaaggcguguucguguccaacggcacccauugguucgugacacagcggaacuucuacgagccccagaucaucaccaccgacaacaccuucgugucuggcaacugcgacgucgugaucggcauugugaacaauaccguguacgacccucugcagcccgagcuggacagcuucaaagaggaacuggacaaguacuuuaagaaccacacaagccccgacguggaccugggcgauaucagcggaaucaaugccagcgucgugaacauccagaaagagaucgaccggcugaacgagguggccaagaaucugaacgagagccugaucgaccugcaagaacuggggaaguacgagcaguacaucaaguggcccugguacaucuggcugggcuuuaucgccggacugauugccaucgugauggucacaaucaugcuguguugcaugaccagcugcuguagcugccugaagggcuguuguagcuguggcagcugcugcaaguucgacgaggacgauucugagcccgugcugaagggcgugaaacugcacuacacaugaggacuaguguccaccugucccuccugggcugcuggauugucucguuuuccugccaaauaaacaggaucagcgcuuuacagaucuaaaaaaaaaaaaaaaaaaaaaaaaaaaaaaaaaaaaaaaaaaaaaaaaaaaaaaaaaaaaaaaaaaaaaaaaaaaaaaaaaaaaaaaaaaaaaaaaaaaa

SEQ ID NO: 25373 - RNA, 4099 nt, Artificial Sequence
  SARS-CoV-2/Wuhan/WIV05/2019__EPI_ISL_402128 spike protein mRNA gc mod (1-1273)(K986P_V987P_H69del_V70del_D614G)
aggagacccgugacccggaaguuguacggcuacgcgacuuucccucccacaaacccucgcgcccuuccuuuccuacuugggcccggcagaaagcuuaccauguucguguuccuggugcugcugccucugguguccagccagugugugaaccugaccaccagaacacagcugccuccagccuacaccaacagcuuuaccagaggcguguacuaccccgacaagguguucagauccagcgugcugcacucuacccaggaccuguuccugccuuucuucagcaacgugaccugguuccacgccaucuccggcaccaauggcaccaagagauucgacaaccccgugcugcccuucaacgacgggguguacuuugccagcaccgagaaguccaacaucaucagaggcuggaucuucggcaccacacuggacagcaagacccagagccugcugaucgugaacaacgccaccaacguggucaucaaagugugcgaguuccaguucugcaacgaccccuuccugggcgucuacuaccacaagaacaacaagagcuggauggaaagcgaguuccggguguacagcagcgccaacaacugcaccuucgaguacgugucccagccuuuccugauggaccuggaaggcaagcagggcaacuucaagaaccugcgcgaguucguguuuaagaacaucgacggcuacuucaagaucuacagcaagcacaccccuaucaaccucgugcgggaucugccucagggcuucucugcucuggaaccccugguggaucugcccaucggcaucaacaucacccgguuucagacacugcuggcccugcacagaagcuaccugacaccuggcgauagcagcagcggauggacagcuggugccgccgcuuacuaugugggcuaccugcagccuagaaccuuccugcugaaguacaacgagaacggcaccaucaccgacgccguggauugugcucuggauccucugagcgagacaaagugcacccugaaguccuucaccguggaaaagggcaucuaccagaccagcaacuuccgggugcagcccaccgaauccaucgugcgguuccccaauaucaccaaucugugccccuucggcgagguguucaaugccaccagauucgccucuguguacgccuggaaccggaagcggaucagcaauugcguggccgacuacuccgugcuguacaacuccgccagcuucagcaccuucaagugcuacggcguguccccuaccaagcugaacgaccugugcuucacaaacguguacgccgacagcuucgugauccggggagaugaagugcggcagauugccccuggacagacaggcaagaucgccgacuacaacuacaagcugcccgacgacuucaccggcugugugauugccuggaacagcaacaaccuggacuccaaagucggcggcaacuacaauuaccuguaccggcuguuccggaaguccaaucugaagcccuucgagcgggacaucuccaccgagaucuaucaggccggcagcaccccuuguaacggcguggaaggcuucaacugcuacuucccacugcaguccuacggcuuucagcccacaaauggcgugggcuaucagcccuacagagugguggugcugagcuucgaacugcugcaugccccugccacagugugcggcccuaagaaaagcaccaaucucgugaagaacaaaugcgugaacuucaacuucaacggccugaccggcaccggcgugcugacagagagcaacaagaaguuccugccauuccagcaguuuggccgggauaucgccgauaccacagacgccguuagagauccccagacacuggaaauccuggacaucaccccuugcagcuucggcggagugucugugaucaccccuggcaccaacaccagcaaucagguggcagugcuguaccagggcgugaacuguaccgaagugcccguggccauucacgccgaucagcugacaccuacauggcggguguacuccaccggcagcaauguguuucagaccagagccggcugucugaucggagccgagcacgugaacaauagcuacgagugcgacauccccaucggcgcuggaaucugcgccagcuaccagacacagacaaacagcccucggagagccagaagcguggccagccagagcaucauugccuacacaaugucucugggcgccgagaacagcguggccuacuccaacaacucuaucgcuauccccaccaacuucaccaucagcgugaccacagagauccugccuguguccaugaccaagaccagcguggacugcaccauguacaucugcggcgauuccaccgagugcuccaaccugcugcugcaguacggcagcuucugcacccagcugaauagagcccugacagggaucgccguggaacaggacaagaacacccaagagguguucgcccaagugaagcagaucuacaagaccccuccuaucaaggacuucggcggcuucaauuucagccagauucugcccgauccuagcaagcccagcaagcggagcuucaucgaggaccugcuguucaacaaagugacacuggccgacgccggcuucaucaagcaguauggcgauugucugggcgacauugccgccagggaucugauuugcgcccagaaguuuaacggacugacagugcugccuccucugcugaccgaugagaugaucgcccaguacacaucugcccugcuggccggcacaaucacaagcggcuggacauuuggagcaggcgccgcucugcagauccccuuugcuaugcagauggccuaccgguucaacggcaucggagugacccagaaugugcuguacgagaaccagaagcugaucgccaaccaguucaacagcgccaucggcaagauccaggacagccugagcagcacagcaagcgcccugggaaagcugcaggacguggucaaccagaaugcccaggcacugaacacccuggucaagcagcuguccuccaacuucggcgccaucagcucugugcugaacgauauccugagcagacuggacccuccugaggccgaggugcagaucgacagacugaucacaggcagacugcagagccuccagacauacgugacccagcagcugaucagagccgccgagauuagagccucugccaaucuggccgccaccaagaugucugagugugugcugggccagagcaagagaguggacuuuugcggcaagggcuaccaccugaugagcuucccucagucugccccucacggcgugguguuucugcacgugacauaugugcccgcucaagagaagaauuucaccaccgcuccagccaucugccacgacggcaaagcccacuuuccuagagaaggcguguucguguccaacggcacccauugguucgugacacagcggaacuucuacgagccccagaucaucaccaccgacaacaccuucgugucuggcaacugcgacgucgugaucggcauugugaacaauaccguguacgacccucugcagcccgagcuggacagcuucaaagaggaacuggacaaguacuuuaagaaccacacaagccccgacguggaccugggcgauaucagcggaaucaaugccagcgucgugaacauccagaaagagaucgaccggcugaacgagguggccaagaaucugaacgagagccugaucgaccugcaagaacuggggaaguacgagcaguacaucaaguggcccugguacaucuggcugggcuuuaucgccggacugauugccaucgugauggucacaaucaugcuguguugcaugaccagcugcuguagcugccugaagggcuguuguagcuguggcagcugcugcaaguucgacgaggacgauucugagcccgugcugaagggcgugaaacugcacuacacaugaggacuaguguccaccugucccuccugggcugcuggauugucucguuuuccugccaaauaaacaggaucagcgcuuuacagaucuaaaaaaaaaaaaaaaaaaaaaaaaaaaaaaaaaaaaaaaaaaaaaaaaaaaaaaaaaaaaaaaaaaaaaaaaaaaaaaaaaaaaaaaaaaaaaaaaaaaa

SEQ ID NO: 25374 - RNA, 4105 nt, Artificial Sequence
  SARS-CoV-2/Wuhan/WIV05/2019__EPI_ISL_402128 spike protein mRNA gc mod (1-1273)(K986P_V987P_Y453F_D614G)
aggagacccgugacccggaaguuguacggcuacgcgacuuucccucccacaaacccucgcgcccuuccuuuccuacuugggcccggcagaaagcuuaccauguucguguuccuggugcugcugccucugguguccagccagugugugaaccugaccaccagaacacagcugccuccagccuacaccaacagcuuuaccagaggcguguacuaccccgacaagguguucagauccagcgugcugcacucuacccaggaccuguuccugccuuucuucagcaacgugaccugguuccacgccauccacguguccggcaccaauggcaccaagagauucgacaaccccgugcugcccuucaacgacgggguguacuuugccagcaccgagaaguccaacaucaucagaggcuggaucuucggcaccacacuggacagcaagacccagagccugcugaucgugaacaacgccaccaacguggucaucaaagugugcgaguuccaguucugcaacgaccccuuccugggcgucuacuaccacaagaacaacaagagcuggauggaaagcgaguuccggguguacagcagcgccaacaacugcaccuucgaguacgugucccagccuuuccugauggaccuggaaggcaagcagggcaacuucaagaaccugcgcgaguucguguuuaagaacaucgacggcuacuucaagaucuacagcaagcacaccccuaucaaccucgugcgggaucugccucagggcuucucugcucuggaaccccugguggaucugcccaucggcaucaacaucacccgguuucagacacugcuggcccugcacagaagcuaccugacaccuggcgauagcagcagcggauggacagcuggugccgccgcuuacuaugugggcuaccugcagccuagaaccuuccugcugaaguacaacgagaacggcaccaucaccgacgccguggauugugcucuggauccucugagcgagacaaagugcacccugaaguccuucaccguggaaaagggcaucuaccagaccagcaacuuccgggugcagcccaccgaauccaucgugcgguuccccaauaucaccaaucugugccccuucggcgagguguucaaugccaccagauucgccucuguguacgccuggaaccggaagcggaucagcaauugcguggccgacuacuccgugcuguacaacuccgccagcuucagcaccuucaagugcuacggcguguccccuaccaagcugaacgaccugugcuucacaaacguguacgccgacagcuucgugauccggggagaugaagugcggcagauugccccuggacagacaggcaagaucgccgacuacaacuacaagcugcccgacgacuucaccggcugugugauugccuggaacagcaacaaccuggacuccaaagucggcggcaacuacaauuaccuguuccggcuguuccggaaguccaaucugaagcccuucgagcgggacaucuccaccgagaucuaucaggccggcagcaccccuuguaacggcguggaaggcuucaacugcuacuucccacugcaguccuacggcuuucagcccacaaauggcgugggcuaucagcccuacagagugguggugcugagcuucgaacugcugcaugccccugccacagugugcggcccuaagaaaagcaccaaucucgugaagaacaaaugcgugaacuucaacuucaacggccugaccggcaccggcgugcugacagagagcaacaagaaguuccugccauuccagcaguuuggccgggauaucgccgauaccacagacgccguuagagauccccagacacuggaaauccuggacaucaccccuugcagcuucggcggagugucugugaucaccccuggcaccaacaccagcaaucagguggcagugcuguaccagggcgugaacuguaccgaagugcccguggccauucacgccgaucagcugacaccuacauggcggguguacuccaccggcagcaauguguuucagaccagagccggcugucugaucggagccgagcacgugaacaauagcuacgagugcgacauccccaucggcgcuggaaucugcgccagcuaccagacacagacaaacagcccucggagagccagaagcguggccagccagagcaucauugccuacacaaugucucugggcgccgagaacagcguggccuacuccaacaacucuaucgcuauccccaccaacuucaccaucagcgugaccacagagauccugccuguguccaugaccaagaccagcguggacugcaccauguacaucugcggcgauuccaccgagugcuccaaccugcugcugcaguacggcagcuucugcacccagcugaauagagcccugacagggaucgccguggaacaggacaagaacacccaagagguguucgcccaagugaagcagaucuacaagaccccuccuaucaaggacuucggcggcuucaauuucagccagauucugcccgauccuagcaagcccagcaagcggagcuucaucgaggaccugcuguucaacaaagugacacuggccgacgccggcuucaucaagcaguauggcgauugucugggcgacauugccgccagggaucugauuugcgcccagaaguuuaacggacugacagugcugccuccucugcugaccgaugagaugaucgcccaguacacaucugcccugcuggccggcacaaucacaagcggcuggacauuuggagcaggcgccgcucugcagauccccuuugcuaugcagauggccuaccgguucaacggcaucggagugacccagaaugugcuguacgagaaccagaagcugaucgccaaccaguucaacagcgccaucggcaagauccaggacagccugagcagcacagcaagcgcccugggaaagcugcaggacguggucaaccagaaugcccaggcacugaacacccuggucaagcagcuguccuccaacuucggcgccaucagcucugugcugaacgauauccugagcagacuggacccuccugaggccgaggugcagaucgacagacugaucacaggcagacugcagagccuccagacauacgugacccagcagcugaucagagccgccgagauuagagccucugccaaucuggccgccaccaagaugucugagugugugcugggccagagcaagagaguggacuuuugcggcaagggcuaccaccugaugagcuucccucagucugccccucacggcgugguguuucugcacgugacauaugugcccgcucaagagaagaauuucaccaccgcuccagccaucugccacgacggcaaagcccacuuuccuagagaaggcguguucguguccaacggcacccauugguucgugacacagcggaacuucuacgagccccagaucaucaccaccgacaacaccuucgugucuggcaacugcgacgucgugaucggcauugugaacaauaccguguacgacccucugcagcccgagcuggacagcuucaaagaggaacuggacaaguacuuuaagaaccacacaagccccgacguggaccugggcgauaucagcggaaucaaugccagcgucgugaacauccagaaagagaucgaccggcugaacgagguggccaagaaucugaacgagagccugaucgaccugcaagaacuggggaaguacgagcaguacaucaaguggcccugguacaucuggcugggcuuuaucgccggacugauugccaucgugauggucacaaucaugcuguguugcaugaccagcugcuguagcugccugaagggcuguuguagcuguggcagcugcugcaaguucgacgaggacgauucugagcccgugcugaagggcgugaaacugcacuacacaugaggacuaguguccaccugucccuccugggcugcuggauugucucguuuuccugccaaauaaacaggaucagcgcuuuacagaucuaaaaaaaaaaaaaaaaaaaaaaaaaaaaaaaaaaaaaaaaaaaaaaaaaaaaaaaaaaaaaaaaaaaaaaaaaaaaaaaaaaaaaaaaaaaaaaaaaaaa

SEQ ID NO: 25375 - RNA, 4105 nt, Artificial Sequence
  SARS-CoV-2/Wuhan/WIV05/2019__EPI_ISL_402128 spike protein mRNA gc mod (1-1273)(K986P_V987P_D614G_I692V)
aggagacccgugacccggaaguuguacggcuacgcgacuuucccucccacaaacccucgcgcccuuccuuuccuacuugggcccggcagaaagcuuaccauguucguguuccuggugcugcugccucugguguccagccagugugugaaccugaccaccagaacacagcugccuccagccuacaccaacagcuuuaccagaggcguguacuaccccgacaagguguucagauccagcgugcugcacucuacccaggaccuguuccugccuuucuucagcaacgugaccugguuccacgccauccacguguccggcaccaauggcaccaagagauucgacaaccccgugcugcccuucaacgacgggguguacuuugccagcaccgagaaguccaacaucaucagaggcuggaucuucggcaccacacuggacagcaagacccagagccugcugaucgugaacaacgccaccaacguggucaucaaagugugcgaguuccaguucugcaacgaccccuuccugggcgucuacuaccacaagaacaacaagagcuggauggaaagcgaguuccggguguacagcagcgccaacaacugcaccuucgaguacgugucccagccuuuccugauggaccuggaaggcaagcagggcaacuucaagaaccugcgcgaguucguguuuaagaacaucgacggcuacuucaagaucuacagcaagcacaccccuaucaaccucgugcgggaucugccucagggcuucucugcucuggaaccccugguggaucugcccaucggcaucaacaucacccgguuucagacacugcuggcccugcacagaagcuaccugacaccuggcgauagcagcagcggauggacagcuggugccgccgcuuacuaugugggcuaccugcagccuagaaccuuccugcugaaguacaacgagaacggcaccaucaccgacgccguggauugugcucuggauccucugagcgagacaaagugcacccugaaguccuucaccguggaaaagggcaucuaccagaccagcaacuuccgggugcagcccaccgaauccaucgugcgguuccccaauaucaccaaucugugccccuucggcgagguguucaaugccaccagauucgccucuguguacgccuggaaccggaagcggaucagcaauugcguggccgacuacuccgugcuguacaacuccgccagcuucagcaccuucaagugcuacggcguguccccuaccaagcugaacgaccugugcuucacaaacguguacgccgacagcuucgugauccggggagaugaagugcggcagauugccccuggacagacaggcaagaucgccgacuacaacuacaagcugcccgacgacuucaccggcugugugauugccuggaacagcaacaaccuggacuccaaagucggcggcaacuacaauuaccuguaccggcuguuccggaaguccaaucugaagcccuucgagcgggacaucuccaccgagaucuaucaggccggcagcaccccuuguaacggcguggaaggcuucaacugcuacuucccacugcaguccuacggcuuucagcccacaaauggcgugggcuaucagcccuacagagugguggugcugagcuucgaacugcugcaugccccugccacagugugcggcccuaagaaaagcaccaaucucgugaagaacaaaugcgugaacuucaacuucaacggccugaccggcaccggcgugcugacagagagcaacaagaaguuccugccauuccagcaguuuggccgggauaucgccgauaccacagacgccguuagagauccccagacacuggaaauccuggacaucaccccuugcagcuucggcggagugucugugaucaccccuggcaccaacaccagcaaucagguggcagugcuguaccagggcgugaacuguaccgaagugcccguggccauucacgccgaucagcugacaccuacauggcggguguacuccaccggcagcaauguguuucagaccagagccggcugucugaucggagccgagcacgugaacaauagcuacgagugcgacauccccaucggcgcuggaaucugcgccagcuaccagacacagacaaacagcccucggagagccagaagcguggccagccagagcgugauugccuacacaaugucucugggcgccgagaacagcguggccuacuccaacaacucuaucgcuauccccaccaacuucaccaucagcgugaccacagagauccugccuguguccaugaccaagaccagcguggacugcaccauguacaucugcggcgauuccaccgagugcuccaaccugcugcugcaguacggcagcuucugcacccagcugaauagagcccugacagggaucgccguggaacaggacaagaacacccaagagguguucgcccaagugaagcagaucuacaagaccccuccuaucaaggacuucggcggcuucaauuucagccagauucugcccgauccuagcaagcccagcaagcggagcuucaucgaggaccugcuguucaacaaagugacacuggccgacgccggcuucaucaagcaguauggcgauugucugggcgacauugccgccagggaucugauuugcgcccagaaguuuaacggacugacagugcugccuccucugcugaccgaugagaugaucgcccaguacacaucugcccugcuggccggcacaaucacaagcggcuggacauuuggagcaggcgccgcucugcagauccccuuugcuaugcagauggccuaccgguucaacggcaucggagugacccagaaugugcuguacgagaaccagaagcugaucgccaaccaguucaacagcgccaucggcaagauccaggacagccugagcagcacagcaagcgcccugggaaagcugcaggacguggucaaccagaaugcccaggcacugaacacccuggucaagcagcuguccuccaacuucggcgccaucagcucugugcugaacgauauccugagcagacuggacccuccugaggccgaggugcagaucgacagacugaucacaggcagacugcagagccuccagacauacgugacccagcagcugaucagagccgccgagauuagagccucugccaaucuggccgccaccaagaugucugagugugugcugggccagagcaagagaguggacuuuugcggcaagggcuaccaccugaugagcuucccucagucugccccucacggcgugguguuucugcacgugacauaugugcccgcucaagagaagaauuucaccaccgcuccagccaucugccacgacggcaaagcccacuuuccuagagaaggcguguucguguccaacggcacccauugguucgugacacagcggaacuucuacgagccccagaucaucaccaccgacaacaccuucgugucuggcaacugcgacgucgugaucggcauugugaacaauaccguguacgacccucugcagcccgagcuggacagcuucaaagaggaacuggacaaguacuuuaagaaccacacaagccccgacguggaccugggcgauaucagcggaaucaaugccagcgucgugaacauccagaaagagaucgaccggcugaacgagguggccaagaaucugaacgagagccugaucgaccugcaagaacuggggaaguacgagcaguacaucaaguggcccugguacaucuggcugggcuuuaucgccggacugauugccaucgugauggucacaaucaugcuguguugcaugaccagcugcuguagcugccugaagggcuguuguagcuguggcagcugcugcaaguucgacgaggacgauucugagcccgugcugaagggcgugaaacugcacuacacaugaggacuaguguccaccugucccuccugggcugcuggauugucucguuuuccugccaaauaaacaggaucagcgcuuuacagaucuaaaaaaaaaaaaaaaaaaaaaaaaaaaaaaaaaaaaaaaaaaaaaaaaaaaaaaaaaaaaaaaaaaaaaaaaaaaaaaaaaaaaaaaaaaaaaaaaaaaa

SEQ ID NO: 25376 - RNA, 4105 nt, Artificial Sequence
  SARS-CoV-2/Wuhan/WIV05/2019__EPI_ISL_402128 spike protein mRNA gc mod (1-1273)(K986P_V987P_D614G_M1229I)
aggagacccgugacccggaaguuguacggcuacgcgacuuucccucccacaaacccucgcgcccuuccuuuccuacuugggcccggcagaaagcuuaccauguucguguuccuggugcugcugccucugguguccagccagugugugaaccugaccaccagaacacagcugccuccagccuacaccaacagcuuuaccagaggcguguacuaccccgacaagguguucagauccagcgugcugcacucuacccaggaccuguuccugccuuucuucagcaacgugaccugguuccacgccauccacguguccggcaccaauggcaccaagagauucgacaaccccgugcugcccuucaacgacgggguguacuuugccagcaccgagaaguccaacaucaucagaggcuggaucuucggcaccacacuggacagcaagacccagagccugcugaucgugaacaacgccaccaacguggucaucaaagugugcgaguuccaguucugcaacgaccccuuccugggcgucuacuaccacaagaacaacaagagcuggauggaaagcgaguuccggguguacagcagcgccaacaacugcaccuucgaguacgugucccagccuuuccugauggaccuggaaggcaagcagggcaacuucaagaaccugcgcgaguucguguuuaagaacaucgacggcuacuucaagaucuacagcaagcacaccccuaucaaccucgugcgggaucugccucagggcuucucugcucuggaaccccugguggaucugcccaucggcaucaacaucacccgguuucagacacugcuggcccugcacagaagcuaccugacaccuggcgauagcagcagcggauggacagcuggugccgccgcuuacuaugugggcuaccugcagccuagaaccuuccugcugaaguacaacgagaacggcaccaucaccgacgccguggauugugcucuggauccucugagcgagacaaagugcacccugaaguccuucaccguggaaaagggcaucuaccagaccagcaacuuccgggugcagcccaccgaauccaucgugcgguuccccaauaucaccaaucugugccccuucggcgagguguucaaugccaccagauucgccucuguguacgccuggaaccggaagcggaucagcaauugcguggccgacuacuccgugcuguacaacuccgccagcuucagcaccuucaagugcuacggcguguccccuaccaagcugaacgaccugugcuucacaaacguguacgccgacagcuucgugauccggggagaugaagugcggcagauugccccuggacagacaggcaagaucgccgacuacaacuacaagcugcccgacgacuucaccggcugugugauugccuggaacagcaacaaccuggacuccaaagucggcggcaacuacaauuaccuguaccggcuguuccggaaguccaaucugaagcccuucgagcgggacaucuccaccgagaucuaucaggccggcagcaccccuuguaacggcguggaaggcuucaacugcuacuucccacugcaguccuacggcuuucagcccacaaauggcgugggcuaucagcccuacagagugguggugcugagcuucgaacugcugcaugccccugccacagugugcggcccuaagaaaagcaccaaucucgugaagaacaaaugcgugaacuucaacuucaacggccugaccggcaccggcgugcugacagagagcaacaagaaguuccugccauuccagcaguuuggccgggauaucgccgauaccacagacgccguuagagauccccagacacuggaaauccuggacaucaccccuugcagcuucggcggagugucugugaucaccccuggcaccaacaccagcaaucagguggcagugcuguaccagggcgugaacuguaccgaagugcccguggccauucacgccgaucagcugacaccuacauggcggguguacuccaccggcagcaauguguuucagaccagagccggcugucugaucggagccgagcacgugaacaauagcuacgagugcgacauccccaucggcgcuggaaucugcgccagcuaccagacacagacaaacagcccucggagagccagaagcguggccagccagagcaucauugccuacacaaugucucugggcgccgagaacagcguggccuacuccaacaacucuaucgcuauccccaccaacuucaccaucagcgugaccacagagauccugccuguguccaugaccaagaccagcguggacugcaccauguacaucugcggcgauuccaccgagugcuccaaccugcugcugcaguacggcagcuucugcacccagcugaauagagcccugacagggaucgccguggaacaggacaagaacacccaagagguguucgcccaagugaagcagaucuacaagaccccuccuaucaaggacuucggcggcuucaauuucagccagauucugcccgauccuagcaagcccagcaagcggagcuucaucgaggaccugcuguucaacaaagugacacuggccgacgccggcuucaucaagcaguauggcgauugucugggcgacauugccgccagggaucugauuugcgcccagaaguuuaacggacugacagugcugccuccucugcugaccgaugagaugaucgcccaguacacaucugcccugcuggccggcacaaucacaagcggcuggacauuuggagcaggcgccgcucugcagauccccuuugcuaugcagauggccuaccgguucaacggcaucggagugacccagaaugugcuguacgagaaccagaagcugaucgccaaccaguucaacagcgccaucggcaagauccaggacagccugagcagcacagcaagcgcccugggaaagcugcaggacguggucaaccagaaugcccaggcacugaacacccuggucaagcagcuguccuccaacuucggcgccaucagcucugugcugaacgauauccugagcagacuggacccuccugaggccgaggugcagaucgacagacugaucacaggcagacugcagagccuccagacauacgugacccagcagcugaucagagccgccgagauuagagccucugccaaucuggccgccaccaagaugucugagugugugcugggccagagcaagagaguggacuuuugcggcaagggcuaccaccugaugagcuucccucagucugccccucacggcgugguguuucugcacgugacauaugugcccgcucaagagaagaauuucaccaccgcuccagccaucugccacgacggcaaagcccacuuuccuagagaaggcguguucguguccaacggcacccauugguucgugacacagcggaacuucuacgagccccagaucaucaccaccgacaacaccuucgugucuggcaacugcgacgucgugaucggcauugugaacaauaccguguacgacccucugcagcccgagcuggacagcuucaaagaggaacuggacaaguacuuuaagaaccacacaagccccgacguggaccugggcgauaucagcggaaucaaugccagcgucgugaacauccagaaagagaucgaccggcugaacgagguggccaagaaucugaacgagagccugaucgaccugcaagaacuggggaaguacgagcaguacaucaaguggcccugguacaucuggcugggcuuuaucgccggacugauugccaucgugaucgucacaaucaugcuguguugcaugaccagcugcuguagcugccugaagggcuguuguagcuguggcagcugcugcaaguucgacgaggacgauucugagcccgugcugaagggcgugaaacugcacuacacaugaggacuaguguccaccugucccuccugggcugcuggauugucucguuuuccugccaaauaaacaggaucagcgcuuuacagaucuaaaaaaaaaaaaaaaaaaaaaaaaaaaaaaaaaaaaaaaaaaaaaaaaaaaaaaaaaaaaaaaaaaaaaaaaaaaaaaaaaaaaaaaaaaaaaaaaaaaa

SEQ ID NO: 25377 - RNA, 4099 nt, Artificial Sequence
  SARS-CoV-2/Wuhan/WIV05/2019__EPI_ISL_402128 spike protein mRNA gc mod (1-1273)(K986P_V987P_H69del_V70del_A222V_Y453F_S477N_D614G_I692V)
aggagacccgugacccggaaguuguacggcuacgcgacuuucccucccacaaacccucgcgcccuuccuuuccuacuugggcccggcagaaagcuuaccauguucguguuccuggugcugcugccucugguguccagccagugugugaaccugaccaccagaacacagcugccuccagccuacaccaacagcuuuaccagaggcguguacuaccccgacaagguguucagauccagcgugcugcacucuacccaggaccuguuccugccuuucuucagcaacgugaccugguuccacgccaucuccggcaccaauggcaccaagagauucgacaaccccgugcugcccuucaacgacgggguguacuuugccagcaccgagaaguccaacaucaucagaggcuggaucuucggcaccacacuggacagcaagacccagagccugcugaucgugaacaacgccaccaacguggucaucaaagugugcgaguuccaguucugcaacgaccccuuccugggcgucuacuaccacaagaacaacaagagcuggauggaaagcgaguuccggguguacagcagcgccaacaacugcaccuucgaguacgugucccagccuuuccugauggaccuggaaggcaagcagggcaacuucaagaaccugcgcgaguucguguuuaagaacaucgacggcuacuucaagaucuacagcaagcacaccccuaucaaccucgugcgggaucugccucagggcuucucugugcuggaaccccugguggaucugcccaucggcaucaacaucacccgguuucagacacugcuggcccugcacagaagcuaccugacaccuggcgauagcagcagcggauggacagcuggugccgccgcuuacuaugugggcuaccugcagccuagaaccuuccugcugaaguacaacgagaacggcaccaucaccgacgccguggauugugcucuggauccucugagcgagacaaagugcacccugaaguccuucaccguggaaaagggcaucuaccagaccagcaacuuccgggugcagcccaccgaauccaucgugcgguuccccaauaucaccaaucugugccccuucggcgagguguucaaugccaccagauucgccucuguguacgccuggaaccggaagcggaucagcaauugcguggccgacuacuccgugcuguacaacuccgccagcuucagcaccuucaagugcuacggcguguccccuaccaagcugaacgaccugugcuucacaaacguguacgccgacagcuucgugauccggggagaugaagugcggcagauugccccuggacagacaggcaagaucgccgacuacaacuacaagcugcccgacgacuucaccggcugugugauugccuggaacagcaacaaccuggacuccaaagucggcggcaacuacaauuaccuguuccggcuguuccggaaguccaaucugaagcccuucgagcgggacaucuccaccgagaucuaucaggccggcaacaccccuuguaacggcguggaaggcuucaacugcuacuucccacugcaguccuacggcuuucagcccacaaauggcgugggcuaucagcccuacagagugguggugcugagcuucgaacugcugcaugccccugccacagugugcggcccuaagaaaagcaccaaucucgugaagaacaaaugcgugaacuucaacuucaacggccugaccggcaccggcgugcugacagagagcaacaagaaguuccugccauuccagcaguuuggccgggauaucgccgauaccacagacgccguuagagauccccagacacuggaaauccuggacaucaccccuugcagcuucggcggagugucugugaucaccccuggcaccaacaccagcaaucagguggcagugcuguaccagggcgugaacuguaccgaagugcccguggccauucacgccgaucagcugacaccuacauggcggguguacuccaccggcagcaauguguuucagaccagagccggcugucugaucggagccgagcacgugaacaauagcuacgagugcgacauccccaucggcgcuggaaucugcgccagcuaccagacacagacaaacagcccucggagagccagaagcguggccagccagagcgugauugccuacacaaugucucugggcgccgagaacagcguggccuacuccaacaacucuaucgcuauccccaccaacuucaccaucagcgugaccacagagauccugccuguguccaugaccaagaccagcguggacugcaccauguacaucugcggcgauuccaccgagugcuccaaccugcugcugcaguacggcagcuucugcacccagcugaauagagcccugacagggaucgccguggaacaggacaagaacacccaagagguguucgcccaagugaagcagaucuacaagaccccuccuaucaaggacuucggcggcuucaauuucagccagauucugcccgauccuagcaagcccagcaagcggagcuucaucgaggaccugcuguucaacaaagugacacuggccgacgccggcuucaucaagcaguauggcgauugucugggcgacauugccgccagggaucugauuugcgcccagaaguuuaacggacugacagugcugccuccucugcugaccgaugagaugaucgcccaguacacaucugcccugcuggccggcacaaucacaagcggcuggacauuuggagcaggcgccgcucugcagauccccuuugcuaugcagauggccuaccgguucaacggcaucggagugacccagaaugugcuguacgagaaccagaagcugaucgccaaccaguucaacagcgccaucggcaagauccaggacagccugagcagcacagcaagcgcccugggaaagcugcaggacguggucaaccagaaugcccaggcacugaacacccuggucaagcagcuguccuccaacuucggcgccaucagcucugugcugaacgauauccugagcagacuggacccuccugaggccgaggugcagaucgacagacugaucacaggcagacugcagagccuccagacauacgugacccagcagcugaucagagccgccgagauuagagccucugccaaucuggccgccaccaagaugucugagugugugcugggccagagcaagagaguggacuuuugcggcaagggcuaccaccugaugagcuucccucagucugccccucacggcgugguguuucugcacgugacauaugugcccgcucaagagaagaauuucaccaccgcuccagccaucugccacgacggcaaagcccacuuuccuagagaaggcguguucguguccaacggcacccauugguucgugacacagcggaacuucuacgagccccagaucaucaccaccgacaacaccuucgugucuggcaacugcgacgucgugaucggcauugugaacaauaccguguacgacccucugcagcccgagcuggacagcuucaaagaggaacuggacaaguacuuuaagaaccacacaagccccgacguggaccugggcgauaucagcggaaucaaugccagcgucgugaacauccagaaagagaucgaccggcugaacgagguggccaagaaucugaacgagagccugaucgaccugcaagaacuggggaaguacgagcaguacaucaaguggcccugguacaucuggcugggcuuuaucgccggacugauugccaucgugauggucacaaucaugcuguguugcaugaccagcugcuguagcugccugaagggcuguuguagcuguggcagcugcugcaaguucgacgaggacgauucugagcccgugcugaagggcgugaaacugcacuacacaugaggacuaguguccaccugucccuccugggcugcuggauugucucguuuuccugccaaauaaacaggaucagcgcuuuacagaucuaaaaaaaaaaaaaaaaaaaaaaaaaaaaaaaaaaaaaaaaaaaaaaaaaaaaaaaaaaaaaaaaaaaaaaaaaaaaaaaaaaaaaaaaaaaaaaaaaaaa

SEQ ID NO: 25378 - RNA, 4099 nt, Artificial Sequence
  SARS-CoV-2/Wuhan/WIV05/2019__EPI_ISL_402128 spike protein mRNA gc mod (1-1273)(K986P_V987P_H69del_V70del_Y453F_D614G_I692V_M1229I)
aggagacccgugacccggaaguuguacggcuacgcgacuuucccucccacaaacccucgcgcccuuccuuuccuacuugggcccggcagaaagcuuaccauguucguguuccuggugcugcugccucugguguccagccagugugugaaccugaccaccagaacacagcugccuccagccuacaccaacagcuuuaccagaggcguguacuaccccgacaagguguucagauccagcgugcugcacucuacccaggaccuguuccugccuuucuucagcaacgugaccugguuccacgccaucuccggcaccaauggcaccaagagauucgacaaccccgugcugcccuucaacgacgggguguacuuugccagcaccgagaaguccaacaucaucagaggcuggaucuucggcaccacacuggacagcaagacccagagccugcugaucgugaacaacgccaccaacguggucaucaaagugugcgaguuccaguucugcaacgaccccuuccugggcgucuacuaccacaagaacaacaagagcuggauggaaagcgaguuccggguguacagcagcgccaacaacugcaccuucgaguacgugucccagccuuuccugauggaccuggaaggcaagcagggcaacuucaagaaccugcgcgaguucguguuuaagaacaucgacggcuacuucaagaucuacagcaagcacaccccuaucaaccucgugcgggaucugccucagggcuucucugcucuggaaccccugguggaucugcccaucggcaucaacaucacccgguuucagacacugcuggcccugcacagaagcuaccugacaccuggcgauagcagcagcggauggacagcuggugccgccgcuuacuaugugggcuaccugcagccuagaaccuuccugcugaaguacaacgagaacggcaccaucaccgacgccguggauugugcucuggauccucugagcgagacaaagugcacccugaaguccuucaccguggaaaagggcaucuaccagaccagcaacuuccgggugcagcccaccgaauccaucgugcgguuccccaauaucaccaaucugugccccuucggcgagguguucaaugccaccagauucgccucuguguacgccuggaaccggaagcggaucagcaauugcguggccgacuacuccgugcuguacaacuccgccagcuucagcaccuucaagugcuacggcguguccccuaccaagcugaacgaccugugcuucacaaacguguacgccgacagcuucgugauccggggagaugaagugcggcagauugccccuggacagacaggcaagaucgccgacuacaacuacaagcugcccgacgacuucaccggcugugugauugccuggaacagcaacaaccuggacuccaaagucggcggcaacuacaauuaccuguuccggcuguuccggaaguccaaucugaagcccuucgagcgggacaucuccaccgagaucuaucaggccggcagcaccccuuguaacggcguggaaggcuucaacugcuacuucccacugcaguccuacggcuuucagcccacaaauggcgugggcuaucagcccuacagagugguggugcugagcuucgaacugcugcaugccccugccacagugugcggcccuaagaaaagcaccaaucucgugaagaacaaaugcgugaacuucaacuucaacggccugaccggcaccggcgugcugacagagagcaacaagaaguuccugccauuccagcaguuuggccgggauaucgccgauaccacagacgccguuagagauccccagacacuggaaauccuggacaucaccccuugcagcuucggcggagugucugugaucaccccuggcaccaacaccagcaaucagguggcagugcuguaccagggcgugaacuguaccgaagugcccguggccauucacgccgaucagcugacaccuacauggcggguguacuccaccggcagcaauguguuucagaccagagccggcugucugaucggagccgagcacgugaacaauagcuacgagugcgacauccccaucggcgcuggaaucugcgccagcuaccagacacagacaaacagcccucggagagccagaagcguggccagccagagcgugauugccuacacaaugucucugggcgccgagaacagcguggccuacuccaacaacucuaucgcuauccccaccaacuucaccaucagcgugaccacagagauccugccuguguccaugaccaagaccagcguggacugcaccauguacaucugcggcgauuccaccgagugcuccaaccugcugcugcaguacggcagcuucugcacccagcugaauagagcccugacagggaucgccguggaacaggacaagaacacccaagagguguucgcccaagugaagcagaucuacaagaccccuccuaucaaggacuucggcggcuucaauuucagccagauucugcccgauccuagcaagcccagcaagcggagcuucaucgaggaccugcuguucaacaaagugacacuggccgacgccggcuucaucaagcaguauggcgauugucugggcgacauugccgccagggaucugauuugcgcccagaaguuuaacggacugacagugcugccuccucugcugaccgaugagaugaucgcccaguacacaucugcccugcuggccggcacaaucacaagcggcuggacauuuggagcaggcgccgcucugcagauccccuuugcuaugcagauggccuaccgguucaacggcaucggagugacccagaaugugcuguacgagaaccagaagcugaucgccaaccaguucaacagcgccaucggcaagauccaggacagccugagcagcacagcaagcgcccugggaaagcugcaggacguggucaaccagaaugcccaggcacugaacacccuggucaagcagcuguccuccaacuucggcgccaucagcucugugcugaacgauauccugagcagacuggacccuccugaggccgaggugcagaucgacagacugaucacaggcagacugcagagccuccagacauacgugacccagcagcugaucagagccgccgagauuagagccucugccaaucuggccgccaccaagaugucugagugugugcugggccagagcaagagaguggacuuuugcggcaagggcuaccaccugaugagcuucccucagucugccccucacggcgugguguuucugcacgugacauaugugcccgcucaagagaagaauuucaccaccgcuccagccaucugccacgacggcaaagcccacuuuccuagagaaggcguguucguguccaacggcacccauugguucgugacacagcggaacuucuacgagccccagaucaucaccaccgacaacaccuucgugucuggcaacugcgacgucgugaucggcauugugaacaauaccguguacgacccucugcagcccgagcuggacagcuucaaagaggaacuggacaaguacuuuaagaaccacacaagccccgacguggaccugggcgauaucagcggaaucaaugccagcgucgugaacauccagaaagagaucgaccggcugaacgagguggccaagaaucugaacgagagccugaucgaccugcaagaacuggggaaguacgagcaguacaucaaguggcccugguacaucuggcugggcuuuaucgccggacugauugccaucgugaucgucacaaucaugcuguguugcaugaccagcugcuguagcugccugaagggcuguuguagcuguggcagcugcugcaaguucgacgaggacgauucugagcccgugcugaagggcgugaaacugcacuacacaugaggacuaguguccaccugucccuccugggcugcuggauugucucguuuuccugccaaauaaacaggaucagcgcuuuacagaucuaaaaaaaaaaaaaaaaaaaaaaaaaaaaaaaaaaaaaaaaaaaaaaaaaaaaaaaaaaaaaaaaaaaaaaaaaaaaaaaaaaaaaaaaaaaaaaaaaaaa

SEQ ID NO: 25379 - RNA, 4096 nt, Artificial Sequence
  SARS-CoV-2/Wuhan/WIV05/2019__EPI_ISL_402128 spike protein mRNA gc mod (1-1273)(K986P_V987P_K986P_V987P_H69del_V70del_Y144del_N501Y_A570 D_D614G_P681H_T716I_S982A_D1118H)
aggagacccgugacccggaaguuguacggcuacgcgacuuucccucccacaaacccucgcgcccuuccuuuccuacuugggcccggcagaaagcuuaccauguucguguuccuggugcugcugccucugguguccagccagugugugaaccugaccaccagaacacagcugccuccagccuacaccaacagcuuuaccagaggcguguacuaccccgacaagguguucagauccagcgugcugcacucuacccaggaccuguuccugccuuucuucagcaacgugaccugguuccacgccaucuccggcaccaauggcaccaagagauucgacaaccccgugcugcccuucaacgacgggguguacuuugccagcaccgagaaguccaacaucaucagaggcuggaucuucggcaccacacuggacagcaagacccagagccugcugaucgugaacaacgccaccaacguggucaucaaagugugcgaguuccaguucugcaacgaccccuuccugggcgucuaccacaagaacaacaagagcuggauggaaagcgaguuccggguguacagcagcgccaacaacugcaccuucgaguacgugucccagccuuuccugauggaccuggaaggcaagcagggcaacuucaagaaccugcgcgaguucguguuuaagaacaucgacggcuacuucaagaucuacagcaagcacaccccuaucaaccucgugcgggaucugccucagggcuucucugcucuggaaccccugguggaucugcccaucggcaucaacaucacccgguuucagacacugcuggcccugcacagaagcuaccugacaccuggcgauagcagcagcggauggacagcuggugccgccgcuuacuaugugggcuaccugcagccuagaaccuuccugcugaaguacaacgagaacggcaccaucaccgacgccguggauugugcucuggauccucugagcgagacaaagugcacccugaaguccuucaccguggaaaagggcaucuaccagaccagcaacuuccgggugcagcccaccgaauccaucgugcgguuccccaauaucaccaaucugugccccuucggcgagguguucaaugccaccagauucgccucuguguacgccuggaaccggaagcggaucagcaauugcguggccgacuacuccgugcuguacaacuccgccagcuucagcaccuucaagugcuacggcguguccccuaccaagcugaacgaccugugcuucacaaacguguacgccgacagcuucgugauccggggagaugaagugcggcagauugccccuggacagacaggcaagaucgccgacuacaacuacaagcugcccgacgacuucaccggcugugugauugccuggaacagcaacaaccuggacuccaaagucggcggcaacuacaauuaccuguaccggcuguuccggaaguccaaucugaagcccuucgagcgggacaucuccaccgagaucuaucaggccggcagcaccccuuguaacggcguggaaggcuucaacugcuacuucccacugcaguccuacggcuuucagcccacauacggcgugggcuaucagcccuacagagugguggugcugagcuucgaacugcugcaugccccugccacagugugcggcccuaagaaaagcaccaaucucgugaagaacaaaugcgugaacuucaacuucaacggccugaccggcaccggcgugcugacagagagcaacaagaaguuccugccauuccagcaguuuggccgggauaucgacgauaccacagacgccguuagagauccccagacacuggaaauccuggacaucaccccuugcagcuucggcggagugucugugaucaccccuggcaccaacaccagcaaucagguggcagugcuguaccagggcgugaacuguaccgaagugcccguggccauucacgccgaucagcugacaccuacauggcggguguacuccaccggcagcaauguguuucagaccagagccggcugucugaucggagccgagcacgugaacaauagcuacgagugcgacauccccaucggcgcuggaaucugcgccagcuaccagacacagacaaacagccaccggagagccagaagcguggccagccagagcaucauugccuacacaaugucucugggcgccgagaacagcguggccuacuccaacaacucuaucgcuauccccaucaacuucaccaucagcgugaccacagagauccugccuguguccaugaccaagaccagcguggacugcaccauguacaucugcggcgauuccaccgagugcuccaaccugcugcugcaguacggcagcuucugcacccagcugaauagagcccugacagggaucgccguggaacaggacaagaacacccaagagguguucgcccaagugaagcagaucuacaagaccccuccuaucaaggacuucggcggcuucaauuucagccagauucugcccgauccuagcaagcccagcaagcggagcuucaucgaggaccugcuguucaacaaagugacacuggccgacgccggcuucaucaagcaguauggcgauugucugggcgacauugccgccagggaucugauuugcgcccagaaguuuaacggacugacagugcugccuccucugcugaccgaugagaugaucgcccaguacacaucugcccugcuggccggcacaaucacaagcggcuggacauuuggagcaggcgccgcucugcagauccccuuugcuaugcagauggccuaccgguucaacggcaucggagugacccagaaugugcuguacgagaaccagaagcugaucgccaaccaguucaacagcgccaucggcaagauccaggacagccugagcagcacagcaagcgcccugggaaagcugcaggacguggucaaccagaaugcccaggcacugaacacccuggucaagcagcuguccuccaacuucggcgccaucagcucugugcugaacgauauccuggccagacuggacccuccugaggccgaggugcagaucgacagacugaucacaggcagacugcagagccuccagacauacgugacccagcagcugaucagagccgccgagauuagagccucugccaaucuggccgccaccaagaugucugagugugugcugggccagagcaagagaguggacuuuugcggcaagggcuaccaccugaugagcuucccucagucugccccucacggcgugguguuucugcacgugacauaugugcccgcucaagagaagaauuucaccaccgcuccagccaucugccacgacggcaaagcccacuuuccuagagaaggcguguucguguccaacggcacccauugguucgugacacagcggaacuucuacgagccccagaucaucaccacccacaacaccuucgugucuggcaacugcgacgucgugaucggcauugugaacaauaccguguacgacccucugcagcccgagcuggacagcuucaaagaggaacuggacaaguacuuuaagaaccacacaagccccgacguggaccugggcgauaucagcggaaucaaugccagcgucgugaacauccagaaagagaucgaccggcugaacgagguggccaagaaucugaacgagagccugaucgaccugcaagaacuggggaaguacgagcaguacaucaaguggcccugguacaucuggcugggcuuuaucgccggacugauugccaucgugauggucacaaucaugcuguguugcaugaccagcugcuguagcugccugaagggcuguuguagcuguggcagcugcugcaaguucgacgaggacgauucugagcccgugcugaagggcgugaaacugcacuacacaugaggacuaguguccaccugucccuccugggcugcuggauugucucguuuuccugccaaauaaacaggaucagcgcuuuacagaucuaaaaaaaaaaaaaaaaaaaaaaaaaaaaaaaaaaaaaaaaaaaaaaaaaaaaaaaaaaaaaaaaaaaaaaaaaaaaaaaaaaaaaaaaaaaaaaaaaaaa

SEQ ID NO: 25380 - RNA, 4105 nt, Artificial Sequence
  SARS-CoV-2/Wuhan/WIV05/2019__EPI_ISL_402128 spike protein mRNA gc mod (1-1273)(K986P_V987P_K986P_V987P_K417N_E484K_N501Y_D614G)
aggagacccgugacccggaaguuguacggcuacgcgacuuucccucccacaaacccucgcgcccuuccuuuccuacuugggcccggcagaaagcuuaccauguucguguuccuggugcugcugccucugguguccagccagugugugaaccugaccaccagaacacagcugccuccagccuacaccaacagcuuuaccagaggcguguacuaccccgacaagguguucagauccagcgugcugcacucuacccaggaccuguuccugccuuucuucagcaacgugaccugguuccacgccauccacguguccggcaccaauggcaccaagagauucgacaaccccgugcugcccuucaacgacgggguguacuuugccagcaccgagaaguccaacaucaucagaggcuggaucuucggcaccacacuggacagcaagacccagagccugcugaucgugaacaacgccaccaacguggucaucaaagugugcgaguuccaguucugcaacgaccccuuccugggcgucuacuaccacaagaacaacaagagcuggauggaaagcgaguuccggguguacagcagcgccaacaacugcaccuucgaguacgugucccagccuuuccugauggaccuggaaggcaagcagggcaacuucaagaaccugcgcgaguucguguuuaagaacaucgacggcuacuucaagaucuacagcaagcacaccccuaucaaccucgugcgggaucugccucagggcuucucugcucuggaaccccugguggaucugcccaucggcaucaacaucacccgguuucagacacugcuggcccugcacagaagcuaccugacaccuggcgauagcagcagcggauggacagcuggugccgccgcuuacuaugugggcuaccugcagccuagaaccuuccugcugaaguacaacgagaacggcaccaucaccgacgccguggauugugcucuggauccucugagcgagacaaagugcacccugaaguccuucaccguggaaaagggcaucuaccagaccagcaacuuccgggugcagcccaccgaauccaucgugcgguuccccaauaucaccaaucugugccccuucggcgagguguucaaugccaccagauucgccucuguguacgccuggaaccggaagcggaucagcaauugcguggccgacuacuccgugcuguacaacuccgccagcuucagcaccuucaagugcuacggcguguccccuaccaagcugaacgaccugugcuucacaaacguguacgccgacagcuucgugauccggggagaugaagugcggcagauugccccuggacagacaggcaacaucgccgacuacaacuacaagcugcccgacgacuucaccggcugugugauugccuggaacagcaacaaccuggacuccaaagucggcggcaacuacaauuaccuguaccggcuguuccggaaguccaaucugaagcccuucgagcgggacaucuccaccgagaucuaucaggccggcagcaccccuuguaacggcgugaagggcuucaacugcuacuucccacugcaguccuacggcuuucagcccacauacggcgugggcuaucagcccuacagagugguggugcugagcuucgaacugcugcaugccccugccacagugugcggcccuaagaaaagcaccaaucucgugaagaacaaaugcgugaacuucaacuucaacggccugaccggcaccggcgugcugacagagagcaacaagaaguuccugccauuccagcaguuuggccgggauaucgccgauaccacagacgccguuagagauccccagacacuggaaauccuggacaucaccccuugcagcuucggcggagugucugugaucaccccuggcaccaacaccagcaaucagguggcagugcuguaccagggcgugaacuguaccgaagugcccguggccauucacgccgaucagcugacaccuacauggcggguguacuccaccggcagcaauguguuucagaccagagccggcugucugaucggagccgagcacgugaacaauagcuacgagugcgacauccccaucggcgcuggaaucugcgccagcuaccagacacagacaaacagcccucggagagccagaagcguggccagccagagcaucauugccuacacaaugucucugggcgccgagaacagcguggccuacuccaacaacucuaucgcuauccccaccaacuucaccaucagcgugaccacagagauccugccuguguccaugaccaagaccagcguggacugcaccauguacaucugcggcgauuccaccgagugcuccaaccugcugcugcaguacggcagcuucugcacccagcugaauagagcccugacagggaucgccguggaacaggacaagaacacccaagagguguucgcccaagugaagcagaucuacaagaccccuccuaucaaggacuucggcggcuucaauuucagccagauucugcccgauccuagcaagcccagcaagcggagcuucaucgaggaccugcuguucaacaaagugacacuggccgacgccggcuucaucaagcaguauggcgauugucugggcgacauugccgccagggaucugauuugcgcccagaaguuuaacggacugacagugcugccuccucugcugaccgaugagaugaucgcccaguacacaucugcccugcuggccggcacaaucacaagcggcuggacauuuggagcaggcgccgcucugcagauccccuuugcuaugcagauggccuaccgguucaacggcaucggagugacccagaaugugcuguacgagaaccagaagcugaucgccaaccaguucaacagcgccaucggcaagauccaggacagccugagcagcacagcaagcgcccugggaaagcugcaggacguggucaaccagaaugcccaggcacugaacacccuggucaagcagcuguccuccaacuucggcgccaucagcucugugcugaacgauauccugagcagacuggacccuccugaggccgaggugcagaucgacagacugaucacaggcagacugcagagccuccagacauacgugacccagcagcugaucagagccgccgagauuagagccucugccaaucuggccgccaccaagaugucugagugugugcugggccagagcaagagaguggacuuuugcggcaagggcuaccaccugaugagcuucccucagucugccccucacggcgugguguuucugcacgugacauaugugcccgcucaagagaagaauuucaccaccgcuccagccaucugccacgacggcaaagcccacuuuccuagagaaggcguguucguguccaacggcacccauugguucgugacacagcggaacuucuacgagccccagaucaucaccaccgacaacaccuucgugucuggcaacugcgacgucgugaucggcauugugaacaauaccguguacgacccucugcagcccgagcuggacagcuucaaagaggaacuggacaaguacuuuaagaaccacacaagccccgacguggaccugggcgauaucagcggaaucaaugccagcgucgugaacauccagaaagagaucgaccggcugaacgagguggccaagaaucugaacgagagccugaucgaccugcaagaacuggggaaguacgagcaguacaucaaguggcccugguacaucuggcugggcuuuaucgccggacugauugccaucgugauggucacaaucaugcuguguugcaugaccagcugcuguagcugccugaagggcuguuguagcuguggcagcugcugcaaguucgacgaggacgauucugagcccgugcugaagggcgugaaacugcacuacacaugaggacuaguguccaccugucccuccugggcugcuggauugucucguuuuccugccaaauaaacaggaucagcgcuuuacagaucuaaaaaaaaaaaaaaaaaaaaaaaaaaaaaaaaaaaaaaaaaaaaaaaaaaaaaaaaaaaaaaaaaaaaaaaaaaaaaaaaaaaaaaaaaaaaaaaaaaaa

SEQ ID NO: 25381 - RNA, 4096 nt, Artificial Sequence
  SARS-CoV-2/Wuhan/WIV05/2019__EPI_ISL_402128 spike protein mRNA gc mod (1-1273)(K986P_V987P_K986P_V987P_L18F_D80A_D215G_L242del_A243del_ L244del_R246I_K417N_E484K_N501Y_D614G_A701V)
aggagacccgugacccggaaguuguacggcuacgcgacuuucccucccacaaacccucgcgcccuuccuuuccuacuugggcccggcagaaagcuuaccauguucguguuccuggugcugcugccucugguguccagccagugugugaacuucaccaccagaacacagcugccuccagccuacaccaacagcuuuaccagaggcguguacuaccccgacaagguguucagauccagcgugcugcacucuacccaggaccuguuccugccuuucuucagcaacgugaccugguuccacgccauccacguguccggcaccaauggcaccaagagauucgccaaccccgugcugcccuucaacgacgggguguacuuugccagcaccgagaaguccaacaucaucagaggcuggaucuucggcaccacacuggacagcaagacccagagccugcugaucgugaacaacgccaccaacguggucaucaaagugugcgaguuccaguucugcaacgaccccuuccugggcgucuacuaccacaagaacaacaagagcuggauggaaagcgaguuccggguguacagcagcgccaacaacugcaccuucgaguacgugucccagccuuuccugauggaccuggaaggcaagcagggcaacuucaagaaccugcgcgaguucguguuuaagaacaucgacggcuacuucaagaucuacagcaagcacaccccuaucaaccucgugcggggccugccucagggcuucucugcucuggaaccccugguggaucugcccaucggcaucaacaucacccgguuucagacacugcacaucagcuaccugacaccuggcgauagcagcagcggauggacagcuggugccgccgcuuacuaugugggcuaccugcagccuagaaccuuccugcugaaguacaacgagaacggcaccaucaccgacgccguggauugugcucuggauccucugagcgagacaaagugcacccugaaguccuucaccguggaaaagggcaucuaccagaccagcaacuuccgggugcagcccaccgaauccaucgugcgguuccccaauaucaccaaucugugccccuucggcgagguguucaaugccaccagauucgccucuguguacgccuggaaccggaagcggaucagcaauugcguggccgacuacuccgugcuguacaacuccgccagcuucagcaccuucaagugcuacggcguguccccuaccaagcugaacgaccugugcuucacaaacguguacgccgacagcuucgugauccggggagaugaagugcggcagauugccccuggacagacaggcaacaucgccgacuacaacuacaagcugcccgacgacuucaccggcugugugauugccuggaacagcaacaaccuggacuccaaagucggcggcaacuacaauuaccuguaccggcuguuccggaaguccaaucugaagcccuucgagcgggacaucuccaccgagaucuaucaggccggcagcaccccuuguaacggcgugaagggcuucaacugcuacuucccacugcaguccuacggcuuucagcccacauacggcgugggcuaucagcccuacagagugguggugcugagcuucgaacugcugcaugccccugccacagugugcggcccuaagaaaagcaccaaucucgugaagaacaaaugcgugaacuucaacuucaacggccugaccggcaccggcgugcugacagagagcaacaagaaguuccugccauuccagcaguuuggccgggauaucgccgauaccacagacgccguuagagauccccagacacuggaaauccuggacaucaccccuugcagcuucggcggagugucugugaucaccccuggcaccaacaccagcaaucagguggcagugcuguaccagggcgugaacuguaccgaagugcccguggccauucacgccgaucagcugacaccuacauggcggguguacuccaccggcagcaauguguuucagaccagagccggcugucugaucggagccgagcacgugaacaauagcuacgagugcgacauccccaucggcgcuggaaucugcgccagcuaccagacacagacaaacagcccucggagagccagaagcguggccagccagagcaucauugccuacacaaugucucugggcguggagaacagcguggccuacuccaacaacucuaucgcuauccccaccaacuucaccaucagcgugaccacagagauccugccuguguccaugaccaagaccagcguggacugcaccauguacaucugcggcgauuccaccgagugcuccaaccugcugcugcaguacggcagcuucugcacccagcugaauagagcccugacagggaucgccguggaacaggacaagaacacccaagagguguucgcccaagugaagcagaucuacaagaccccuccuaucaaggacuucggcggcuucaauuucagccagauucugcccgauccuagcaagcccagcaagcggagcuucaucgaggaccugcuguucaacaaagugacacuggccgacgccggcuucaucaagcaguauggcgauugucugggcgacauugccgccagggaucugauuugcgcccagaaguuuaacggacugacagugcugccuccucugcugaccgaugagaugaucgcccaguacacaucugcccugcuggccggcacaaucacaagcggcuggacauuuggagcaggcgccgcucugcagauccccuuugcuaugcagauggccuaccgguucaacggcaucggagugacccagaaugugcuguacgagaaccagaagcugaucgccaaccaguucaacagcgccaucggcaagauccaggacagccugagcagcacagcaagcgcccugggaaagcugcaggacguggucaaccagaaugcccaggcacugaacacccuggucaagcagcuguccuccaacuucggcgccaucagcucugugcugaacgauauccugagcagacuggacccuccugaggccgaggugcagaucgacagacugaucacaggcagacugcagagccuccagacauacgugacccagcagcugaucagagccgccgagauuagagccucugccaaucuggccgccaccaagaugucugagugugugcugggccagagcaagagaguggacuuuugcggcaagggcuaccaccugaugagcuucccucagucugccccucacggcgugguguuucugcacgugacauaugugcccgcucaagagaagaauuucaccaccgcuccagccaucugccacgacggcaaagcccacuuuccuagagaaggcguguucguguccaacggcacccauugguucgugacacagcggaacuucuacgagccccagaucaucaccaccgacaacaccuucgugucuggcaacugcgacgucgugaucggcauugugaacaauaccguguacgacccucugcagcccgagcuggacagcuucaaagaggaacuggacaaguacuuuaagaaccacacaagccccgacguggaccugggcgauaucagcggaaucaaugccagcgucgugaacauccagaaagagaucgaccggcugaacgagguggccaagaaucugaacgagagccugaucgaccugcaagaacuggggaaguacgagcaguacaucaaguggcccugguacaucuggcugggcuuuaucgccggacugauugccaucgugauggucacaaucaugcuguguugcaugaccagcugcuguagcugccugaagggcuguuguagcuguggcagcugcugcaaguucgacgaggacgauucugagcccgugcugaagggcgugaaacugcacuacacaugaggacuaguguccaccugucccuccugggcugcuggauugucucguuuuccugccaaauaaacaggaucagcgcuuuacagaucuaaaaaaaaaaaaaaaaaaaaaaaaaaaaaaaaaaaaaaaaaaaaaaaaaaaaaaaaaaaaaaaaaaaaaaaaaaaaaaaaaaaaaaaaaaaaaaaaaaaa

SEQ ID NO: 25382 - RNA, 4105 nt, Artificial Sequence
  SARS-CoV-2/Wuhan/WIV05/2019__EPI_ISL_402128 spike protein mRNA gc mod (1-1273)(K986P_V987P_K986P_V987P_E484K_D614G)
aggagacccgugacccggaaguuguacggcuacgcgacuuucccucccacaaacccucgcgcccuuccuuuccuacuugggcccggcagaaagcuuaccauguucguguuccuggugcugcugccucugguguccagccagugugugaaccugaccaccagaacacagcugccuccagccuacaccaacagcuuuaccagaggcguguacuaccccgacaagguguucagauccagcgugcugcacucuacccaggaccuguuccugccuuucuucagcaacgugaccugguuccacgccauccacguguccggcaccaauggcaccaagagauucgacaaccccgugcugcccuucaacgacgggguguacuuugccagcaccgagaaguccaacaucaucagaggcuggaucuucggcaccacacuggacagcaagacccagagccugcugaucgugaacaacgccaccaacguggucaucaaagugugcgaguuccaguucugcaacgaccccuuccugggcgucuacuaccacaagaacaacaagagcuggauggaaagcgaguuccggguguacagcagcgccaacaacugcaccuucgaguacgugucccagccuuuccugauggaccuggaaggcaagcagggcaacuucaagaaccugcgcgaguucguguuuaagaacaucgacggcuacuucaagaucuacagcaagcacaccccuaucaaccucgugcgggaucugccucagggcuucucugcucuggaaccccugguggaucugcccaucggcaucaacaucacccgguuucagacacugcuggcccugcacagaagcuaccugacaccuggcgauagcagcagcggauggacagcuggugccgccgcuuacuaugugggcuaccugcagccuagaaccuuccugcugaaguacaacgagaacggcaccaucaccgacgccguggauugugcucuggauccucugagcgagacaaagugcacccugaaguccuucaccguggaaaagggcaucuaccagaccagcaacuuccgggugcagcccaccgaauccaucgugcgguuccccaauaucaccaaucugugccccuucggcgagguguucaaugccaccagauucgccucuguguacgccuggaaccggaagcggaucagcaauugcguggccgacuacuccgugcuguacaacuccgccagcuucagcaccuucaagugcuacggcguguccccuaccaagcugaacgaccugugcuucacaaacguguacgccgacagcuucgugauccggggagaugaagugcggcagauugccccuggacagacaggcaagaucgccgacuacaacuacaagcugcccgacgacuucaccggcugugugauugccuggaacagcaacaaccuggacuccaaagucggcggcaacuacaauuaccuguaccggcuguuccggaaguccaaucugaagcccuucgagcgggacaucuccaccgagaucuaucaggccggcagcaccccuuguaacggcgugaagggcuucaacugcuacuucccacugcaguccuacggcuuucagcccacaaauggcgugggcuaucagcccuacagagugguggugcugagcuucgaacugcugcaugccccugccacagugugcggcccuaagaaaagcaccaaucucgugaagaacaaaugcgugaacuucaacuucaacggccugaccggcaccggcgugcugacagagagcaacaagaaguuccugccauuccagcaguuuggccgggauaucgccgauaccacagacgccguuagagauccccagacacuggaaauccuggacaucaccccuugcagcuucggcggagugucugugaucaccccuggcaccaacaccagcaaucagguggcagugcuguaccagggcgugaacuguaccgaagugcccguggccauucacgccgaucagcugacaccuacauggcggguguacuccaccggcagcaauguguuucagaccagagccggcugucugaucggagccgagcacgugaacaauagcuacgagugcgacauccccaucggcgcuggaaucugcgccagcuaccagacacagacaaacagcccucggagagccagaagcguggccagccagagcaucauugccuacacaaugucucugggcgccgagaacagcguggccuacuccaacaacucuaucgcuauccccaccaacuucaccaucagcgugaccacagagauccugccuguguccaugaccaagaccagcguggacugcaccauguacaucugcggcgauuccaccgagugcuccaaccugcugcugcaguacggcagcuucugcacccagcugaauagagcccugacagggaucgccguggaacaggacaagaacacccaagagguguucgcccaagugaagcagaucuacaagaccccuccuaucaaggacuucggcggcuucaauuucagccagauucugcccgauccuagcaagcccagcaagcggagcuucaucgaggaccugcuguucaacaaagugacacuggccgacgccggcuucaucaagcaguauggcgauugucugggcgacauugccgccagggaucugauuugcgcccagaaguuuaacggacugacagugcugccuccucugcugaccgaugagaugaucgcccaguacacaucugcccugcuggccggcacaaucacaagcggcuggacauuuggagcaggcgccgcucugcagauccccuuugcuaugcagauggccuaccgguucaacggcaucggagugacccagaaugugcuguacgagaaccagaagcugaucgccaaccaguucaacagcgccaucggcaagauccaggacagccugagcagcacagcaagcgcccugggaaagcugcaggacguggucaaccagaaugcccaggcacugaacacccuggucaagcagcuguccuccaacuucggcgccaucagcucugugcugaacgauauccugagcagacuggacccuccugaggccgaggugcagaucgacagacugaucacaggcagacugcagagccuccagacauacgugacccagcagcugaucagagccgccgagauuagagccucugccaaucuggccgccaccaagaugucugagugugugcugggccagagcaagagaguggacuuuugcggcaagggcuaccaccugaugagcuucccucagucugccccucacggcgugguguuucugcacgugacauaugugcccgcucaagagaagaauuucaccaccgcuccagccaucugccacgacggcaaagcccacuuuccuagagaaggcguguucguguccaacggcacccauugguucgugacacagcggaacuucuacgagccccagaucaucaccaccgacaacaccuucgugucuggcaacugcgacgucgugaucggcauugugaacaauaccguguacgacccucugcagcccgagcuggacagcuucaaagaggaacuggacaaguacuuuaagaaccacacaagccccgacguggaccugggcgauaucagcggaaucaaugccagcgucgugaacauccagaaagagaucgaccggcugaacgagguggccaagaaucugaacgagagccugaucgaccugcaagaacuggggaaguacgagcaguacaucaaguggcccugguacaucuggcugggcuuuaucgccggacugauugccaucgugauggucacaaucaugcuguguugcaugaccagcugcuguagcugccugaagggcuguuguagcuguggcagcugcugcaaguucgacgaggacgauucugagcccgugcugaagggcgugaaacugcacuacacaugaggacuaguguccaccugucccuccugggcugcuggauugucucguuuuccugccaaauaaacaggaucagcgcuuuacagaucuaaaaaaaaaaaaaaaaaaaaaaaaaaaaaaaaaaaaaaaaaaaaaaaaaaaaaaaaaaaaaaaaaaaaaaaaaaaaaaaaaaaaaaaaaaaaaaaaaaaa

SEQ ID NO: 25383 - RNA, 4105 nt, Artificial Sequence
  SARS-CoV-2/Wuhan/WIV05/2019__EPI_ISL_402128 spike protein mRNA gc mod (1-1273)(K986P_V987P_K986P_V987P_L18F_T20N_P26S_D138Y_R190S_K417T _E484K_N501Y_D614G_H655Y_T1027I)
aggagacccgugacccggaaguuguacggcuacgcgacuuucccucccacaaacccucgcgcccuuccuuuccuacuugggcccggcagaaagcuuaccauguucguguuccuggugcugcugccucugguguccagccagugugugaacuucaccaacagaacacagcugccuagcgccuacaccaacagcuuuaccagaggcguguacuaccccgacaagguguucagauccagcgugcugcacucuacccaggaccuguuccugccuuucuucagcaacgugaccugguuccacgccauccacguguccggcaccaauggcaccaagagauucgacaaccccgugcugcccuucaacgacgggguguacuuugccagcaccgagaaguccaacaucaucagaggcuggaucuucggcaccacacuggacagcaagacccagagccugcugaucgugaacaacgccaccaacguggucaucaaagugugcgaguuccaguucugcaacuaccccuuccugggcgucuacuaccacaagaacaacaagagcuggauggaaagcgaguuccggguguacagcagcgccaacaacugcaccuucgaguacgugucccagccuuuccugauggaccuggaaggcaagcagggcaacuucaagaaccugagcgaguucguguuuaagaacaucgacggcuacuucaagaucuacagcaagcacaccccuaucaaccucgugcgggaucugccucagggcuucucugcucuggaaccccugguggaucugcccaucggcaucaacaucacccgguuucagacacugcuggcccugcacagaagcuaccugacaccuggcgauagcagcagcggauggacagcuggugccgccgcuuacuaugugggcuaccugcagccuagaaccuuccugcugaaguacaacgagaacggcaccaucaccgacgccguggauugugcucuggauccucugagcgagacaaagugcacccugaaguccuucaccguggaaaagggcaucuaccagaccagcaacuuccgggugcagcccaccgaauccaucgugcgguuccccaauaucaccaaucugugccccuucggcgagguguucaaugccaccagauucgccucuguguacgccuggaaccggaagcggaucagcaauugcguggccgacuacuccgugcuguacaacuccgccagcuucagcaccuucaagugcuacggcguguccccuaccaagcugaacgaccugugcuucacaaacguguacgccgacagcuucgugauccggggagaugaagugcggcagauugccccuggacagacaggcaccaucgccgacuacaacuacaagcugcccgacgacuucaccggcugugugauugccuggaacagcaacaaccuggacuccaaagucggcggcaacuacaauuaccuguaccggcuguuccggaaguccaaucugaagcccuucgagcgggacaucuccaccgagaucuaucaggccggcagcaccccuuguaacggcgugaagggcuucaacugcuacuucccacugcaguccuacggcuuucagcccacauacggcgugggcuaucagcccuacagagugguggugcugagcuucgaacugcugcaugccccugccacagugugcggcccuaagaaaagcaccaaucucgugaagaacaaaugcgugaacuucaacuucaacggccugaccggcaccggcgugcugacagagagcaacaagaaguuccugccauuccagcaguuuggccgggauaucgccgauaccacagacgccguuagagauccccagacacuggaaauccuggacaucaccccuugcagcuucggcggagugucugugaucaccccuggcaccaacaccagcaaucagguggcagugcuguaccagggcgugaacuguaccgaagugcccguggccauucacgccgaucagcugacaccuacauggcggguguacuccaccggcagcaauguguuucagaccagagccggcugucugaucggagccgaguacgugaacaauagcuacgagugcgacauccccaucggcgcuggaaucugcgccagcuaccagacacagacaaacagcccucggagagccagaagcguggccagccagagcaucauugccuacacaaugucucugggcgccgagaacagcguggccuacuccaacaacucuaucgcuauccccaccaacuucaccaucagcgugaccacagagauccugccuguguccaugaccaagaccagcguggacugcaccauguacaucugcggcgauuccaccgagugcuccaaccugcugcugcaguacggcagcuucugcacccagcugaauagagcccugacagggaucgccguggaacaggacaagaacacccaagagguguucgcccaagugaagcagaucuacaagaccccuccuaucaaggacuucggcggcuucaauuucagccagauucugcccgauccuagcaagcccagcaagcggagcuucaucgaggaccugcuguucaacaaagugacacuggccgacgccggcuucaucaagcaguauggcgauugucugggcgacauugccgccagggaucugauuugcgcccagaaguuuaacggacugacagugcugccuccucugcugaccgaugagaugaucgcccaguacacaucugcccugcuggccggcacaaucacaagcggcuggacauuuggagcaggcgccgcucugcagauccccuuugcuaugcagauggccuaccgguucaacggcaucggagugacccagaaugugcuguacgagaaccagaagcugaucgccaaccaguucaacagcgccaucggcaagauccaggacagccugagcagcacagcaagcgcccugggaaagcugcaggacguggucaaccagaaugcccaggcacugaacacccuggucaagcagcuguccuccaacuucggcgccaucagcucugugcugaacgauauccugagcagacuggacccuccugaggccgaggugcagaucgacagacugaucacaggcagacugcagagccuccagacauacgugacccagcagcugaucagagccgccgagauuagagccucugccaaucuggccgccaucaagaugucugagugugugcugggccagagcaagagaguggacuuuugcggcaagggcuaccaccugaugagcuucccucagucugccccucacggcgugguguuucugcacgugacauaugugcccgcucaagagaagaauuucaccaccgcuccagccaucugccacgacggcaaagcccacuuuccuagagaaggcguguucguguccaacggcacccauugguucgugacacagcggaacuucuacgagccccagaucaucaccaccgacaacaccuucgugucuggcaacugcgacgucgugaucggcauugugaacaauaccguguacgacccucugcagcccgagcuggacagcuucaaagaggaacuggacaaguacuuuaagaaccacacaagccccgacguggaccugggcgauaucagcggaaucaaugccagcgucgugaacauccagaaagagaucgaccggcugaacgagguggccaagaaucugaacgagagccugaucgaccugcaagaacuggggaaguacgagcaguacaucaaguggcccugguacaucuggcugggcuuuaucgccggacugauugccaucgugauggucacaaucaugcuguguugcaugaccagcugcuguagcugccugaagggcuguuguagcuguggcagcugcugcaaguucgacgaggacgauucugagcccgugcugaagggcgugaaacugcacuacacaugaggacuaguguccaccugucccuccugggcugcuggauugucucguuuuccugccaaauaaacaggaucagcgcuuuacagaucuaaaaaaaaaaaaaaaaaaaaaaaaaaaaaaaaaaaaaaaaaaaaaaaaaaaaaaaaaaaaaaaaaaaaaaaaaaaaaaaaaaaaaaaaaaaaaaaaaaaa

SEQ ID NO: 25384 - RNA, 4105 nt, Artificial Sequence
  SARS-CoV-2/Wuhan/WIV05/2019__EPI_ISL_402128 spike protein mRNA gc mod (1-1273)(K986P_V987P_K986P_V987P_S13I_W152C_L452R_D614G)
aggagacccgugacccggaaguuguacggcuacgcgacuuucccucccacaaacccucgcgcccuuccuuuccuacuugggcccggcagaaagcuuaccauguucguguuccuggugcugcugccucugguguccauccagugugugaaccugaccaccagaacacagcugccuccagccuacaccaacagcuuuaccagaggcguguacuaccccgacaagguguucagauccagcgugcugcacucuacccaggaccuguuccugccuuucuucagcaacgugaccugguuccacgccauccacguguccggcaccaauggcaccaagagauucgacaaccccgugcugcccuucaacgacgggguguacuuugccagcaccgagaaguccaacaucaucagaggcuggaucuucggcaccacacuggacagcaagacccagagccugcugaucgugaacaacgccaccaacguggucaucaaagugugcgaguuccaguucugcaacgaccccuuccugggcgucuacuaccacaagaacaacaagagcugcauggaaagcgaguuccggguguacagcagcgccaacaacugcaccuucgaguacgugucccagccuuuccugauggaccuggaaggcaagcagggcaacuucaagaaccugcgcgaguucguguuuaagaacaucgacggcuacuucaagaucuacagcaagcacaccccuaucaaccucgugcgggaucugccucagggcuucucugcucuggaaccccugguggaucugcccaucggcaucaacaucacccgguuucagacacugcuggcccugcacagaagcuaccugacaccuggcgauagcagcagcggauggacagcuggugccgccgcuuacuaugugggcuaccugcagccuagaaccuuccugcugaaguacaacgagaacggcaccaucaccgacgccguggauugugcucuggauccucugagcgagacaaagugcacccugaaguccuucaccguggaaaagggcaucuaccagaccagcaacuuccgggugcagcccaccgaauccaucgugcgguuccccaauaucaccaaucugugccccuucggcgagguguucaaugccaccagauucgccucuguguacgccuggaaccggaagcggaucagcaauugcguggccgacuacuccgugcuguacaacuccgccagcuucagcaccuucaagugcuacggcguguccccuaccaagcugaacgaccugugcuucacaaacguguacgccgacagcuucgugauccggggagaugaagugcggcagauugccccuggacagacaggcaagaucgccgacuacaacuacaagcugcccgacgacuucaccggcugugugauugccuggaacagcaacaaccuggacuccaaagucggcggcaacuacaauuaccgcuaccggcuguuccggaaguccaaucugaagcccuucgagcgggacaucuccaccgagaucuaucaggccggcagcaccccuuguaacggcguggaaggcuucaacugcuacuucccacugcaguccuacggcuuucagcccacaaauggcgugggcuaucagcccuacagagugguggugcugagcuucgaacugcugcaugccccugccacagugugcggcccuaagaaaagcaccaaucucgugaagaacaaaugcgugaacuucaacuucaacggccugaccggcaccggcgugcugacagagagcaacaagaaguuccugccauuccagcaguuuggccgggauaucgccgauaccacagacgccguuagagauccccagacacuggaaauccuggacaucaccccuugcagcuucggcggagugucugugaucaccccuggcaccaacaccagcaaucagguggcagugcuguaccagggcgugaacuguaccgaagugcccguggccauucacgccgaucagcugacaccuacauggcggguguacuccaccggcagcaauguguuucagaccagagccggcugucugaucggagccgagcacgugaacaauagcuacgagugcgacauccccaucggcgcuggaaucugcgccagcuaccagacacagacaaacagcccucggagagccagaagcguggccagccagagcaucauugccuacacaaugucucugggcgccgagaacagcguggccuacuccaacaacucuaucgcuauccccaccaacuucaccaucagcgugaccacagagauccugccuguguccaugaccaagaccagcguggacugcaccauguacaucugcggcgauuccaccgagugcuccaaccugcugcugcaguacggcagcuucugcacccagcugaauagagcccugacagggaucgccguggaacaggacaagaacacccaagagguguucgcccaagugaagcagaucuacaagaccccuccuaucaaggacuucggcggcuucaauuucagccagauucugcccgauccuagcaagcccagcaagcggagcuucaucgaggaccugcuguucaacaaagugacacuggccgacgccggcuucaucaagcaguauggcgauugucugggcgacauugccgccagggaucugauuugcgcccagaaguuuaacggacugacagugcugccuccucugcugaccgaugagaugaucgcccaguacacaucugcccugcuggccggcacaaucacaagcggcuggacauuuggagcaggcgccgcucugcagauccccuuugcuaugcagauggccuaccgguucaacggcaucggagugacccagaaugugcuguacgagaaccagaagcugaucgccaaccaguucaacagcgccaucggcaagauccaggacagccugagcagcacagcaagcgcccugggaaagcugcaggacguggucaaccagaaugcccaggcacugaacacccuggucaagcagcuguccuccaacuucggcgccaucagcucugugcugaacgauauccugagcagacuggacccuccugaggccgaggugcagaucgacagacugaucacaggcagacugcagagccuccagacauacgugacccagcagcugaucagagccgccgagauuagagccucugccaaucuggccgccaccaagaugucugagugugugcugggccagagcaagagaguggacuuuugcggcaagggcuaccaccugaugagcuucccucagucugccccucacggcgugguguuucugcacgugacauaugugcccgcucaagagaagaauuucaccaccgcuccagccaucugccacgacggcaaagcccacuuuccuagagaaggcguguucguguccaacggcacccauugguucgugacacagcggaacuucuacgagccccagaucaucaccaccgacaacaccuucgugucuggcaacugcgacgucgugaucggcauugugaacaauaccguguacgacccucugcagcccgagcuggacagcuucaaagaggaacuggacaaguacuuuaagaaccacacaagccccgacguggaccugggcgauaucagcggaaucaaugccagcgucgugaacauccagaaagagaucgaccggcugaacgagguggccaagaaucugaacgagagccugaucgaccugcaagaacuggggaaguacgagcaguacaucaaguggcccugguacaucuggcugggcuuuaucgccggacugauugccaucgugauggucacaaucaugcuguguugcaugaccagcugcuguagcugccugaagggcuguuguagcuguggcagcugcugcaaguucgacgaggacgauucugagcccgugcugaagggcgugaaacugcacuacacaugaggacuaguguccaccugucccuccugggcugcuggauugucucguuuuccugccaaauaaacaggaucagcgcuuuacagaucuaaaaaaaaaaaaaaaaaaaaaaaaaaaaaaaaaaaaaaaaaaaaaaaaaaaaaaaaaaaaaaaaaaaaaaaaaaaaaaaaaaaaaaaaaaaaaaaaaaaa

SEQ ID NO: 25385 - RNA, 1341 nt, Artificial Sequence
  SARS-CoV-2/Wuhan/WIV05/2019__EPI_ISL_402128 spike protein mRNA gc (1-15,334-528) Ferritin construct
aggagaaagcuuaccauguucguguuccugguccuccugccccuggugagcucccagugcaaccugugccccuucggcgagguguucaacgccacccgguucgccagcgucuacgccuggaaccgcaagcggaucuccaacugcguggcggacuacagcgugcuguacaacuccgccagcuucuccacguucaagugcuacggcgucagccccaccaagcucaacgaccugugcuucaccaacguguacgccgacuccuucgugauccgcggggacgagguccggcagaucgcccccggccagaccgggaagaucgccgacuacaacuacaagcugccggacgacuucacgggcugcgugaucgcguggaacagcaacaaccucgacuccaaggucgggggcaacuacaacuaccuguaccgccuguuccgcaagagcaaccucaagcccuucgagcgggacaucuccaccgagaucuaccaggccggcagcacccccugcaacgggguggagggcuucaacugcuacuucccccugcaguccuacggguuccagccgaccaacggcgugggguaccagcccuaccggguggucgugcugagcuucgagcuccugcacgcccccgccacggugugcggccccaagggcggggguggaagcggcggggguggaagugacaucaucaagcuccugaacgagcaggucaacaaggagaugcaguccagcaaccuguacauguccaugagcuccuggugcuacacccacagccucgacggcgccgggcuguuccuguucgaccacgccgcggaggaguacgagcacgccaagaagcucaucaucuuccugaacgagaacaacgugcccgugcagcugaccuccaucagcgccccggagcacaaguucgagggccucacgcagaucuuccagaaggccuacgagcacgagcagcacaucuccgagagcaucaacaacaucguggaccacgccaucaaguccaaggaccacgcgaccuucaacuuccugcagugguacgucgccgagcagcacgaggaggaggugcuguucaaggacauccucgacaagaucgagcugaucgggaacgagaaccacggccuguaccucgccgaccaguacgugaaggggaucgccaagagccgcaaguccugaggacuaguuauaagacugacuagcccgaugggccucccaacgggcccuccuccccuccuugcaccgagauuaauaaaaaaaaaaaaaaaaaaaaaaaaaaaaaaaaaaaaaaaaaaaaaaaaaaaaaaaaaaaaaaaaaaaaaaaaaaaaaaaaaaaaaaaaaaaaaaaaaaaa

SEQ ID NO: 25386 - RNA, 939 nt, Artificial Sequence
  SARS-CoV-2/Wuhan/WIV05/2019__EPI_ISL_402128 spike protein mRNA gc (334-528) Foldon construct
aggagaaagcuuaccaugcccaugggcagccugcagccgcucgccacccuguaccugcucgggaugcugguggccuccguccuggcgaaccugugccccuucggcgagguguucaacgccacccgguucgccagcgucuacgccuggaaccgcaagcggaucuccaacugcguggcggacuacagcgugcuguacaacuccgccagcuucuccacguucaagugcuacggcgucagccccaccaagcucaacgaccugugcuucaccaacguguacgccgacuccuucgugauccgcggggacgagguccggcagaucgcccccggccagaccgggaagaucgccgacuacaacuacaagcugccggacgacuucacgggcugcgugaucgcguggaacagcaacaaccucgacuccaaggucgggggcaacuacaacuaccuguaccgccuguuccgcaagagcaaccucaagcccuucgagcgggacaucuccaccgagaucuaccaggccggcagcacccccugcaacgggguggagggcuucaacugcuacuucccccugcaguccuacggguuccagccgaccaacggcgugggguaccagcccuaccggguggucgugcugagcuucgagcuccugcacgcccccgccacggugugcggccccaagggcagcggcggguacauccccgaggccccgcgcgacggccaggccuacgugcggaaggacggcgaguggguccugcugagcaccuuccucugaggacuaguuauaagacugacuagcccgaugggccucccaacgggcccuccuccccuccuugcaccgagauuaauaaaaaaaaaaaaaaaaaaaaaaaaaaaaaaaaaaaaaaaaaaaaaaaaaaaaaaaaaaaaaaaaaaaaaaaaaaaaaaaaaaaaaaaaaaaaaaaaaaaa

SEQ ID NO: 25387 - RNA, 1317 nt, Artificial Sequence
  SARS-CoV-2/Wuhan/WIV05/2019__EPI_ISL_402128 spike protein mRNA gc (1-15,334-528) LumSynth construct
aggagaaagcuuaccauguucguguuccugguccuccugccccuggugagcucccagugcaaccugugccccuucggcgagguguucaacgccacccgguucgccagcgucuacgccuggaaccgcaagcggaucuccaacugcguggcggacuacagcgugcuguacaacuccgccagcuucuccacguucaagugcuacggcgucagccccaccaagcucaacgaccugugcuucaccaacguguacgccgacuccuucgugauccgcggggacgagguccggcagaucgcccccggccagaccgggaagaucgccgacuacaacuacaagcugccggacgacuucacgggcugcgugaucgcguggaacagcaacaaccucgacuccaaggucgggggcaacuacaacuaccuguaccgccuguuccgcaagagcaaccucaagcccuucgagcgggacaucuccaccgagaucuaccaggccggcagcacccccugcaacgggguggagggcuucaacugcuacuucccccugcaguccuacggguuccagccgaccaacggcgugggguaccagcccuaccggguggucgugcugagcuucgagcuccugcacgcccccgccacggugugcggccccaagggcggcggcggcuccggaggcggagguagcgggggacagaucuacgagggcaagcugaccgccgaggggcuccgcuucggcaucguggccagccgguucaaccacgcgcuggucgaccgccugguggagggggccaucgacgccaucgugcggcacggcgggcgcgaggaggacaucacccucguccgggugcccggcuccugggagaucccgguggccgccggcgagcuggcccgcaaggaggacaucgacgcggucaucgccaucggggugcugauccggggcgccacgccccacuucgacuacaucgccagcgagguguccaaggggcucgcggaccugagccuggagcuccgcaagcccaucaccuucggcgucaucaccgccgacacccuggagcaggccaucgagcgggccgggacgaagcacggcaacaagggcugggaggccgcgcuguccgccaucgagauggccaaccucuucaagagccugcgcugaggacuaguuauaagacugacuagcccgaugggccucccaacgggcccuccuccccuccuugcaccgagauuaauaaaaaaaaaaaaaaaaaaaaaaaaaaaaaaaaaaaaaaaaaaaaaaaaaaaaaaaaaaaaaaaaaaaaaaaaaaaaaaaaaaaaaaaaaaaaaaaaaaaa

SEQ ID NO: 25388 - RNA, 1278 nt, Artificial Sequence
  SARS-CoV-2/Wuhan/WIV05/2019__EPI_ISL_402128 spike protein mRNA gc (334-528) LumSynth construct
aggagaaagcuuaccaugcagaucuacgagggcaagcugaccgccgaggggcuccgcuucggcaucguggccagccgguucaaccacgcgcuggucgaccgccugguggagggggccaucgacgccaucgugcggcacggcgggcgcgaggaggacaucacccucguccgggugcccggcuccugggagaucccgguggccgccggcgagcuggcccgcaaggaggacaucgacgcggucaucgccaucggggugcugauccggggcgccacgccccacuucgacuacaucgccagcgagguguccaaggggcucgcggaccugagccuggagcuccgcaagcccaucaccuucggcgucaucaccgccgacacccuggagcaggccaucgagcgggccgggacgaagcacggcaacaagggcugggaggccgcgcuguccgccaucgagauggccaaccucuucaagagccugcgcggcgggggcgggagcggcgggggcggcuccgggggcgggaaccugugccccuucggcgagguguucaacgccacccgguucgccagcgucuacgccuggaaccgcaagcggaucuccaacugcguggcggacuacagcgugcuguacaacuccgccagcuucuccacguucaagugcuacggcgucagccccaccaagcucaacgaccugugcuucaccaacguguacgccgacuccuucgugauccgcggggacgagguccggcagaucgcccccggccagaccgggaagaucgccgacuacaacuacaagcugccggacgacuucacgggcugcgugaucgcguggaacagcaacaaccucgacuccaaggucgggggcaacuacaacuaccuguaccgccuguuccgcaagagcaaccucaagcccuucgagcgggacaucuccaccgagaucuaccaggccggcagcacccccugcaacgggguggagggcuucaacugcuacuucccccugcaguccuacggguuccagccgaccaacggcgugggguaccagcccuaccggguggucgugcugagcuucgagcuccugcacgcccccgccacggugugcggccccaagugaggacuaguuauaagacugacuagcccgaugggccucccaacgggcccuccuccccuccuugcaccgagauuaauaaaaaaaaaaaaaaaaaaaaaaaaaaaaaaaaaaaaaaaaaaaaaaaaaaaaaaaaaaaaaaaaaaaaaaaaaaaaaaaaaaaaaaaaaaaaaaaaaaaa

SEQ ID NO: 25389 - RNA, 4011 nt, Artificial Sequence
  SARS-CoV-2/Wuhan/WIV05/2019__EPI_ISL_402128 spike protein mRNA gc (1-1273)
aggagaaagcuuaccauguucguguuccugguccuccugccccuggugagcucccagugcgugaaccucaccacccgcacgcagcugccgcccgccuacaccaacagcuucacccggggcgucuacuaccccgacaagguguuccgcuccagcgugcugcacuccacccaggaccucuuccugcccuucuucagcaacgucacgugguuccacgccauccacguguccgggaccaacggcaccaagcgguucgacaacccggugcugcccuucaacgacggggucuacuucgcgagcaccgagaaguccaacaucauccgcggcuggaucuucgggacgacccucgacagcaagacccagucccugcugaucgugaacaacgccaccaacguggucaucaaggugugcgaguuccaguucugcaacgaccccuuccucggcguguacuaccacaagaacaacaagagcuggauggaguccgaguuccgggucuacagcuccgccaacaacugcacguucgaguacgugagccagcccuuccugauggaccuggagggcaagcaggggaacuucaagaaccuccgcgaguucguguucaagaacaucgacggcuacuucaagaucuacuccaagcacaccccgaucaaccugguccgggaccugccccagggguucagcgcccucgagccccugguggaccugcccaucggcaucaacaucacccgcuuccagacccuccuggcccugcaccgguccuaccucacgccgggggacagcagcuccggcuggaccgcgggcgccgccgccuacuacgugggguaccugcagccccgcaccuuccugcucaaguacaacgagaacggcaccaucacggacgcggucgacugcgcccuggacccccugagcgagaccaagugcacccucaaguccuucaccguggagaaggggaucuaccagacgagcaacuuccgggugcagcccaccgaguccaucguccgcuucccgaacaucaccaaccugugccccuucggcgagguguucaacgccacccgguucgccagcgucuacgccuggaaccgcaagcggaucuccaacugcguggcggacuacagcgugcuguacaacuccgccagcuucuccacguucaagugcuacggcgucagccccaccaagcucaacgaccugugcuucaccaacguguacgccgacuccuucgugauccgcggggacgagguccggcagaucgcccccggccagaccgggaagaucgccgacuacaacuacaagcugccggacgacuucacgggcugcgugaucgcguggaacagcaacaaccucgacuccaaggucgggggcaacuacaacuaccuguaccgccuguuccgcaagagcaaccucaagcccuucgagcgggacaucuccaccgagaucuaccaggccggcagcacccccugcaacgggguggagggcuucaacugcuacuucccccugcaguccuacggguuccagccgaccaacggcgugggguaccagcccuaccggguggucgugcugagcuucgagcuccugcacgcccccgccacggugugcggccccaagaaguccaccaaccuggucaagaacaagugcgugaacuucaacuucaacggccucaccgggaccggcgugcugaccgagagcaacaagaaguuccugccguuccagcaguucgggcgcgacaucgccgacacgaccgacgcgguccgcgacccccagacccuggagauccucgacaucacccccugcagcuucggcgggguguccgugaucacgccgggcaccaacaccagcaaccaggucgccgugcuguaccaggacgugaacugcaccgagguccccguggccauccacgccgaccagcugacgcccaccuggcggguguacuccaccggcagcaacgucuuccagacccgcgccgggugccucaucggcgcggagcacgugaacaacuccuacgagugcgacauccccaucggggccggcaucugcgccagcuaccagacgcagaccaacuccccgcggcgcgcccggagcguggcgucccagagcaucaucgccuacaccaugucccugggcgccgagaacagcgucgccuacuccaacaacagcaucgccauccccaccaacuucacgaucuccgugaccaccgagauccugcccgugagcaugaccaagacgagcgucgacugcaccauguacaucugcggggacuccaccgagugcagcaaccuccugcugcaguacggcuccuucugcacccagcucaaccgcgcgcugacggggaucgccguggagcaggacaagaacacccaggagguguucgcccaggucaagcagaucuacaagacgcccccgaucaaggacuucggcggguucaacuucagccagauccugcccgaccccuccaagcccagcaagcgguccuucaucgaggaccuccuguucaacaaggugacccuggccgacgccggcuucaucaagcaguacggcgacugccucggggacaucgcggcccgcgaccugaucugcgcccagaaguucaacggccugaccgugcucccgccccugcugaccgacgagaugaucgcccaguacaccagcgcccuccuggcggggaccaucacguccggcuggaccuucggggccggcgccgcccugcagauccccuucgcgaugcagauggccuaccgguucaacggcaucggggucacccagaacgugcucuacgagaaccagaagcugaucgccaaccaguucaacagcgccaucggcaagauccaggacucccugagcuccaccgccagcgcgcucgggaagcugcaggacguggucaaccagaacgcccaggcccugaacacgcucgugaagcagcuguccagcaacuucggcgccaucuccagcgugcugaacgacauccucucccgccuggacaaggucgaggccgaggugcagaucgaccggcugaucaccgggcgccuccagagccugcagaccuacgugacccagcagcugauccgggcggccgagauccgcgccagcgccaaccucgccgcgaccaagauguccgagugcguccugggccagagcaagcggguggacuucugcggcaagggguaccaccugauguccuucccccagagcgccccgcacggcguggucuuccuccacgugacguacguccccgcccaggagaagaacuucaccaccgcccccgcgaucugccacgacgggaaggcccacuucccccgcgagggcguguucguguccaacgggacccacugguucgucacgcagcggaacuucuacgagccgcagaucaucaccaccgacaacaccuucgugagcggcaacugcgacguggucaucggcaucgugaacaacacgguguacgacccccugcagcccgagcuggacuccuucaaggaggagcucgacaaguacuucaagaaccacaccagccccgacgucgaccugggggacaucuccggcaucaacgccagcguggugaacauccagaaggagaucgaccgccugaacgaggucgccaagaaccucaacgagucccugaucgaccugcaggagcucgggaaguacgagcaguacaucaaguggccgugguacaucuggcugggcuucaucgccggccugaucgcgaucgugauggugaccaucaugcucugcugcaugaccagcugcugcuccugccugaaggggugcugcagcugcggcuccugcugcaaguucgacgaggacgacagcgagcccguccugaagggggugaagcuccacuacacgugaggacuaguuauaagacugacuagcccgaugggccucccaacgggcccuccuccccuccuugcaccgagauuaauaaaaaaaaaaaaaaaaaaaaaaaaaaaaaaaaaaaaaaaaaaaaaaaaaaaaaaaaaaaaaaaaaaaaaaaaaaaaaaaaaaaaaaaaaaaaaaaaaaaa

SEQ ID NO: 25390 - RNA, 4011 nt, Artificial Sequence
  SARS-CoV-2/Wuhan/WIV05/2019__EPI_ISL_402128 spike protein mRNA gc (1-1273)(D614G)
aggagaaagcuuaccauguucguguuccugguccuccugccccuggugagcucccagugcgugaaccucaccacccgcacgcagcugccgcccgccuacaccaacagcuucacccggggcgucuacuaccccgacaagguguuccgcuccagcgugcugcacuccacccaggaccucuuccugcccuucuucagcaacgucacgugguuccacgccauccacguguccgggaccaacggcaccaagcgguucgacaacccggugcugcccuucaacgacggggucuacuucgcgagcaccgagaaguccaacaucauccgcggcuggaucuucgggacgacccucgacagcaagacccagucccugcugaucgugaacaacgccaccaacguggucaucaaggugugcgaguuccaguucugcaacgaccccuuccucggcguguacuaccacaagaacaacaagagcuggauggaguccgaguuccgggucuacagcuccgccaacaacugcacguucgaguacgugagccagcccuuccugauggaccuggagggcaagcaggggaacuucaagaaccuccgcgaguucguguucaagaacaucgacggcuacuucaagaucuacuccaagcacaccccgaucaaccugguccgggaccugccccagggguucagcgcccucgagccccugguggaccugcccaucggcaucaacaucacccgcuuccagacccuccuggcccugcaccgguccuaccucacgccgggggacagcagcuccggcuggaccgcgggcgccgccgccuacuacgugggguaccugcagccccgcaccuuccugcucaaguacaacgagaacggcaccaucacggacgcggucgacugcgcccuggacccccugagcgagaccaagugcacccucaaguccuucaccguggagaaggggaucuaccagacgagcaacuuccgggugcagcccaccgaguccaucguccgcuucccgaacaucaccaaccugugccccuucggcgagguguucaacgccacccgguucgccagcgucuacgccuggaaccgcaagcggaucuccaacugcguggcggacuacagcgugcuguacaacuccgccagcuucuccacguucaagugcuacggcgucagccccaccaagcucaacgaccugugcuucaccaacguguacgccgacuccuucgugauccgcggggacgagguccggcagaucgcccccggccagaccgggaagaucgccgacuacaacuacaagcugccggacgacuucacgggcugcgugaucgcguggaacagcaacaaccucgacuccaaggucgggggcaacuacaacuaccuguaccgccuguuccgcaagagcaaccucaagcccuucgagcgggacaucuccaccgagaucuaccaggccggcagcacccccugcaacgggguggagggcuucaacugcuacuucccccugcaguccuacggguuccagccgaccaacggcgugggguaccagcccuaccggguggucgugcugagcuucgagcuccugcacgcccccgccacggugugcggccccaagaaguccaccaaccuggucaagaacaagugcgugaacuucaacuucaacggccucaccgggaccggcgugcugaccgagagcaacaagaaguuccugccguuccagcaguucgggcgcgacaucgccgacacgaccgacgcgguccgcgacccccagacccuggagauccucgacaucacccccugcagcuucggcgggguguccgugaucacgccgggcaccaacaccagcaaccaggucgccgugcuguaccagggcgugaacugcaccgagguccccguggccauccacgccgaccagcugacgcccaccuggcggguguacuccaccggcagcaacgucuuccagacccgcgccgggugccucaucggcgcggagcacgugaacaacuccuacgagugcgacauccccaucggggccggcaucugcgccagcuaccagacgcagaccaacuccccgcggcgcgcccggagcguggcgucccagagcaucaucgccuacaccaugucccugggcgccgagaacagcgucgccuacuccaacaacagcaucgccauccccaccaacuucacgaucuccgugaccaccgagauccugcccgugagcaugaccaagacgagcgucgacugcaccauguacaucugcggggacuccaccgagugcagcaaccuccugcugcaguacggcuccuucugcacccagcucaaccgcgcgcugacggggaucgccguggagcaggacaagaacacccaggagguguucgcccaggucaagcagaucuacaagacgcccccgaucaaggacuucggcggguucaacuucagccagauccugcccgaccccuccaagcccagcaagcgguccuucaucgaggaccuccuguucaacaaggugacccuggccgacgccggcuucaucaagcaguacggcgacugccucggggacaucgcggcccgcgaccugaucugcgcccagaaguucaacggccugaccgugcucccgccccugcugaccgacgagaugaucgcccaguacaccagcgcccuccuggcggggaccaucacguccggcuggaccuucggggccggcgccgcccugcagauccccuucgcgaugcagauggccuaccgguucaacggcaucggggucacccagaacgugcucuacgagaaccagaagcugaucgccaaccaguucaacagcgccaucggcaagauccaggacucccugagcuccaccgccagcgcgcucgggaagcugcaggacguggucaaccagaacgcccaggcccugaacacgcucgugaagcagcuguccagcaacuucggcgccaucuccagcgugcugaacgacauccucucccgccuggacaaggucgaggccgaggugcagaucgaccggcugaucaccgggcgccuccagagccugcagaccuacgugacccagcagcugauccgggcggccgagauccgcgccagcgccaaccucgccgcgaccaagauguccgagugcguccugggccagagcaagcggguggacuucugcggcaagggguaccaccugauguccuucccccagagcgccccgcacggcguggucuuccuccacgugacguacguccccgcccaggagaagaacuucaccaccgcccccgcgaucugccacgacgggaaggcccacuucccccgcgagggcguguucguguccaacgggacccacugguucgucacgcagcggaacuucuacgagccgcagaucaucaccaccgacaacaccuucgugagcggcaacugcgacguggucaucggcaucgugaacaacacgguguacgacccccugcagcccgagcuggacuccuucaaggaggagcucgacaaguacuucaagaaccacaccagccccgacgucgaccugggggacaucuccggcaucaacgccagcguggugaacauccagaaggagaucgaccgccugaacgaggucgccaagaaccucaacgagucccugaucgaccugcaggagcucgggaaguacgagcaguacaucaaguggccgugguacaucuggcugggcuucaucgccggccugaucgcgaucgugauggugaccaucaugcucugcugcaugaccagcugcugcuccugccugaaggggugcugcagcugcggcuccugcugcaaguucgacgaggacgacagcgagcccguccugaagggggugaagcuccacuacacgugaggacuaguuauaagacugacuagcccgaugggccucccaacgggcccuccuccccuccuugcaccgagauuaauaaaaaaaaaaaaaaaaaaaaaaaaaaaaaaaaaaaaaaaaaaaaaaaaaaaaaaaaaaaaaaaaaaaaaaaaaaaaaaaaaaaaaaaaaaaaaaaaaaaa

SEQ ID NO: 25391 - RNA, 4011 nt, Artificial Sequence
  SARS-CoV-2/Wuhan/WIV05/2019__EPI_ISL_402128 spike protein mRNA gc (1-1273)(A222V_D614G)
aggagaaagcuuaccauguucguguuccugguccuccugccccuggugagcucccagugcgugaaccucaccacccgcacgcagcugccgcccgccuacaccaacagcuucacccggggcgucuacuaccccgacaagguguuccgcuccagcgugcugcacuccacccaggaccucuuccugcccuucuucagcaacgucacgugguuccacgccauccacguguccgggaccaacggcaccaagcgguucgacaacccggugcugcccuucaacgacggggucuacuucgcgagcaccgagaaguccaacaucauccgcggcuggaucuucgggacgacccucgacagcaagacccagucccugcugaucgugaacaacgccaccaacguggucaucaaggugugcgaguuccaguucugcaacgaccccuuccucggcguguacuaccacaagaacaacaagagcuggauggaguccgaguuccgggucuacagcuccgccaacaacugcacguucgaguacgugagccagcccuuccugauggaccuggagggcaagcaggggaacuucaagaaccuccgcgaguucguguucaagaacaucgacggcuacuucaagaucuacuccaagcacaccccgaucaaccugguccgggaccugccccagggguucagcguccucgagccccugguggaccugcccaucggcaucaacaucacccgcuuccagacccuccuggcccugcaccgguccuaccucacgccgggggacagcagcuccggcuggaccgcgggcgccgccgccuacuacgugggguaccugcagccccgcaccuuccugcucaaguacaacgagaacggcaccaucacggacgcggucgacugcgcccuggacccccugagcgagaccaagugcacccucaaguccuucaccguggagaaggggaucuaccagacgagcaacuuccgggugcagcccaccgaguccaucguccgcuucccgaacaucaccaaccugugccccuucggcgagguguucaacgccacccgguucgccagcgucuacgccuggaaccgcaagcggaucuccaacugcguggcggacuacagcgugcuguacaacuccgccagcuucuccacguucaagugcuacggcgucagccccaccaagcucaacgaccugugcuucaccaacguguacgccgacuccuucgugauccgcggggacgagguccggcagaucgcccccggccagaccgggaagaucgccgacuacaacuacaagcugccggacgacuucacgggcugcgugaucgcguggaacagcaacaaccucgacuccaaggucgggggcaacuacaacuaccuguaccgccuguuccgcaagagcaaccucaagcccuucgagcgggacaucuccaccgagaucuaccaggccggcagcacccccugcaacgggguggagggcuucaacugcuacuucccccugcaguccuacggguuccagccgaccaacggcgugggguaccagcccuaccggguggucgugcugagcuucgagcuccugcacgcccccgccacggugugcggccccaagaaguccaccaaccuggucaagaacaagugcgugaacuucaacuucaacggccucaccgggaccggcgugcugaccgagagcaacaagaaguuccugccguuccagcaguucgggcgcgacaucgccgacacgaccgacgcgguccgcgacccccagacccuggagauccucgacaucacccccugcagcuucggcgggguguccgugaucacgccgggcaccaacaccagcaaccaggucgccgugcuguaccagggcgugaacugcaccgagguccccguggccauccacgccgaccagcugacgcccaccuggcggguguacuccaccggcagcaacgucuuccagacccgcgccgggugccucaucggcgcggagcacgugaacaacuccuacgagugcgacauccccaucggggccggcaucugcgccagcuaccagacgcagaccaacuccccgcggcgcgcccggagcguggcgucccagagcaucaucgccuacaccaugucccugggcgccgagaacagcgucgccuacuccaacaacagcaucgccauccccaccaacuucacgaucuccgugaccaccgagauccugcccgugagcaugaccaagacgagcgucgacugcaccauguacaucugcggggacuccaccgagugcagcaaccuccugcugcaguacggcuccuucugcacccagcucaaccgcgcgcugacggggaucgccguggagcaggacaagaacacccaggagguguucgcccaggucaagcagaucuacaagacgcccccgaucaaggacuucggcggguucaacuucagccagauccugcccgaccccuccaagcccagcaagcgguccuucaucgaggaccuccuguucaacaaggugacccuggccgacgccggcuucaucaagcaguacggcgacugccucggggacaucgcggcccgcgaccugaucugcgcccagaaguucaacggccugaccgugcucccgccccugcugaccgacgagaugaucgcccaguacaccagcgcccuccuggcggggaccaucacguccggcuggaccuucggggccggcgccgcccugcagauccccuucgcgaugcagauggccuaccgguucaacggcaucggggucacccagaacgugcucuacgagaaccagaagcugaucgccaaccaguucaacagcgccaucggcaagauccaggacucccugagcuccaccgccagcgcgcucgggaagcugcaggacguggucaaccagaacgcccaggcccugaacacgcucgugaagcagcuguccagcaacuucggcgccaucuccagcgugcugaacgacauccucucccgccuggacaaggucgaggccgaggugcagaucgaccggcugaucaccgggcgccuccagagccugcagaccuacgugacccagcagcugauccgggcggccgagauccgcgccagcgccaaccucgccgcgaccaagauguccgagugcguccugggccagagcaagcggguggacuucugcggcaagggguaccaccugauguccuucccccagagcgccccgcacggcguggucuuccuccacgugacguacguccccgcccaggagaagaacuucaccaccgcccccgcgaucugccacgacgggaaggcccacuucccccgcgagggcguguucguguccaacgggacccacugguucgucacgcagcggaacuucuacgagccgcagaucaucaccaccgacaacaccuucgugagcggcaacugcgacguggucaucggcaucgugaacaacacgguguacgacccccugcagcccgagcuggacuccuucaaggaggagcucgacaaguacuucaagaaccacaccagccccgacgucgaccugggggacaucuccggcaucaacgccagcguggugaacauccagaaggagaucgaccgccugaacgaggucgccaagaaccucaacgagucccugaucgaccugcaggagcucgggaaguacgagcaguacaucaaguggccgugguacaucuggcugggcuucaucgccggccugaucgcgaucgugauggugaccaucaugcucugcugcaugaccagcugcugcuccugccugaaggggugcugcagcugcggcuccugcugcaaguucgacgaggacgacagcgagcccguccugaagggggugaagcuccacuacacgugaggacuaguuauaagacugacuagcccgaugggccucccaacgggcccuccuccccuccuugcaccgagauuaauaaaaaaaaaaaaaaaaaaaaaaaaaaaaaaaaaaaaaaaaaaaaaaaaaaaaaaaaaaaaaaaaaaaaaaaaaaaaaaaaaaaaaaaaaaaaaaaaaaaa

SEQ ID NO: 25392 - RNA, 4011 nt, Artificial Sequence
  SARS-CoV-2/Wuhan/WIV05/2019__EPI_ISL_402128 spike protein mRNA gc (1-1273)(N439K_D614G)
aggagaaagcuuaccauguucguguuccugguccuccugccccuggugagcucccagugcgugaaccucaccacccgcacgcagcugccgcccgccuacaccaacagcuucacccggggcgucuacuaccccgacaagguguuccgcuccagcgugcugcacuccacccaggaccucuuccugcccuucuucagcaacgucacgugguuccacgccauccacguguccgggaccaacggcaccaagcgguucgacaacccggugcugcccuucaacgacggggucuacuucgcgagcaccgagaaguccaacaucauccgcggcuggaucuucgggacgacccucgacagcaagacccagucccugcugaucgugaacaacgccaccaacguggucaucaaggugugcgaguuccaguucugcaacgaccccuuccucggcguguacuaccacaagaacaacaagagcuggauggaguccgaguuccgggucuacagcuccgccaacaacugcacguucgaguacgugagccagcccuuccugauggaccuggagggcaagcaggggaacuucaagaaccuccgcgaguucguguucaagaacaucgacggcuacuucaagaucuacuccaagcacaccccgaucaaccugguccgggaccugccccagggguucagcgcccucgagccccugguggaccugcccaucggcaucaacaucacccgcuuccagacccuccuggcccugcaccgguccuaccucacgccgggggacagcagcuccggcuggaccgcgggcgccgccgccuacuacgugggguaccugcagccccgcaccuuccugcucaaguacaacgagaacggcaccaucacggacgcggucgacugcgcccuggacccccugagcgagaccaagugcacccucaaguccuucaccguggagaaggggaucuaccagacgagcaacuuccgggugcagcccaccgaguccaucguccgcuucccgaacaucaccaaccugugccccuucggcgagguguucaacgccacccgguucgccagcgucuacgccuggaaccgcaagcggaucuccaacugcguggcggacuacagcgugcuguacaacuccgccagcuucuccacguucaagugcuacggcgucagccccaccaagcucaacgaccugugcuucaccaacguguacgccgacuccuucgugauccgcggggacgagguccggcagaucgcccccggccagaccgggaagaucgccgacuacaacuacaagcugccggacgacuucacgggcugcgugaucgcguggaacagcaagaaccucgacuccaaggucgggggcaacuacaacuaccuguaccgccuguuccgcaagagcaaccucaagcccuucgagcgggacaucuccaccgagaucuaccaggccggcagcacccccugcaacgggguggagggcuucaacugcuacuucccccugcaguccuacggguuccagccgaccaacggcgugggguaccagcccuaccggguggucgugcugagcuucgagcuccugcacgcccccgccacggugugcggccccaagaaguccaccaaccuggucaagaacaagugcgugaacuucaacuucaacggccucaccgggaccggcgugcugaccgagagcaacaagaaguuccugccguuccagcaguucgggcgcgacaucgccgacacgaccgacgcgguccgcgacccccagacccuggagauccucgacaucacccccugcagcuucggcgggguguccgugaucacgccgggcaccaacaccagcaaccaggucgccgugcuguaccagggcgugaacugcaccgagguccccguggccauccacgccgaccagcugacgcccaccuggcggguguacuccaccggcagcaacgucuuccagacccgcgccgggugccucaucggcgcggagcacgugaacaacuccuacgagugcgacauccccaucggggccggcaucugcgccagcuaccagacgcagaccaacuccccgcggcgcgcccggagcguggcgucccagagcaucaucgccuacaccaugucccugggcgccgagaacagcgucgccuacuccaacaacagcaucgccauccccaccaacuucacgaucuccgugaccaccgagauccugcccgugagcaugaccaagacgagcgucgacugcaccauguacaucugcggggacuccaccgagugcagcaaccuccugcugcaguacggcuccuucugcacccagcucaaccgcgcgcugacggggaucgccguggagcaggacaagaacacccaggagguguucgcccaggucaagcagaucuacaagacgcccccgaucaaggacuucggcggguucaacuucagccagauccugcccgaccccuccaagcccagcaagcgguccuucaucgaggaccuccuguucaacaaggugacccuggccgacgccggcuucaucaagcaguacggcgacugccucggggacaucgcggcccgcgaccugaucugcgcccagaaguucaacggccugaccgugcucccgccccugcugaccgacgagaugaucgcccaguacaccagcgcccuccuggcggggaccaucacguccggcuggaccuucggggccggcgccgcccugcagauccccuucgcgaugcagauggccuaccgguucaacggcaucggggucacccagaacgugcucuacgagaaccagaagcugaucgccaaccaguucaacagcgccaucggcaagauccaggacucccugagcuccaccgccagcgcgcucgggaagcugcaggacguggucaaccagaacgcccaggcccugaacacgcucgugaagcagcuguccagcaacuucggcgccaucuccagcgugcugaacgacauccucucccgccuggacaaggucgaggccgaggugcagaucgaccggcugaucaccgggcgccuccagagccugcagaccuacgugacccagcagcugauccgggcggccgagauccgcgccagcgccaaccucgccgcgaccaagauguccgagugcguccugggccagagcaagcggguggacuucugcggcaagggguaccaccugauguccuucccccagagcgccccgcacggcguggucuuccuccacgugacguacguccccgcccaggagaagaacuucaccaccgcccccgcgaucugccacgacgggaaggcccacuucccccgcgagggcguguucguguccaacgggacccacugguucgucacgcagcggaacuucuacgagccgcagaucaucaccaccgacaacaccuucgugagcggcaacugcgacguggucaucggcaucgugaacaacacgguguacgacccccugcagcccgagcuggacuccuucaaggaggagcucgacaaguacuucaagaaccacaccagccccgacgucgaccugggggacaucuccggcaucaacgccagcguggugaacauccagaaggagaucgaccgccugaacgaggucgccaagaaccucaacgagucccugaucgaccugcaggagcucgggaaguacgagcaguacaucaaguggccgugguacaucuggcugggcuucaucgccggccugaucgcgaucgugauggugaccaucaugcucugcugcaugaccagcugcugcuccugccugaaggggugcugcagcugcggcuccugcugcaaguucgacgaggacgacagcgagcccguccugaagggggugaagcuccacuacacgugaggacuaguuauaagacugacuagcccgaugggccucccaacgggcccuccuccccuccuugcaccgagauuaauaaaaaaaaaaaaaaaaaaaaaaaaaaaaaaaaaaaaaaaaaaaaaaaaaaaaaaaaaaaaaaaaaaaaaaaaaaaaaaaaaaaaaaaaaaaaaaaaaaaa

SEQ ID NO: 25393 - RNA, 4011 nt, Artificial Sequence
  SARS-CoV-2/Wuhan/WIV05/2019__EPI_ISL_402128 spike protein mRNA gc (1-1273)(S477N_D614G)
aggagaaagcuuaccauguucguguuccugguccuccugccccuggugagcucccagugcgugaaccucaccacccgcacgcagcugccgcccgccuacaccaacagcuucacccggggcgucuacuaccccgacaagguguuccgcuccagcgugcugcacuccacccaggaccucuuccugcccuucuucagcaacgucacgugguuccacgccauccacguguccgggaccaacggcaccaagcgguucgacaacccggugcugcccuucaacgacggggucuacuucgcgagcaccgagaaguccaacaucauccgcggcuggaucuucgggacgacccucgacagcaagacccagucccugcugaucgugaacaacgccaccaacguggucaucaaggugugcgaguuccaguucugcaacgaccccuuccucggcguguacuaccacaagaacaacaagagcuggauggaguccgaguuccgggucuacagcuccgccaacaacugcacguucgaguacgugagccagcccuuccugauggaccuggagggcaagcaggggaacuucaagaaccuccgcgaguucguguucaagaacaucgacggcuacuucaagaucuacuccaagcacaccccgaucaaccugguccgggaccugccccagggguucagcgcccucgagccccugguggaccugcccaucggcaucaacaucacccgcuuccagacccuccuggcccugcaccgguccuaccucacgccgggggacagcagcuccggcuggaccgcgggcgccgccgccuacuacgugggguaccugcagccccgcaccuuccugcucaaguacaacgagaacggcaccaucacggacgcggucgacugcgcccuggacccccugagcgagaccaagugcacccucaaguccuucaccguggagaaggggaucuaccagacgagcaacuuccgggugcagcccaccgaguccaucguccgcuucccgaacaucaccaaccugugccccuucggcgagguguucaacgccacccgguucgccagcgucuacgccuggaaccgcaagcggaucuccaacugcguggcggacuacagcgugcuguacaacuccgccagcuucuccacguucaagugcuacggcgucagccccaccaagcucaacgaccugugcuucaccaacguguacgccgacuccuucgugauccgcggggacgagguccggcagaucgcccccggccagaccgggaagaucgccgacuacaacuacaagcugccggacgacuucacgggcugcgugaucgcguggaacagcaacaaccucgacuccaaggucgggggcaacuacaacuaccuguaccgccuguuccgcaagagcaaccucaagcccuucgagcgggacaucuccaccgagaucuaccaggccggcaacacccccugcaacgggguggagggcuucaacugcuacuucccccugcaguccuacggguuccagccgaccaacggcgugggguaccagcccuaccggguggucgugcugagcuucgagcuccugcacgcccccgccacggugugcggccccaagaaguccaccaaccuggucaagaacaagugcgugaacuucaacuucaacggccucaccgggaccggcgugcugaccgagagcaacaagaaguuccugccguuccagcaguucgggcgcgacaucgccgacacgaccgacgcgguccgcgacccccagacccuggagauccucgacaucacccccugcagcuucggcgggguguccgugaucacgccgggcaccaacaccagcaaccaggucgccgugcuguaccagggcgugaacugcaccgagguccccguggccauccacgccgaccagcugacgcccaccuggcggguguacuccaccggcagcaacgucuuccagacccgcgccgggugccucaucggcgcggagcacgugaacaacuccuacgagugcgacauccccaucggggccggcaucugcgccagcuaccagacgcagaccaacuccccgcggcgcgcccggagcguggcgucccagagcaucaucgccuacaccaugucccugggcgccgagaacagcgucgccuacuccaacaacagcaucgccauccccaccaacuucacgaucuccgugaccaccgagauccugcccgugagcaugaccaagacgagcgucgacugcaccauguacaucugcggggacuccaccgagugcagcaaccuccugcugcaguacggcuccuucugcacccagcucaaccgcgcgcugacggggaucgccguggagcaggacaagaacacccaggagguguucgcccaggucaagcagaucuacaagacgcccccgaucaaggacuucggcggguucaacuucagccagauccugcccgaccccuccaagcccagcaagcgguccuucaucgaggaccuccuguucaacaaggugacccuggccgacgccggcuucaucaagcaguacggcgacugccucggggacaucgcggcccgcgaccugaucugcgcccagaaguucaacggccugaccgugcucccgccccugcugaccgacgagaugaucgcccaguacaccagcgcccuccuggcggggaccaucacguccggcuggaccuucggggccggcgccgcccugcagauccccuucgcgaugcagauggccuaccgguucaacggcaucggggucacccagaacgugcucuacgagaaccagaagcugaucgccaaccaguucaacagcgccaucggcaagauccaggacucccugagcuccaccgccagcgcgcucgggaagcugcaggacguggucaaccagaacgcccaggcccugaacacgcucgugaagcagcuguccagcaacuucggcgccaucuccagcgugcugaacgacauccucucccgccuggacaaggucgaggccgaggugcagaucgaccggcugaucaccgggcgccuccagagccugcagaccuacgugacccagcagcugauccgggcggccgagauccgcgccagcgccaaccucgccgcgaccaagauguccgagugcguccugggccagagcaagcggguggacuucugcggcaagggguaccaccugauguccuucccccagagcgccccgcacggcguggucuuccuccacgugacguacguccccgcccaggagaagaacuucaccaccgcccccgcgaucugccacgacgggaaggcccacuucccccgcgagggcguguucguguccaacgggacccacugguucgucacgcagcggaacuucuacgagccgcagaucaucaccaccgacaacaccuucgugagcggcaacugcgacguggucaucggcaucgugaacaacacgguguacgacccccugcagcccgagcuggacuccuucaaggaggagcucgacaaguacuucaagaaccacaccagccccgacgucgaccugggggacaucuccggcaucaacgccagcguggugaacauccagaaggagaucgaccgccugaacgaggucgccaagaaccucaacgagucccugaucgaccugcaggagcucgggaaguacgagcaguacaucaaguggccgugguacaucuggcugggcuucaucgccggccugaucgcgaucgugauggugaccaucaugcucugcugcaugaccagcugcugcuccugccugaaggggugcugcagcugcggcuccugcugcaaguucgacgaggacgacagcgagcccguccugaagggggugaagcuccacuacacgugaggacuaguuauaagacugacuagcccgaugggccucccaacgggcccuccuccccuccuugcaccgagauuaauaaaaaaaaaaaaaaaaaaaaaaaaaaaaaaaaaaaaaaaaaaaaaaaaaaaaaaaaaaaaaaaaaaaaaaaaaaaaaaaaaaaaaaaaaaaaaaaaaaaa

SEQ ID NO: 25394 - RNA, 4011 nt, Artificial Sequence
  SARS-CoV-2/Wuhan/WIV05/2019__EPI_ISL_402128 spike protein mRNA gc (1-1273)(N501Y_D614G)
aggagaaagcuuaccauguucguguuccugguccuccugccccuggugagcucccagugcgugaaccucaccacccgcacgcagcugccgcccgccuacaccaacagcuucacccggggcgucuacuaccccgacaagguguuccgcuccagcgugcugcacuccacccaggaccucuuccugcccuucuucagcaacgucacgugguuccacgccauccacguguccgggaccaacggcaccaagcgguucgacaacccggugcugcccuucaacgacggggucuacuucgcgagcaccgagaaguccaacaucauccgcggcuggaucuucgggacgacccucgacagcaagacccagucccugcugaucgugaacaacgccaccaacguggucaucaaggugugcgaguuccaguucugcaacgaccccuuccucggcguguacuaccacaagaacaacaagagcuggauggaguccgaguuccgggucuacagcuccgccaacaacugcacguucgaguacgugagccagcccuuccugauggaccuggagggcaagcaggggaacuucaagaaccuccgcgaguucguguucaagaacaucgacggcuacuucaagaucuacuccaagcacaccccgaucaaccugguccgggaccugccccagggguucagcgcccucgagccccugguggaccugcccaucggcaucaacaucacccgcuuccagacccuccuggcccugcaccgguccuaccucacgccgggggacagcagcuccggcuggaccgcgggcgccgccgccuacuacgugggguaccugcagccccgcaccuuccugcucaaguacaacgagaacggcaccaucacggacgcggucgacugcgcccuggacccccugagcgagaccaagugcacccucaaguccuucaccguggagaaggggaucuaccagacgagcaacuuccgggugcagcccaccgaguccaucguccgcuucccgaacaucaccaaccugugccccuucggcgagguguucaacgccacccgguucgccagcgucuacgccuggaaccgcaagcggaucuccaacugcguggcggacuacagcgugcuguacaacuccgccagcuucuccacguucaagugcuacggcgucagccccaccaagcucaacgaccugugcuucaccaacguguacgccgacuccuucgugauccgcggggacgagguccggcagaucgcccccggccagaccgggaagaucgccgacuacaacuacaagcugccggacgacuucacgggcugcgugaucgcguggaacagcaacaaccucgacuccaaggucgggggcaacuacaacuaccuguaccgccuguuccgcaagagcaaccucaagcccuucgagcgggacaucuccaccgagaucuaccaggccggcagcacccccugcaacgggguggagggcuucaacugcuacuucccccugcaguccuacggguuccagccgaccuacggcgugggguaccagcccuaccggguggucgugcugagcuucgagcuccugcacgcccccgccacggugugcggccccaagaaguccaccaaccuggucaagaacaagugcgugaacuucaacuucaacggccucaccgggaccggcgugcugaccgagagcaacaagaaguuccugccguuccagcaguucgggcgcgacaucgccgacacgaccgacgcgguccgcgacccccagacccuggagauccucgacaucacccccugcagcuucggcgggguguccgugaucacgccgggcaccaacaccagcaaccaggucgccgugcuguaccagggcgugaacugcaccgagguccccguggccauccacgccgaccagcugacgcccaccuggcggguguacuccaccggcagcaacgucuuccagacccgcgccgggugccucaucggcgcggagcacgugaacaacuccuacgagugcgacauccccaucggggccggcaucugcgccagcuaccagacgcagaccaacuccccgcggcgcgcccggagcguggcgucccagagcaucaucgccuacaccaugucccugggcgccgagaacagcgucgccuacuccaacaacagcaucgccauccccaccaacuucacgaucuccgugaccaccgagauccugcccgugagcaugaccaagacgagcgucgacugcaccauguacaucugcggggacuccaccgagugcagcaaccuccugcugcaguacggcuccuucugcacccagcucaaccgcgcgcugacggggaucgccguggagcaggacaagaacacccaggagguguucgcccaggucaagcagaucuacaagacgcccccgaucaaggacuucggcggguucaacuucagccagauccugcccgaccccuccaagcccagcaagcgguccuucaucgaggaccuccuguucaacaaggugacccuggccgacgccggcuucaucaagcaguacggcgacugccucggggacaucgcggcccgcgaccugaucugcgcccagaaguucaacggccugaccgugcucccgccccugcugaccgacgagaugaucgcccaguacaccagcgcccuccuggcggggaccaucacguccggcuggaccuucggggccggcgccgcccugcagauccccuucgcgaugcagauggccuaccgguucaacggcaucggggucacccagaacgugcucuacgagaaccagaagcugaucgccaaccaguucaacagcgccaucggcaagauccaggacucccugagcuccaccgccagcgcgcucgggaagcugcaggacguggucaaccagaacgcccaggcccugaacacgcucgugaagcagcuguccagcaacuucggcgccaucuccagcgugcugaacgacauccucucccgccuggacaaggucgaggccgaggugcagaucgaccggcugaucaccgggcgccuccagagccugcagaccuacgugacccagcagcugauccgggcggccgagauccgcgccagcgccaaccucgccgcgaccaagauguccgagugcguccugggccagagcaagcggguggacuucugcggcaagggguaccaccugauguccuucccccagagcgccccgcacggcguggucuuccuccacgugacguacguccccgcccaggagaagaacuucaccaccgcccccgcgaucugccacgacgggaaggcccacuucccccgcgagggcguguucguguccaacgggacccacugguucgucacgcagcggaacuucuacgagccgcagaucaucaccaccgacaacaccuucgugagcggcaacugcgacguggucaucggcaucgugaacaacacgguguacgacccccugcagcccgagcuggacuccuucaaggaggagcucgacaaguacuucaagaaccacaccagccccgacgucgaccugggggacaucuccggcaucaacgccagcguggugaacauccagaaggagaucgaccgccugaacgaggucgccaagaaccucaacgagucccugaucgaccugcaggagcucgggaaguacgagcaguacaucaaguggccgugguacaucuggcugggcuucaucgccggccugaucgcgaucgugauggugaccaucaugcucugcugcaugaccagcugcugcuccugccugaaggggugcugcagcugcggcuccugcugcaaguucgacgaggacgacagcgagcccguccugaagggggugaagcuccacuacacgugaggacuaguuauaagacugacuagcccgaugggccucccaacgggcccuccuccccuccuugcaccgagauuaauaaaaaaaaaaaaaaaaaaaaaaaaaaaaaaaaaaaaaaaaaaaaaaaaaaaaaaaaaaaaaaaaaaaaaaaaaaaaaaaaaaaaaaaaaaaaaaaaaaaa

SEQ ID NO: 25395 - RNA, 4005 nt, Artificial Sequence
  SARS-CoV-2/Wuhan/WIV05/2019__EPI_ISL_402128 spike protein mRNA gc (1-1273)(H69del_V70del_D614G)
aggagaaagcuuaccauguucguguuccugguccuccugccccuggugagcucccagugcgugaaccucaccacccgcacgcagcugccgcccgccuacaccaacagcuucacccggggcgucuacuaccccgacaagguguuccgcuccagcgugcugcacuccacccaggaccucuuccugcccuucuucagcaacgucacgugguuccacgccaucuccgggaccaacggcaccaagcgguucgacaacccggugcugcccuucaacgacggggucuacuucgcgagcaccgagaaguccaacaucauccgcggcuggaucuucgggacgacccucgacagcaagacccagucccugcugaucgugaacaacgccaccaacguggucaucaaggugugcgaguuccaguucugcaacgaccccuuccucggcguguacuaccacaagaacaacaagagcuggauggaguccgaguuccgggucuacagcuccgccaacaacugcacguucgaguacgugagccagcccuuccugauggaccuggagggcaagcaggggaacuucaagaaccuccgcgaguucguguucaagaacaucgacggcuacuucaagaucuacuccaagcacaccccgaucaaccugguccgggaccugccccagggguucagcgcccucgagccccugguggaccugcccaucggcaucaacaucacccgcuuccagacccuccuggcccugcaccgguccuaccucacgccgggggacagcagcuccggcuggaccgcgggcgccgccgccuacuacgugggguaccugcagccccgcaccuuccugcucaaguacaacgagaacggcaccaucacggacgcggucgacugcgcccuggacccccugagcgagaccaagugcacccucaaguccuucaccguggagaaggggaucuaccagacgagcaacuuccgggugcagcccaccgaguccaucguccgcuucccgaacaucaccaaccugugccccuucggcgagguguucaacgccacccgguucgccagcgucuacgccuggaaccgcaagcggaucuccaacugcguggcggacuacagcgugcuguacaacuccgccagcuucuccacguucaagugcuacggcgucagccccaccaagcucaacgaccugugcuucaccaacguguacgccgacuccuucgugauccgcggggacgagguccggcagaucgcccccggccagaccgggaagaucgccgacuacaacuacaagcugccggacgacuucacgggcugcgugaucgcguggaacagcaacaaccucgacuccaaggucgggggcaacuacaacuaccuguaccgccuguuccgcaagagcaaccucaagcccuucgagcgggacaucuccaccgagaucuaccaggccggcagcacccccugcaacgggguggagggcuucaacugcuacuucccccugcaguccuacggguuccagccgaccaacggcgugggguaccagcccuaccggguggucgugcugagcuucgagcuccugcacgcccccgccacggugugcggccccaagaaguccaccaaccuggucaagaacaagugcgugaacuucaacuucaacggccucaccgggaccggcgugcugaccgagagcaacaagaaguuccugccguuccagcaguucgggcgcgacaucgccgacacgaccgacgcgguccgcgacccccagacccuggagauccucgacaucacccccugcagcuucggcgggguguccgugaucacgccgggcaccaacaccagcaaccaggucgccgugcuguaccagggcgugaacugcaccgagguccccguggccauccacgccgaccagcugacgcccaccuggcggguguacuccaccggcagcaacgucuuccagacccgcgccgggugccucaucggcgcggagcacgugaacaacuccuacgagugcgacauccccaucggggccggcaucugcgccagcuaccagacgcagaccaacuccccgcggcgcgcccggagcguggcgucccagagcaucaucgccuacaccaugucccugggcgccgagaacagcgucgccuacuccaacaacagcaucgccauccccaccaacuucacgaucuccgugaccaccgagauccugcccgugagcaugaccaagacgagcgucgacugcaccauguacaucugcggggacuccaccgagugcagcaaccuccugcugcaguacggcuccuucugcacccagcucaaccgcgcgcugacggggaucgccguggagcaggacaagaacacccaggagguguucgcccaggucaagcagaucuacaagacgcccccgaucaaggacuucggcggguucaacuucagccagauccugcccgaccccuccaagcccagcaagcgguccuucaucgaggaccuccuguucaacaaggugacccuggccgacgccggcuucaucaagcaguacggcgacugccucggggacaucgcggcccgcgaccugaucugcgcccagaaguucaacggccugaccgugcucccgccccugcugaccgacgagaugaucgcccaguacaccagcgcccuccuggcggggaccaucacguccggcuggaccuucggggccggcgccgcccugcagauccccuucgcgaugcagauggccuaccgguucaacggcaucggggucacccagaacgugcucuacgagaaccagaagcugaucgccaaccaguucaacagcgccaucggcaagauccaggacucccugagcuccaccgccagcgcgcucgggaagcugcaggacguggucaaccagaacgcccaggcccugaacacgcucgugaagcagcuguccagcaacuucggcgccaucuccagcgugcugaacgacauccucucccgccuggacaaggucgaggccgaggugcagaucgaccggcugaucaccgggcgccuccagagccugcagaccuacgugacccagcagcugauccgggcggccgagauccgcgccagcgccaaccucgccgcgaccaagauguccgagugcguccugggccagagcaagcggguggacuucugcggcaagggguaccaccugauguccuucccccagagcgccccgcacggcguggucuuccuccacgugacguacguccccgcccaggagaagaacuucaccaccgcccccgcgaucugccacgacgggaaggcccacuucccccgcgagggcguguucguguccaacgggacccacugguucgucacgcagcggaacuucuacgagccgcagaucaucaccaccgacaacaccuucgugagcggcaacugcgacguggucaucggcaucgugaacaacacgguguacgacccccugcagcccgagcuggacuccuucaaggaggagcucgacaaguacuucaagaaccacaccagccccgacgucgaccugggggacaucuccggcaucaacgccagcguggugaacauccagaaggagaucgaccgccugaacgaggucgccaagaaccucaacgagucccugaucgaccugcaggagcucgggaaguacgagcaguacaucaaguggccgugguacaucuggcugggcuucaucgccggccugaucgcgaucgugauggugaccaucaugcucugcugcaugaccagcugcugcuccugccugaaggggugcugcagcugcggcuccugcugcaaguucgacgaggacgacagcgagcccguccugaagggggugaagcuccacuacacgugaggacuaguuauaagacugacuagcccgaugggccucccaacgggcccuccuccccuccuugcaccgagauuaauaaaaaaaaaaaaaaaaaaaaaaaaaaaaaaaaaaaaaaaaaaaaaaaaaaaaaaaaaaaaaaaaaaaaaaaaaaaaaaaaaaaaaaaaaaaaaaaaaaaa

SEQ ID NO: 25396 - RNA, 4011 nt, Artificial Sequence
  SARS-CoV-2/Wuhan/WIV05/2019__EPI_ISL_402128 spike protein mRNA gc (1-1273)(Y453F_D614G)
aggagaaagcuuaccauguucguguuccugguccuccugccccuggugagcucccagugcgugaaccucaccacccgcacgcagcugccgcccgccuacaccaacagcuucacccggggcgucuacuaccccgacaagguguuccgcuccagcgugcugcacuccacccaggaccucuuccugcccuucuucagcaacgucacgugguuccacgccauccacguguccgggaccaacggcaccaagcgguucgacaacccggugcugcccuucaacgacggggucuacuucgcgagcaccgagaaguccaacaucauccgcggcuggaucuucgggacgacccucgacagcaagacccagucccugcugaucgugaacaacgccaccaacguggucaucaaggugugcgaguuccaguucugcaacgaccccuuccucggcguguacuaccacaagaacaacaagagcuggauggaguccgaguuccgggucuacagcuccgccaacaacugcacguucgaguacgugagccagcccuuccugauggaccuggagggcaagcaggggaacuucaagaaccuccgcgaguucguguucaagaacaucgacggcuacuucaagaucuacuccaagcacaccccgaucaaccugguccgggaccugccccagggguucagcgcccucgagccccugguggaccugcccaucggcaucaacaucacccgcuuccagacccuccuggcccugcaccgguccuaccucacgccgggggacagcagcuccggcuggaccgcgggcgccgccgccuacuacgugggguaccugcagccccgcaccuuccugcucaaguacaacgagaacggcaccaucacggacgcggucgacugcgcccuggacccccugagcgagaccaagugcacccucaaguccuucaccguggagaaggggaucuaccagacgagcaacuuccgggugcagcccaccgaguccaucguccgcuucccgaacaucaccaaccugugccccuucggcgagguguucaacgccacccgguucgccagcgucuacgccuggaaccgcaagcggaucuccaacugcguggcggacuacagcgugcuguacaacuccgccagcuucuccacguucaagugcuacggcgucagccccaccaagcucaacgaccugugcuucaccaacguguacgccgacuccuucgugauccgcggggacgagguccggcagaucgcccccggccagaccgggaagaucgccgacuacaacuacaagcugccggacgacuucacgggcugcgugaucgcguggaacagcaacaaccucgacuccaaggucgggggcaacuacaacuaccuguuccgccuguuccgcaagagcaaccucaagcccuucgagcgggacaucuccaccgagaucuaccaggccggcagcacccccugcaacgggguggagggcuucaacugcuacuucccccugcaguccuacggguuccagccgaccaacggcgugggguaccagcccuaccggguggucgugcugagcuucgagcuccugcacgcccccgccacggugugcggccccaagaaguccaccaaccuggucaagaacaagugcgugaacuucaacuucaacggccucaccgggaccggcgugcugaccgagagcaacaagaaguuccugccguuccagcaguucgggcgcgacaucgccgacacgaccgacgcgguccgcgacccccagacccuggagauccucgacaucacccccugcagcuucggcgggguguccgugaucacgccgggcaccaacaccagcaaccaggucgccgugcuguaccagggcgugaacugcaccgagguccccguggccauccacgccgaccagcugacgcccaccuggcggguguacuccaccggcagcaacgucuuccagacccgcgccgggugccucaucggcgcggagcacgugaacaacuccuacgagugcgacauccccaucggggccggcaucugcgccagcuaccagacgcagaccaacuccccgcggcgcgcccggagcguggcgucccagagcaucaucgccuacaccaugucccugggcgccgagaacagcgucgccuacuccaacaacagcaucgccauccccaccaacuucacgaucuccgugaccaccgagauccugcccgugagcaugaccaagacgagcgucgacugcaccauguacaucugcggggacuccaccgagugcagcaaccuccugcugcaguacggcuccuucugcacccagcucaaccgcgcgcugacggggaucgccguggagcaggacaagaacacccaggagguguucgcccaggucaagcagaucuacaagacgcccccgaucaaggacuucggcggguucaacuucagccagauccugcccgaccccuccaagcccagcaagcgguccuucaucgaggaccuccuguucaacaaggugacccuggccgacgccggcuucaucaagcaguacggcgacugccucggggacaucgcggcccgcgaccugaucugcgcccagaaguucaacggccugaccgugcucccgccccugcugaccgacgagaugaucgcccaguacaccagcgcccuccuggcggggaccaucacguccggcuggaccuucggggccggcgccgcccugcagauccccuucgcgaugcagauggccuaccgguucaacggcaucggggucacccagaacgugcucuacgagaaccagaagcugaucgccaaccaguucaacagcgccaucggcaagauccaggacucccugagcuccaccgccagcgcgcucgggaagcugcaggacguggucaaccagaacgcccaggcccugaacacgcucgugaagcagcuguccagcaacuucggcgccaucuccagcgugcugaacgacauccucucccgccuggacaaggucgaggccgaggugcagaucgaccggcugaucaccgggcgccuccagagccugcagaccuacgugacccagcagcugauccgggcggccgagauccgcgccagcgccaaccucgccgcgaccaagauguccgagugcguccugggccagagcaagcggguggacuucugcggcaagggguaccaccugauguccuucccccagagcgccccgcacggcguggucuuccuccacgugacguacguccccgcccaggagaagaacuucaccaccgcccccgcgaucugccacgacgggaaggcccacuucccccgcgagggcguguucguguccaacgggacccacugguucgucacgcagcggaacuucuacgagccgcagaucaucaccaccgacaacaccuucgugagcggcaacugcgacguggucaucggcaucgugaacaacacgguguacgacccccugcagcccgagcuggacuccuucaaggaggagcucgacaaguacuucaagaaccacaccagccccgacgucgaccugggggacaucuccggcaucaacgccagcguggugaacauccagaaggagaucgaccgccugaacgaggucgccaagaaccucaacgagucccugaucgaccugcaggagcucgggaaguacgagcaguacaucaaguggccgugguacaucuggcugggcuucaucgccggccugaucgcgaucgugauggugaccaucaugcucugcugcaugaccagcugcugcuccugccugaaggggugcugcagcugcggcuccugcugcaaguucgacgaggacgacagcgagcccguccugaagggggugaagcuccacuacacgugaggacuaguuauaagacugacuagcccgaugggccucccaacgggcccuccuccccuccuugcaccgagauuaauaaaaaaaaaaaaaaaaaaaaaaaaaaaaaaaaaaaaaaaaaaaaaaaaaaaaaaaaaaaaaaaaaaaaaaaaaaaaaaaaaaaaaaaaaaaaaaaaaaaa

SEQ ID NO: 25397 - RNA, 4011 nt, Artificial Sequence
  SARS-CoV-2/Wuhan/WIV05/2019__EPI_ISL_402128 spike protein mRNA gc (1-1273)(D614G_I692V)
aggagaaagcuuaccauguucguguuccugguccuccugccccuggugagcucccagugcgugaaccucaccacccgcacgcagcugccgcccgccuacaccaacagcuucacccggggcgucuacuaccccgacaagguguuccgcuccagcgugcugcacuccacccaggaccucuuccugcccuucuucagcaacgucacgugguuccacgccauccacguguccgggaccaacggcaccaagcgguucgacaacccggugcugcccuucaacgacggggucuacuucgcgagcaccgagaaguccaacaucauccgcggcuggaucuucgggacgacccucgacagcaagacccagucccugcugaucgugaacaacgccaccaacguggucaucaaggugugcgaguuccaguucugcaacgaccccuuccucggcguguacuaccacaagaacaacaagagcuggauggaguccgaguuccgggucuacagcuccgccaacaacugcacguucgaguacgugagccagcccuuccugauggaccuggagggcaagcaggggaacuucaagaaccuccgcgaguucguguucaagaacaucgacggcuacuucaagaucuacuccaagcacaccccgaucaaccugguccgggaccugccccagggguucagcgcccucgagccccugguggaccugcccaucggcaucaacaucacccgcuuccagacccuccuggcccugcaccgguccuaccucacgccgggggacagcagcuccggcuggaccgcgggcgccgccgccuacuacgugggguaccugcagccccgcaccuuccugcucaaguacaacgagaacggcaccaucacggacgcggucgacugcgcccuggacccccugagcgagaccaagugcacccucaaguccuucaccguggagaaggggaucuaccagacgagcaacuuccgggugcagcccaccgaguccaucguccgcuucccgaacaucaccaaccugugccccuucggcgagguguucaacgccacccgguucgccagcgucuacgccuggaaccgcaagcggaucuccaacugcguggcggacuacagcgugcuguacaacuccgccagcuucuccacguucaagugcuacggcgucagccccaccaagcucaacgaccugugcuucaccaacguguacgccgacuccuucgugauccgcggggacgagguccggcagaucgcccccggccagaccgggaagaucgccgacuacaacuacaagcugccggacgacuucacgggcugcgugaucgcguggaacagcaacaaccucgacuccaaggucgggggcaacuacaacuaccuguaccgccuguuccgcaagagcaaccucaagcccuucgagcgggacaucuccaccgagaucuaccaggccggcagcacccccugcaacgggguggagggcuucaacugcuacuucccccugcaguccuacggguuccagccgaccaacggcgugggguaccagcccuaccggguggucgugcugagcuucgagcuccugcacgcccccgccacggugugcggccccaagaaguccaccaaccuggucaagaacaagugcgugaacuucaacuucaacggccucaccgggaccggcgugcugaccgagagcaacaagaaguuccugccguuccagcaguucgggcgcgacaucgccgacacgaccgacgcgguccgcgacccccagacccuggagauccucgacaucacccccugcagcuucggcgggguguccgugaucacgccgggcaccaacaccagcaaccaggucgccgugcuguaccagggcgugaacugcaccgagguccccguggccauccacgccgaccagcugacgcccaccuggcggguguacuccaccggcagcaacgucuuccagacccgcgccgggugccucaucggcgcggagcacgugaacaacuccuacgagugcgacauccccaucggggccggcaucugcgccagcuaccagacgcagaccaacuccccgcggcgcgcccggagcguggcgucccagagcgucaucgccuacaccaugucccugggcgccgagaacagcgucgccuacuccaacaacagcaucgccauccccaccaacuucacgaucuccgugaccaccgagauccugcccgugagcaugaccaagacgagcgucgacugcaccauguacaucugcggggacuccaccgagugcagcaaccuccugcugcaguacggcuccuucugcacccagcucaaccgcgcgcugacggggaucgccguggagcaggacaagaacacccaggagguguucgcccaggucaagcagaucuacaagacgcccccgaucaaggacuucggcggguucaacuucagccagauccugcccgaccccuccaagcccagcaagcgguccuucaucgaggaccuccuguucaacaaggugacccuggccgacgccggcuucaucaagcaguacggcgacugccucggggacaucgcggcccgcgaccugaucugcgcccagaaguucaacggccugaccgugcucccgccccugcugaccgacgagaugaucgcccaguacaccagcgcccuccuggcggggaccaucacguccggcuggaccuucggggccggcgccgcccugcagauccccuucgcgaugcagauggccuaccgguucaacggcaucggggucacccagaacgugcucuacgagaaccagaagcugaucgccaaccaguucaacagcgccaucggcaagauccaggacucccugagcuccaccgccagcgcgcucgggaagcugcaggacguggucaaccagaacgcccaggcccugaacacgcucgugaagcagcuguccagcaacuucggcgccaucuccagcgugcugaacgacauccucucccgccuggacaaggucgaggccgaggugcagaucgaccggcugaucaccgggcgccuccagagccugcagaccuacgugacccagcagcugauccgggcggccgagauccgcgccagcgccaaccucgccgcgaccaagauguccgagugcguccugggccagagcaagcggguggacuucugcggcaagggguaccaccugauguccuucccccagagcgccccgcacggcguggucuuccuccacgugacguacguccccgcccaggagaagaacuucaccaccgcccccgcgaucugccacgacgggaaggcccacuucccccgcgagggcguguucguguccaacgggacccacugguucgucacgcagcggaacuucuacgagccgcagaucaucaccaccgacaacaccuucgugagcggcaacugcgacguggucaucggcaucgugaacaacacgguguacgacccccugcagcccgagcuggacuccuucaaggaggagcucgacaaguacuucaagaaccacaccagccccgacgucgaccugggggacaucuccggcaucaacgccagcguggugaacauccagaaggagaucgaccgccugaacgaggucgccaagaaccucaacgagucccugaucgaccugcaggagcucgggaaguacgagcaguacaucaaguggccgugguacaucuggcugggcuucaucgccggccugaucgcgaucgugauggugaccaucaugcucugcugcaugaccagcugcugcuccugccugaaggggugcugcagcugcggcuccugcugcaaguucgacgaggacgacagcgagcccguccugaagggggugaagcuccacuacacgugaggacuaguuauaagacugacuagcccgaugggccucccaacgggcccuccuccccuccuugcaccgagauuaauaaaaaaaaaaaaaaaaaaaaaaaaaaaaaaaaaaaaaaaaaaaaaaaaaaaaaaaaaaaaaaaaaaaaaaaaaaaaaaaaaaaaaaaaaaaaaaaaaaaa

SEQ ID NO: 25398 - RNA, 4011 nt, Artificial Sequence
  SARS-CoV-2/Wuhan/WIV05/2019__EPI_ISL_402128 spike protein mRNA gc (1-1273)(D614G_M1229I)
aggagaaagcuuaccauguucguguuccugguccuccugccccuggugagcucccagugcgugaaccucaccacccgcacgcagcugccgcccgccuacaccaacagcuucacccggggcgucuacuaccccgacaagguguuccgcuccagcgugcugcacuccacccaggaccucuuccugcccuucuucagcaacgucacgugguuccacgccauccacguguccgggaccaacggcaccaagcgguucgacaacccggugcugcccuucaacgacggggucuacuucgcgagcaccgagaaguccaacaucauccgcggcuggaucuucgggacgacccucgacagcaagacccagucccugcugaucgugaacaacgccaccaacguggucaucaaggugugcgaguuccaguucugcaacgaccccuuccucggcguguacuaccacaagaacaacaagagcuggauggaguccgaguuccgggucuacagcuccgccaacaacugcacguucgaguacgugagccagcccuuccugauggaccuggagggcaagcaggggaacuucaagaaccuccgcgaguucguguucaagaacaucgacggcuacuucaagaucuacuccaagcacaccccgaucaaccugguccgggaccugccccagggguucagcgcccucgagccccugguggaccugcccaucggcaucaacaucacccgcuuccagacccuccuggcccugcaccgguccuaccucacgccgggggacagcagcuccggcuggaccgcgggcgccgccgccuacuacgugggguaccugcagccccgcaccuuccugcucaaguacaacgagaacggcaccaucacggacgcggucgacugcgcccuggacccccugagcgagaccaagugcacccucaaguccuucaccguggagaaggggaucuaccagacgagcaacuuccgggugcagcccaccgaguccaucguccgcuucccgaacaucaccaaccugugccccuucggcgagguguucaacgccacccgguucgccagcgucuacgccuggaaccgcaagcggaucuccaacugcguggcggacuacagcgugcuguacaacuccgccagcuucuccacguucaagugcuacggcgucagccccaccaagcucaacgaccugugcuucaccaacguguacgccgacuccuucgugauccgcggggacgagguccggcagaucgcccccggccagaccgggaagaucgccgacuacaacuacaagcugccggacgacuucacgggcugcgugaucgcguggaacagcaacaaccucgacuccaaggucgggggcaacuacaacuaccuguaccgccuguuccgcaagagcaaccucaagcccuucgagcgggacaucuccaccgagaucuaccaggccggcagcacccccugcaacgggguggagggcuucaacugcuacuucccccugcaguccuacggguuccagccgaccaacggcgugggguaccagcccuaccggguggucgugcugagcuucgagcuccugcacgcccccgccacggugugcggccccaagaaguccaccaaccuggucaagaacaagugcgugaacuucaacuucaacggccucaccgggaccggcgugcugaccgagagcaacaagaaguuccugccguuccagcaguucgggcgcgacaucgccgacacgaccgacgcgguccgcgacccccagacccuggagauccucgacaucacccccugcagcuucggcgggguguccgugaucacgccgggcaccaacaccagcaaccaggucgccgugcuguaccagggcgugaacugcaccgagguccccguggccauccacgccgaccagcugacgcccaccuggcggguguacuccaccggcagcaacgucuuccagacccgcgccgggugccucaucggcgcggagcacgugaacaacuccuacgagugcgacauccccaucggggccggcaucugcgccagcuaccagacgcagaccaacuccccgcggcgcgcccggagcguggcgucccagagcaucaucgccuacaccaugucccugggcgccgagaacagcgucgccuacuccaacaacagcaucgccauccccaccaacuucacgaucuccgugaccaccgagauccugcccgugagcaugaccaagacgagcgucgacugcaccauguacaucugcggggacuccaccgagugcagcaaccuccugcugcaguacggcuccuucugcacccagcucaaccgcgcgcugacggggaucgccguggagcaggacaagaacacccaggagguguucgcccaggucaagcagaucuacaagacgcccccgaucaaggacuucggcggguucaacuucagccagauccugcccgaccccuccaagcccagcaagcgguccuucaucgaggaccuccuguucaacaaggugacccuggccgacgccggcuucaucaagcaguacggcgacugccucggggacaucgcggcccgcgaccugaucugcgcccagaaguucaacggccugaccgugcucccgccccugcugaccgacgagaugaucgcccaguacaccagcgcccuccuggcggggaccaucacguccggcuggaccuucggggccggcgccgcccugcagauccccuucgcgaugcagauggccuaccgguucaacggcaucggggucacccagaacgugcucuacgagaaccagaagcugaucgccaaccaguucaacagcgccaucggcaagauccaggacucccugagcuccaccgccagcgcgcucgggaagcugcaggacguggucaaccagaacgcccaggcccugaacacgcucgugaagcagcuguccagcaacuucggcgccaucuccagcgugcugaacgacauccucucccgccuggacaaggucgaggccgaggugcagaucgaccggcugaucaccgggcgccuccagagccugcagaccuacgugacccagcagcugauccgggcggccgagauccgcgccagcgccaaccucgccgcgaccaagauguccgagugcguccugggccagagcaagcggguggacuucugcggcaagggguaccaccugauguccuucccccagagcgccccgcacggcguggucuuccuccacgugacguacguccccgcccaggagaagaacuucaccaccgcccccgcgaucugccacgacgggaaggcccacuucccccgcgagggcguguucguguccaacgggacccacugguucgucacgcagcggaacuucuacgagccgcagaucaucaccaccgacaacaccuucgugagcggcaacugcgacguggucaucggcaucgugaacaacacgguguacgacccccugcagcccgagcuggacuccuucaaggaggagcucgacaaguacuucaagaaccacaccagccccgacgucgaccugggggacaucuccggcaucaacgccagcguggugaacauccagaaggagaucgaccgccugaacgaggucgccaagaaccucaacgagucccugaucgaccugcaggagcucgggaaguacgagcaguacaucaaguggccgugguacaucuggcugggcuucaucgccggccugaucgcgaucgugaucgugaccaucaugcucugcugcaugaccagcugcugcuccugccugaaggggugcugcagcugcggcuccugcugcaaguucgacgaggacgacagcgagcccguccugaagggggugaagcuccacuacacgugaggacuaguuauaagacugacuagcccgaugggccucccaacgggcccuccuccccuccuugcaccgagauuaauaaaaaaaaaaaaaaaaaaaaaaaaaaaaaaaaaaaaaaaaaaaaaaaaaaaaaaaaaaaaaaaaaaaaaaaaaaaaaaaaaaaaaaaaaaaaaaaaaaaa

SEQ ID NO: 25399 - RNA, 4005 nt, Artificial Sequence
  SARS-CoV-2/Wuhan/WIV05/2019__EPI_ISL_402128 spike protein mRNA gc (1-1273)(H69del_V70del_A222V_Y453F_S477N_D614G_I692V)
aggagaaagcuuaccauguucguguuccugguccuccugccccuggugagcucccagugcgugaaccucaccacccgcacgcagcugccgcccgccuacaccaacagcuucacccggggcgucuacuaccccgacaagguguuccgcuccagcgugcugcacuccacccaggaccucuuccugcccuucuucagcaacgucacgugguuccacgccaucuccgggaccaacggcaccaagcgguucgacaacccggugcugcccuucaacgacggggucuacuucgcgagcaccgagaaguccaacaucauccgcggcuggaucuucgggacgacccucgacagcaagacccagucccugcugaucgugaacaacgccaccaacguggucaucaaggugugcgaguuccaguucugcaacgaccccuuccucggcguguacuaccacaagaacaacaagagcuggauggaguccgaguuccgggucuacagcuccgccaacaacugcacguucgaguacgugagccagcccuuccugauggaccuggagggcaagcaggggaacuucaagaaccuccgcgaguucguguucaagaacaucgacggcuacuucaagaucuacuccaagcacaccccgaucaaccugguccgggaccugccccagggguucagcguccucgagccccugguggaccugcccaucggcaucaacaucacccgcuuccagacccuccuggcccugcaccgguccuaccucacgccgggggacagcagcuccggcuggaccgcgggcgccgccgccuacuacgugggguaccugcagccccgcaccuuccugcucaaguacaacgagaacggcaccaucacggacgcggucgacugcgcccuggacccccugagcgagaccaagugcacccucaaguccuucaccguggagaaggggaucuaccagacgagcaacuuccgggugcagcccaccgaguccaucguccgcuucccgaacaucaccaaccugugccccuucggcgagguguucaacgccacccgguucgccagcgucuacgccuggaaccgcaagcggaucuccaacugcguggcggacuacagcgugcuguacaacuccgccagcuucuccacguucaagugcuacggcgucagccccaccaagcucaacgaccugugcuucaccaacguguacgccgacuccuucgugauccgcggggacgagguccggcagaucgcccccggccagaccgggaagaucgccgacuacaacuacaagcugccggacgacuucacgggcugcgugaucgcguggaacagcaacaaccucgacuccaaggucgggggcaacuacaacuaccuguuccgccuguuccgcaagagcaaccucaagcccuucgagcgggacaucuccaccgagaucuaccaggccggcaacacccccugcaacgggguggagggcuucaacugcuacuucccccugcaguccuacggguuccagccgaccaacggcgugggguaccagcccuaccggguggucgugcugagcuucgagcuccugcacgcccccgccacggugugcggccccaagaaguccaccaaccuggucaagaacaagugcgugaacuucaacuucaacggccucaccgggaccggcgugcugaccgagagcaacaagaaguuccugccguuccagcaguucgggcgcgacaucgccgacacgaccgacgcgguccgcgacccccagacccuggagauccucgacaucacccccugcagcuucggcgggguguccgugaucacgccgggcaccaacaccagcaaccaggucgccgugcuguaccagggcgugaacugcaccgagguccccguggccauccacgccgaccagcugacgcccaccuggcggguguacuccaccggcagcaacgucuuccagacccgcgccgggugccucaucggcgcggagcacgugaacaacuccuacgagugcgacauccccaucggggccggcaucugcgccagcuaccagacgcagaccaacuccccgcggcgcgcccggagcguggcgucccagagcgucaucgccuacaccaugucccugggcgccgagaacagcgucgccuacuccaacaacagcaucgccauccccaccaacuucacgaucuccgugaccaccgagauccugcccgugagcaugaccaagacgagcgucgacugcaccauguacaucugcggggacuccaccgagugcagcaaccuccugcugcaguacggcuccuucugcacccagcucaaccgcgcgcugacggggaucgccguggagcaggacaagaacacccaggagguguucgcccaggucaagcagaucuacaagacgcccccgaucaaggacuucggcggguucaacuucagccagauccugcccgaccccuccaagcccagcaagcgguccuucaucgaggaccuccuguucaacaaggugacccuggccgacgccggcuucaucaagcaguacggcgacugccucggggacaucgcggcccgcgaccugaucugcgcccagaaguucaacggccugaccgugcucccgccccugcugaccgacgagaugaucgcccaguacaccagcgcccuccuggcggggaccaucacguccggcuggaccuucggggccggcgccgcccugcagauccccuucgcgaugcagauggccuaccgguucaacggcaucggggucacccagaacgugcucuacgagaaccagaagcugaucgccaaccaguucaacagcgccaucggcaagauccaggacucccugagcuccaccgccagcgcgcucgggaagcugcaggacguggucaaccagaacgcccaggcccugaacacgcucgugaagcagcuguccagcaacuucggcgccaucuccagcgugcugaacgacauccucucccgccuggacaaggucgaggccgaggugcagaucgaccggcugaucaccgggcgccuccagagccugcagaccuacgugacccagcagcugauccgggcggccgagauccgcgccagcgccaaccucgccgcgaccaagauguccgagugcguccugggccagagcaagcggguggacuucugcggcaagggguaccaccugauguccuucccccagagcgccccgcacggcguggucuuccuccacgugacguacguccccgcccaggagaagaacuucaccaccgcccccgcgaucugccacgacgggaaggcccacuucccccgcgagggcguguucguguccaacgggacccacugguucgucacgcagcggaacuucuacgagccgcagaucaucaccaccgacaacaccuucgugagcggcaacugcgacguggucaucggcaucgugaacaacacgguguacgacccccugcagcccgagcuggacuccuucaaggaggagcucgacaaguacuucaagaaccacaccagccccgacgucgaccugggggacaucuccggcaucaacgccagcguggugaacauccagaaggagaucgaccgccugaacgaggucgccaagaaccucaacgagucccugaucgaccugcaggagcucgggaaguacgagcaguacaucaaguggccgugguacaucuggcugggcuucaucgccggccugaucgcgaucgugauggugaccaucaugcucugcugcaugaccagcugcugcuccugccugaaggggugcugcagcugcggcuccugcugcaaguucgacgaggacgacagcgagcccguccugaagggggugaagcuccacuacacgugaggacuaguuauaagacugacuagcccgaugggccucccaacgggcccuccuccccuccuugcaccgagauuaauaaaaaaaaaaaaaaaaaaaaaaaaaaaaaaaaaaaaaaaaaaaaaaaaaaaaaaaaaaaaaaaaaaaaaaaaaaaaaaaaaaaaaaaaaaaaaaaaaaaa

SEQ ID NO: 25400 - RNA, 4005 nt, Artificial Sequence
  SARS-CoV-2/Wuhan/WIV05/2019__EPI_ISL_402128 spike protein mRNA gc (1-1273)(H69del_V70del_Y453F_D614G_I692V_M1229I)
aggagaaagcuuaccauguucguguuccugguccuccugccccuggugagcucccagugcgugaaccucaccacccgcacgcagcugccgcccgccuacaccaacagcuucacccggggcgucuacuaccccgacaagguguuccgcuccagcgugcugcacuccacccaggaccucuuccugcccuucuucagcaacgucacgugguuccacgccaucuccgggaccaacggcaccaagcgguucgacaacccggugcugcccuucaacgacggggucuacuucgcgagcaccgagaaguccaacaucauccgcggcuggaucuucgggacgacccucgacagcaagacccagucccugcugaucgugaacaacgccaccaacguggucaucaaggugugcgaguuccaguucugcaacgaccccuuccucggcguguacuaccacaagaacaacaagagcuggauggaguccgaguuccgggucuacagcuccgccaacaacugcacguucgaguacgugagccagcccuuccugauggaccuggagggcaagcaggggaacuucaagaaccuccgcgaguucguguucaagaacaucgacggcuacuucaagaucuacuccaagcacaccccgaucaaccugguccgggaccugccccagggguucagcgcccucgagccccugguggaccugcccaucggcaucaacaucacccgcuuccagacccuccuggcccugcaccgguccuaccucacgccgggggacagcagcuccggcuggaccgcgggcgccgccgccuacuacgugggguaccugcagccccgcaccuuccugcucaaguacaacgagaacggcaccaucacggacgcggucgacugcgcccuggacccccugagcgagaccaagugcacccucaaguccuucaccguggagaaggggaucuaccagacgagcaacuuccgggugcagcccaccgaguccaucguccgcuucccgaacaucaccaaccugugccccuucggcgagguguucaacgccacccgguucgccagcgucuacgccuggaaccgcaagcggaucuccaacugcguggcggacuacagcgugcuguacaacuccgccagcuucuccacguucaagugcuacggcgucagccccaccaagcucaacgaccugugcuucaccaacguguacgccgacuccuucgugauccgcggggacgagguccggcagaucgcccccggccagaccgggaagaucgccgacuacaacuacaagcugccggacgacuucacgggcugcgugaucgcguggaacagcaacaaccucgacuccaaggucgggggcaacuacaacuaccuguuccgccuguuccgcaagagcaaccucaagcccuucgagcgggacaucuccaccgagaucuaccaggccggcagcacccccugcaacgggguggagggcuucaacugcuacuucccccugcaguccuacggguuccagccgaccaacggcgugggguaccagcccuaccggguggucgugcugagcuucgagcuccugcacgcccccgccacggugugcggccccaagaaguccaccaaccuggucaagaacaagugcgugaacuucaacuucaacggccucaccgggaccggcgugcugaccgagagcaacaagaaguuccugccguuccagcaguucgggcgcgacaucgccgacacgaccgacgcgguccgcgacccccagacccuggagauccucgacaucacccccugcagcuucggcgggguguccgugaucacgccgggcaccaacaccagcaaccaggucgccgugcuguaccagggcgugaacugcaccgagguccccguggccauccacgccgaccagcugacgcccaccuggcggguguacuccaccggcagcaacgucuuccagacccgcgccgggugccucaucggcgcggagcacgugaacaacuccuacgagugcgacauccccaucggggccggcaucugcgccagcuaccagacgcagaccaacuccccgcggcgcgcccggagcguggcgucccagagcgugaucgccuacaccaugucccugggcgccgagaacagcgucgccuacuccaacaacagcaucgccauccccaccaacuucacgaucuccgugaccaccgagauccugcccgugagcaugaccaagacgagcgucgacugcaccauguacaucugcggggacuccaccgagugcagcaaccuccugcugcaguacggcuccuucugcacccagcucaaccgcgcgcugacggggaucgccguggagcaggacaagaacacccaggagguguucgcccaggucaagcagaucuacaagacgcccccgaucaaggacuucggcggguucaacuucagccagauccugcccgaccccuccaagcccagcaagcgguccuucaucgaggaccuccuguucaacaaggugacccuggccgacgccggcuucaucaagcaguacggcgacugccucggggacaucgcggcccgcgaccugaucugcgcccagaaguucaacggccugaccgugcucccgccccugcugaccgacgagaugaucgcccaguacaccagcgcccuccuggcggggaccaucacguccggcuggaccuucggggccggcgccgcccugcagauccccuucgcgaugcagauggccuaccgguucaacggcaucggggucacccagaacgugcucuacgagaaccagaagcugaucgccaaccaguucaacagcgccaucggcaagauccaggacucccugagcuccaccgccagcgcgcucgggaagcugcaggacguggucaaccagaacgcccaggcccugaacacgcucgugaagcagcuguccagcaacuucggcgccaucuccagcgugcugaacgacauccucucccgccuggacaaggucgaggccgaggugcagaucgaccggcugaucaccgggcgccuccagagccugcagaccuacgugacccagcagcugauccgggcggccgagauccgcgccagcgccaaccucgccgcgaccaagauguccgagugcguccugggccagagcaagcggguggacuucugcggcaagggguaccaccugauguccuucccccagagcgccccgcacggcguggucuuccuccacgugacguacguccccgcccaggagaagaacuucaccaccgcccccgcgaucugccacgacgggaaggcccacuucccccgcgagggcguguucguguccaacgggacccacugguucgucacgcagcggaacuucuacgagccgcagaucaucaccaccgacaacaccuucgugagcggcaacugcgacguggucaucggcaucgugaacaacacgguguacgacccccugcagcccgagcuggacuccuucaaggaggagcucgacaaguacuucaagaaccacaccagccccgacgucgaccugggggacaucuccggcaucaacgccagcguggugaacauccagaaggagaucgaccgccugaacgaggucgccaagaaccucaacgagucccugaucgaccugcaggagcucgggaaguacgagcaguacaucaaguggccgugguacaucuggcugggcuucaucgccggccugaucgcgaucgugaucgugaccaucaugcucugcugcaugaccagcugcugcuccugccugaaggggugcugcagcugcggcuccugcugcaaguucgacgaggacgacagcgagcccguccugaagggggugaagcuccacuacacgugaggacuaguuauaagacugacuagcccgaugggccucccaacgggcccuccuccccuccuugcaccgagauuaauaaaaaaaaaaaaaaaaaaaaaaaaaaaaaaaaaaaaaaaaaaaaaaaaaaaaaaaaaaaaaaaaaaaaaaaaaaaaaaaaaaaaaaaaaaaaaaaaaaaa

SEQ ID NO: 25401 - RNA, 4002 nt, Artificial Sequence
  SARS-CoV-2/Wuhan/WIV05/2019__EPI_ISL_402128 spike protein mRNA gc (1-1273)(H69del_V70del_Y144del_N501Y_A570D_D614G_P681H_T716I_S982 A_D1118H)
aggagaaagcuuaccauguucguguuccugguccuccugccccuggugagcucccagugcgugaaccucaccacccgcacgcagcugccgcccgccuacaccaacagcuucacccggggcgucuacuaccccgacaagguguuccgcuccagcgugcugcacuccacccaggaccucuuccugcccuucuucagcaacgucacgugguuccacgccaucuccgggaccaacggcaccaagcgguucgacaacccggugcugcccuucaacgacggggucuacuucgcgagcaccgagaaguccaacaucauccgcggcuggaucuucgggacgacccucgacagcaagacccagucccugcugaucgugaacaacgccaccaacguggucaucaaggugugcgaguuccaguucugcaacgaccccuuccucggcguguaccacaagaacaacaagagcuggauggaguccgaguuccgggucuacagcuccgccaacaacugcacguucgaguacgugagccagcccuuccugauggaccuggagggcaagcaggggaacuucaagaaccuccgcgaguucguguucaagaacaucgacggcuacuucaagaucuacuccaagcacaccccgaucaaccugguccgggaccugccccagggguucagcgcccucgagccccugguggaccugcccaucggcaucaacaucacccgcuuccagacccuccuggcccugcaccgguccuaccucacgccgggggacagcagcuccggcuggaccgcgggcgccgccgccuacuacgugggguaccugcagccccgcaccuuccugcucaaguacaacgagaacggcaccaucacggacgcggucgacugcgcccuggacccccugagcgagaccaagugcacccucaaguccuucaccguggagaaggggaucuaccagacgagcaacuuccgggugcagcccaccgaguccaucguccgcuucccgaacaucaccaaccugugccccuucggcgagguguucaacgccacccgguucgccagcgucuacgccuggaaccgcaagcggaucuccaacugcguggcggacuacagcgugcuguacaacuccgccagcuucuccacguucaagugcuacggcgucagccccaccaagcucaacgaccugugcuucaccaacguguacgccgacuccuucgugauccgcggggacgagguccggcagaucgcccccggccagaccgggaagaucgccgacuacaacuacaagcugccggacgacuucacgggcugcgugaucgcguggaacagcaacaaccucgacuccaaggucgggggcaacuacaacuaccuguaccgccuguuccgcaagagcaaccucaagcccuucgagcgggacaucuccaccgagaucuaccaggccggcagcacccccugcaacgggguggagggcuucaacugcuacuucccccugcaguccuacggguuccagccgaccuacggcgugggguaccagcccuaccggguggucgugcugagcuucgagcuccugcacgcccccgccacggugugcggccccaagaaguccaccaaccuggucaagaacaagugcgugaacuucaacuucaacggccucaccgggaccggcgugcugaccgagagcaacaagaaguuccugccguuccagcaguucgggcgcgacaucgacgacacgaccgacgcgguccgcgacccccagacccuggagauccucgacaucacccccugcagcuucggcgggguguccgugaucacgccgggcaccaacaccagcaaccaggucgccgugcuguaccagggcgugaacugcaccgagguccccguggccauccacgccgaccagcugacgcccaccuggcggguguacuccaccggcagcaacgucuuccagacccgcgccgggugccucaucggcgcggagcacgugaacaacuccuacgagugcgacauccccaucggggccggcaucugcgccagcuaccagacgcagaccaacucccaccggcgcgcccggagcguggcgucccagagcaucaucgccuacaccaugucccugggcgccgagaacagcgucgccuacuccaacaacagcaucgccauccccaucaacuucacgaucuccgugaccaccgagauccugcccgugagcaugaccaagacgagcgucgacugcaccauguacaucugcggggacuccaccgagugcagcaaccuccugcugcaguacggcuccuucugcacccagcucaaccgcgcgcugacggggaucgccguggagcaggacaagaacacccaggagguguucgcccaggucaagcagaucuacaagacgcccccgaucaaggacuucggcggguucaacuucagccagauccugcccgaccccuccaagcccagcaagcgguccuucaucgaggaccuccuguucaacaaggugacccuggccgacgccggcuucaucaagcaguacggcgacugccucggggacaucgcggcccgcgaccugaucugcgcccagaaguucaacggccugaccgugcucccgccccugcugaccgacgagaugaucgcccaguacaccagcgcccuccuggcggggaccaucacguccggcuggaccuucggggccggcgccgcccugcagauccccuucgcgaugcagauggccuaccgguucaacggcaucggggucacccagaacgugcucuacgagaaccagaagcugaucgccaaccaguucaacagcgccaucggcaagauccaggacucccugagcuccaccgccagcgcgcucgggaagcugcaggacguggucaaccagaacgcccaggcccugaacacgcucgugaagcagcuguccagcaacuucggcgccaucuccagcgugcugaacgacauccucgcccgccuggacaaggucgaggccgaggugcagaucgaccggcugaucaccgggcgccuccagagccugcagaccuacgugacccagcagcugauccgggcggccgagauccgcgccagcgccaaccucgccgcgaccaagauguccgagugcguccugggccagagcaagcggguggacuucugcggcaagggguaccaccugauguccuucccccagagcgccccgcacggcguggucuuccuccacgugacguacguccccgcccaggagaagaacuucaccaccgcccccgcgaucugccacgacgggaaggcccacuucccccgcgagggcguguucguguccaacgggacccacugguucgucacgcagcggaacuucuacgagccgcagaucaucaccacccacaacaccuucgugagcggcaacugcgacguggucaucggcaucgugaacaacacgguguacgacccccugcagcccgagcuggacuccuucaaggaggagcucgacaaguacuucaagaaccacaccagccccgacgucgaccugggggacaucuccggcaucaacgccagcguggugaacauccagaaggagaucgaccgccugaacgaggucgccaagaaccucaacgagucccugaucgaccugcaggagcucgggaaguacgagcaguacaucaaguggccgugguacaucuggcugggcuucaucgccggccugaucgcgaucgugauggugaccaucaugcucugcugcaugaccagcugcugcuccugccugaaggggugcugcagcugcggcuccugcugcaaguucgacgaggacgacagcgagcccguccugaagggggugaagcuccacuacacgugaggacuaguuauaagacugacuagcccgaugggccucccaacgggcccuccuccccuccuugcaccgagauuaauaaaaaaaaaaaaaaaaaaaaaaaaaaaaaaaaaaaaaaaaaaaaaaaaaaaaaaaaaaaaaaaaaaaaaaaaaaaaaaaaaaaaaaaaaaaaaaaaaaaa

SEQ ID NO: 25402 - RNA, 4011 nt, Artificial Sequence
  SARS-CoV-2/Wuhan/WIV05/2019__EPI_ISL_402128 spike protein mRNA gc (1-1273)(K417N_E484K_N501Y_D614G)
aggagaaagcuuaccauguucguguuccugguccuccugccccuggugagcucccagugcgugaaccucaccacccgcacgcagcugccgcccgccuacaccaacagcuucacccggggcgucuacuaccccgacaagguguuccgcuccagcgugcugcacuccacccaggaccucuuccugcccuucuucagcaacgucacgugguuccacgccauccacguguccgggaccaacggcaccaagcgguucgacaacccggugcugcccuucaacgacggggucuacuucgcgagcaccgagaaguccaacaucauccgcggcuggaucuucgggacgacccucgacagcaagacccagucccugcugaucgugaacaacgccaccaacguggucaucaaggugugcgaguuccaguucugcaacgaccccuuccucggcguguacuaccacaagaacaacaagagcuggauggaguccgaguuccgggucuacagcuccgccaacaacugcacguucgaguacgugagccagcccuuccugauggaccuggagggcaagcaggggaacuucaagaaccuccgcgaguucguguucaagaacaucgacggcuacuucaagaucuacuccaagcacaccccgaucaaccugguccgggaccugccccagggguucagcgcccucgagccccugguggaccugcccaucggcaucaacaucacccgcuuccagacccuccuggcccugcaccgguccuaccucacgccgggggacagcagcuccggcuggaccgcgggcgccgccgccuacuacgugggguaccugcagccccgcaccuuccugcucaaguacaacgagaacggcaccaucacggacgcggucgacugcgcccuggacccccugagcgagaccaagugcacccucaaguccuucaccguggagaaggggaucuaccagacgagcaacuuccgggugcagcccaccgaguccaucguccgcuucccgaacaucaccaaccugugccccuucggcgagguguucaacgccacccgguucgccagcgucuacgccuggaaccgcaagcggaucuccaacugcguggcggacuacagcgugcuguacaacuccgccagcuucuccacguucaagugcuacggcgucagccccaccaagcucaacgaccugugcuucaccaacguguacgccgacuccuucgugauccgcggggacgagguccggcagaucgcccccggccagaccgggaacaucgccgacuacaacuacaagcugccggacgacuucacgggcugcgugaucgcguggaacagcaacaaccucgacuccaaggucgggggcaacuacaacuaccuguaccgccuguuccgcaagagcaaccucaagcccuucgagcgggacaucuccaccgagaucuaccaggccggcagcacccccugcaacggggugaagggcuucaacugcuacuucccccugcaguccuacggguuccagccgaccuacggcgugggguaccagcccuaccggguggucgugcugagcuucgagcuccugcacgcccccgccacggugugcggccccaagaaguccaccaaccuggucaagaacaagugcgugaacuucaacuucaacggccucaccgggaccggcgugcugaccgagagcaacaagaaguuccugccguuccagcaguucgggcgcgacaucgccgacacgaccgacgcgguccgcgacccccagacccuggagauccucgacaucacccccugcagcuucggcgggguguccgugaucacgccgggcaccaacaccagcaaccaggucgccgugcuguaccagggcgugaacugcaccgagguccccguggccauccacgccgaccagcugacgcccaccuggcggguguacuccaccggcagcaacgucuuccagacccgcgccgggugccucaucggcgcggagcacgugaacaacuccuacgagugcgacauccccaucggggccggcaucugcgccagcuaccagacgcagaccaacuccccgcggcgcgcccggagcguggcgucccagagcaucaucgccuacaccaugucccugggcgccgagaacagcgucgccuacuccaacaacagcaucgccauccccaccaacuucacgaucuccgugaccaccgagauccugcccgugagcaugaccaagacgagcgucgacugcaccauguacaucugcggggacuccaccgagugcagcaaccuccugcugcaguacggcuccuucugcacccagcucaaccgcgcgcugacggggaucgccguggagcaggacaagaacacccaggagguguucgcccaggucaagcagaucuacaagacgcccccgaucaaggacuucggcggguucaacuucagccagauccugcccgaccccuccaagcccagcaagcgguccuucaucgaggaccuccuguucaacaaggugacccuggccgacgccggcuucaucaagcaguacggcgacugccucggggacaucgcggcccgcgaccugaucugcgcccagaaguucaacggccugaccgugcucccgccccugcugaccgacgagaugaucgcccaguacaccagcgcccuccuggcggggaccaucacguccggcuggaccuucggggccggcgccgcccugcagauccccuucgcgaugcagauggccuaccgguucaacggcaucggggucacccagaacgugcucuacgagaaccagaagcugaucgccaaccaguucaacagcgccaucggcaagauccaggacucccugagcuccaccgccagcgcgcucgggaagcugcaggacguggucaaccagaacgcccaggcccugaacacgcucgugaagcagcuguccagcaacuucggcgccaucuccagcgugcugaacgacauccucucccgccuggacaaggucgaggccgaggugcagaucgaccggcugaucaccgggcgccuccagagccugcagaccuacgugacccagcagcugauccgggcggccgagauccgcgccagcgccaaccucgccgcgaccaagauguccgagugcguccugggccagagcaagcggguggacuucugcggcaagggguaccaccugauguccuucccccagagcgccccgcacggcguggucuuccuccacgugacguacguccccgcccaggagaagaacuucaccaccgcccccgcgaucugccacgacgggaaggcccacuucccccgcgagggcguguucguguccaacgggacccacugguucgucacgcagcggaacuucuacgagccgcagaucaucaccaccgacaacaccuucgugagcggcaacugcgacguggucaucggcaucgugaacaacacgguguacgacccccugcagcccgagcuggacuccuucaaggaggagcucgacaaguacuucaagaaccacaccagccccgacgucgaccugggggacaucuccggcaucaacgccagcguggugaacauccagaaggagaucgaccgccugaacgaggucgccaagaaccucaacgagucccugaucgaccugcaggagcucgggaaguacgagcaguacaucaaguggccgugguacaucuggcugggcuucaucgccggccugaucgcgaucgugauggugaccaucaugcucugcugcaugaccagcugcugcuccugccugaaggggugcugcagcugcggcuccugcugcaaguucgacgaggacgacagcgagcccguccugaagggggugaagcuccacuacacgugaggacuaguuauaagacugacuagcccgaugggccucccaacgggcccuccuccccuccuugcaccgagauuaauaaaaaaaaaaaaaaaaaaaaaaaaaaaaaaaaaaaaaaaaaaaaaaaaaaaaaaaaaaaaaaaaaaaaaaaaaaaaaaaaaaaaaaaaaaaaaaaaaaaa

SEQ ID NO: 25403 - RNA, 4002 nt, Artificial Sequence
  SARS-CoV-2/Wuhan/WIV05/2019__EPI_ISL_402128 spike protein mRNA gc (1-1273)(L18F_D80A_D215G_L242del_A243del_L244del_R246I_K417N_E484 K_N501Y_D614G_A701V)
aggagaaagcuuaccauguucguguuccugguccuccugccccuggugagcucccagugcgugaacuucaccacccgcacgcagcugccgcccgccuacaccaacagcuucacccggggcgucuacuaccccgacaagguguuccgcuccagcgugcugcacuccacccaggaccucuuccugcccuucuucagcaacgucacgugguuccacgccauccacguguccgggaccaacggcaccaagcgguucgccaacccggugcugcccuucaacgacggggucuacuucgcgagcaccgagaaguccaacaucauccgcggcuggaucuucgggacgacccucgacagcaagacccagucccugcugaucgugaacaacgccaccaacguggucaucaaggugugcgaguuccaguucugcaacgaccccuuccucggcguguacuaccacaagaacaacaagagcuggauggaguccgaguuccgggucuacagcuccgccaacaacugcacguucgaguacgugagccagcccuuccugauggaccuggagggcaagcaggggaacuucaagaaccuccgcgaguucguguucaagaacaucgacggcuacuucaagaucuacuccaagcacaccccgaucaaccugguccggggccugccccagggguucagcgcccucgagccccugguggaccugcccaucggcaucaacaucacccgcuuccagacccuccacaucuccuaccucacgccgggggacagcagcuccggcuggaccgcgggcgccgccgccuacuacgugggguaccugcagccccgcaccuuccugcucaaguacaacgagaacggcaccaucacggacgcggucgacugcgcccuggacccccugagcgagaccaagugcacccucaaguccuucaccguggagaaggggaucuaccagacgagcaacuuccgggugcagcccaccgaguccaucguccgcuucccgaacaucaccaaccugugccccuucggcgagguguucaacgccacccgguucgccagcgucuacgccuggaaccgcaagcggaucuccaacugcguggcggacuacagcgugcuguacaacuccgccagcuucuccacguucaagugcuacggcgucagccccaccaagcucaacgaccugugcuucaccaacguguacgccgacuccuucgugauccgcggggacgagguccggcagaucgcccccggccagaccgggaacaucgccgacuacaacuacaagcugccggacgacuucacgggcugcgugaucgcguggaacagcaacaaccucgacuccaaggucgggggcaacuacaacuaccuguaccgccuguuccgcaagagcaaccucaagcccuucgagcgggacaucuccaccgagaucuaccaggccggcagcacccccugcaacggggugaagggcuucaacugcuacuucccccugcaguccuacggguuccagccgaccuacggcgugggguaccagcccuaccggguggucgugcugagcuucgagcuccugcacgcccccgccacggugugcggccccaagaaguccaccaaccuggucaagaacaagugcgugaacuucaacuucaacggccucaccgggaccggcgugcugaccgagagcaacaagaaguuccugccguuccagcaguucgggcgcgacaucgccgacacgaccgacgcgguccgcgacccccagacccuggagauccucgacaucacccccugcagcuucggcgggguguccgugaucacgccgggcaccaacaccagcaaccaggucgccgugcuguaccagggcgugaacugcaccgagguccccguggccauccacgccgaccagcugacgcccaccuggcggguguacuccaccggcagcaacgucuuccagacccgcgccgggugccucaucggcgcggagcacgugaacaacuccuacgagugcgacauccccaucggggccggcaucugcgccagcuaccagacgcagaccaacuccccgcggcgcgcccggagcguggcgucccagagcaucaucgccuacaccaugucccugggcguggagaacagcgucgccuacuccaacaacagcaucgccauccccaccaacuucacgaucuccgugaccaccgagauccugcccgugagcaugaccaagacgagcgucgacugcaccauguacaucugcggggacuccaccgagugcagcaaccuccugcugcaguacggcuccuucugcacccagcucaaccgcgcgcugacggggaucgccguggagcaggacaagaacacccaggagguguucgcccaggucaagcagaucuacaagacgcccccgaucaaggacuucggcggguucaacuucagccagauccugcccgaccccuccaagcccagcaagcgguccuucaucgaggaccuccuguucaacaaggugacccuggccgacgccggcuucaucaagcaguacggcgacugccucggggacaucgcggcccgcgaccugaucugcgcccagaaguucaacggccugaccgugcucccgccccugcugaccgacgagaugaucgcccaguacaccagcgcccuccuggcggggaccaucacguccggcuggaccuucggggccggcgccgcccugcagauccccuucgcgaugcagauggccuaccgguucaacggcaucggggucacccagaacgugcucuacgagaaccagaagcugaucgccaaccaguucaacagcgccaucggcaagauccaggacucccugagcuccaccgccagcgcgcucgggaagcugcaggacguggucaaccagaacgcccaggcccugaacacgcucgugaagcagcuguccagcaacuucggcgccaucuccagcgugcugaacgacauccucucccgccuggacaaggucgaggccgaggugcagaucgaccggcugaucaccgggcgccuccagagccugcagaccuacgugacccagcagcugauccgggcggccgagauccgcgccagcgccaaccucgccgcgaccaagauguccgagugcguccugggccagagcaagcggguggacuucugcggcaagggguaccaccugauguccuucccccagagcgccccgcacggcguggucuuccuccacgugacguacguccccgcccaggagaagaacuucaccaccgcccccgcgaucugccacgacgggaaggcccacuucccccgcgagggcguguucguguccaacgggacccacugguucgucacgcagcggaacuucuacgagccgcagaucaucaccaccgacaacaccuucgugagcggcaacugcgacguggucaucggcaucgugaacaacacgguguacgacccccugcagcccgagcuggacuccuucaaggaggagcucgacaaguacuucaagaaccacaccagccccgacgucgaccugggggacaucuccggcaucaacgccagcguggugaacauccagaaggagaucgaccgccugaacgaggucgccaagaaccucaacgagucccugaucgaccugcaggagcucgggaaguacgagcaguacaucaaguggccgugguacaucuggcugggcuucaucgccggccugaucgcgaucgugauggugaccaucaugcucugcugcaugaccagcugcugcuccugccugaaggggugcugcagcugcggcuccugcugcaaguucgacgaggacgacagcgagcccguccugaagggggugaagcuccacuacacgugaggacuaguuauaagacugacuagcccgaugggccucccaacgggcccuccuccccuccuugcaccgagauuaauaaaaaaaaaaaaaaaaaaaaaaaaaaaaaaaaaaaaaaaaaaaaaaaaaaaaaaaaaaaaaaaaaaaaaaaaaaaaaaaaaaaaaaaaaaaaaaaaaaaa

SEQ ID NO: 25404 - RNA, 4011 nt, Artificial Sequence
  SARS-CoV-2/Wuhan/WIV05/2019__EPI_ISL_402128 spike protein mRNA gc (1-1273)(E484K_D614G)
aggagaaagcuuaccauguucguguuccugguccuccugccccuggugagcucccagugcgugaaccucaccacccgcacgcagcugccgcccgccuacaccaacagcuucacccggggcgucuacuaccccgacaagguguuccgcuccagcgugcugcacuccacccaggaccucuuccugcccuucuucagcaacgucacgugguuccacgccauccacguguccgggaccaacggcaccaagcgguucgacaacccggugcugcccuucaacgacggggucuacuucgcgagcaccgagaaguccaacaucauccgcggcuggaucuucgggacgacccucgacagcaagacccagucccugcugaucgugaacaacgccaccaacguggucaucaaggugugcgaguuccaguucugcaacgaccccuuccucggcguguacuaccacaagaacaacaagagcuggauggaguccgaguuccgggucuacagcuccgccaacaacugcacguucgaguacgugagccagcccuuccugauggaccuggagggcaagcaggggaacuucaagaaccuccgcgaguucguguucaagaacaucgacggcuacuucaagaucuacuccaagcacaccccgaucaaccugguccgggaccugccccagggguucagcgcccucgagccccugguggaccugcccaucggcaucaacaucacccgcuuccagacccuccuggcccugcaccgguccuaccucacgccgggggacagcagcuccggcuggaccgcgggcgccgccgccuacuacgugggguaccugcagccccgcaccuuccugcucaaguacaacgagaacggcaccaucacggacgcggucgacugcgcccuggacccccugagcgagaccaagugcacccucaaguccuucaccguggagaaggggaucuaccagacgagcaacuuccgggugcagcccaccgaguccaucguccgcuucccgaacaucaccaaccugugccccuucggcgagguguucaacgccacccgguucgccagcgucuacgccuggaaccgcaagcggaucuccaacugcguggcggacuacagcgugcuguacaacuccgccagcuucuccacguucaagugcuacggcgucagccccaccaagcucaacgaccugugcuucaccaacguguacgccgacuccuucgugauccgcggggacgagguccggcagaucgcccccggccagaccgggaagaucgccgacuacaacuacaagcugccggacgacuucacgggcugcgugaucgcguggaacagcaacaaccucgacuccaaggucgggggcaacuacaacuaccuguaccgccuguuccgcaagagcaaccucaagcccuucgagcgggacaucuccaccgagaucuaccaggccggcagcacccccugcaacggggugaagggcuucaacugcuacuucccccugcaguccuacggguuccagccgaccaacggcgugggguaccagcccuaccggguggucgugcugagcuucgagcuccugcacgcccccgccacggugugcggccccaagaaguccaccaaccuggucaagaacaagugcgugaacuucaacuucaacggccucaccgggaccggcgugcugaccgagagcaacaagaaguuccugccguuccagcaguucgggcgcgacaucgccgacacgaccgacgcgguccgcgacccccagacccuggagauccucgacaucacccccugcagcuucggcgggguguccgugaucacgccgggcaccaacaccagcaaccaggucgccgugcuguaccagggcgugaacugcaccgagguccccguggccauccacgccgaccagcugacgcccaccuggcggguguacuccaccggcagcaacgucuuccagacccgcgccgggugccucaucggcgcggagcacgugaacaacuccuacgagugcgacauccccaucggggccggcaucugcgccagcuaccagacgcagaccaacuccccgcggcgcgcccggagcguggcgucccagagcaucaucgccuacaccaugucccugggcgccgagaacagcgucgccuacuccaacaacagcaucgccauccccaccaacuucacgaucuccgugaccaccgagauccugcccgugagcaugaccaagacgagcgucgacugcaccauguacaucugcggggacuccaccgagugcagcaaccuccugcugcaguacggcuccuucugcacccagcucaaccgcgcgcugacggggaucgccguggagcaggacaagaacacccaggagguguucgcccaggucaagcagaucuacaagacgcccccgaucaaggacuucggcggguucaacuucagccagauccugcccgaccccuccaagcccagcaagcgguccuucaucgaggaccuccuguucaacaaggugacccuggccgacgccggcuucaucaagcaguacggcgacugccucggggacaucgcggcccgcgaccugaucugcgcccagaaguucaacggccugaccgugcucccgccccugcugaccgacgagaugaucgcccaguacaccagcgcccuccuggcggggaccaucacguccggcuggaccuucggggccggcgccgcccugcagauccccuucgcgaugcagauggccuaccgguucaacggcaucggggucacccagaacgugcucuacgagaaccagaagcugaucgccaaccaguucaacagcgccaucggcaagauccaggacucccugagcuccaccgccagcgcgcucgggaagcugcaggacguggucaaccagaacgcccaggcccugaacacgcucgugaagcagcuguccagcaacuucggcgccaucuccagcgugcugaacgacauccucucccgccuggacaaggucgaggccgaggugcagaucgaccggcugaucaccgggcgccuccagagccugcagaccuacgugacccagcagcugauccgggcggccgagauccgcgccagcgccaaccucgccgcgaccaagauguccgagugcguccugggccagagcaagcggguggacuucugcggcaagggguaccaccugauguccuucccccagagcgccccgcacggcguggucuuccuccacgugacguacguccccgcccaggagaagaacuucaccaccgcccccgcgaucugccacgacgggaaggcccacuucccccgcgagggcguguucguguccaacgggacccacugguucgucacgcagcggaacuucuacgagccgcagaucaucaccaccgacaacaccuucgugagcggcaacugcgacguggucaucggcaucgugaacaacacgguguacgacccccugcagcccgagcuggacuccuucaaggaggagcucgacaaguacuucaagaaccacaccagccccgacgucgaccugggggacaucuccggcaucaacgccagcguggugaacauccagaaggagaucgaccgccugaacgaggucgccaagaaccucaacgagucccugaucgaccugcaggagcucgggaaguacgagcaguacaucaaguggccgugguacaucuggcugggcuucaucgccggccugaucgcgaucgugauggugaccaucaugcucugcugcaugaccagcugcugcuccugccugaaggggugcugcagcugcggcuccugcugcaaguucgacgaggacgacagcgagcccguccugaagggggugaagcuccacuacacgugaggacuaguuauaagacugacuagcccgaugggccucccaacgggcccuccuccccuccuugcaccgagauuaauaaaaaaaaaaaaaaaaaaaaaaaaaaaaaaaaaaaaaaaaaaaaaaaaaaaaaaaaaaaaaaaaaaaaaaaaaaaaaaaaaaaaaaaaaaaaaaaaaaaa

SEQ ID NO: 25405 - RNA, 4011 nt, Artificial Sequence
  SARS-CoV-2/Wuhan/WIV05/2019__EPI_ISL_402128 spike protein mRNA gc (1-1273)(L18F_T20N_P26S_D138Y_R190S_K417T_E484K_N501Y_D614G_H655Y _T1027I)
aggagaaagcuuaccauguucguguuccugguccuccugccccuggugagcucccagugcgugaacuucaccaaccgcacgcagcugccgagcgccuacaccaacagcuucacccggggcgucuacuaccccgacaagguguuccgcuccagcgugcugcacuccacccaggaccucuuccugcccuucuucagcaacgucacgugguuccacgccauccacguguccgggaccaacggcaccaagcgguucgacaacccggugcugcccuucaacgacggggucuacuucgcgagcaccgagaaguccaacaucauccgcggcuggaucuucgggacgacccucgacagcaagacccagucccugcugaucgugaacaacgccaccaacguggucaucaaggugugcgaguuccaguucugcaacuaccccuuccucggcguguacuaccacaagaacaacaagagcuggauggaguccgaguuccgggucuacagcuccgccaacaacugcacguucgaguacgugagccagcccuuccugauggaccuggagggcaagcaggggaacuucaagaaccucagcgaguucguguucaagaacaucgacggcuacuucaagaucuacuccaagcacaccccgaucaaccugguccgggaccugccccagggguucagcgcccucgagccccugguggaccugcccaucggcaucaacaucacccgcuuccagacccuccuggcccugcaccgguccuaccucacgccgggggacagcagcuccggcuggaccgcgggcgccgccgccuacuacgugggguaccugcagccccgcaccuuccugcucaaguacaacgagaacggcaccaucacggacgcggucgacugcgcccuggacccccugagcgagaccaagugcacccucaaguccuucaccguggagaaggggaucuaccagacgagcaacuuccgggugcagcccaccgaguccaucguccgcuucccgaacaucaccaaccugugccccuucggcgagguguucaacgccacccgguucgccagcgucuacgccuggaaccgcaagcggaucuccaacugcguggcggacuacagcgugcuguacaacuccgccagcuucuccacguucaagugcuacggcgucagccccaccaagcucaacgaccugugcuucaccaacguguacgccgacuccuucgugauccgcggggacgagguccggcagaucgcccccggccagaccgggaccaucgccgacuacaacuacaagcugccggacgacuucacgggcugcgugaucgcguggaacagcaacaaccucgacuccaaggucgggggcaacuacaacuaccuguaccgccuguuccgcaagagcaaccucaagcccuucgagcgggacaucuccaccgagaucuaccaggccggcagcacccccugcaacggggugaagggcuucaacugcuacuucccccugcaguccuacggguuccagccgaccuacggcgugggguaccagcccuaccggguggucgugcugagcuucgagcuccugcacgcccccgccacggugugcggccccaagaaguccaccaaccuggucaagaacaagugcgugaacuucaacuucaacggccucaccgggaccggcgugcugaccgagagcaacaagaaguuccugccguuccagcaguucgggcgcgacaucgccgacacgaccgacgcgguccgcgacccccagacccuggagauccucgacaucacccccugcagcuucggcgggguguccgugaucacgccgggcaccaacaccagcaaccaggucgccgugcuguaccagggcgugaacugcaccgagguccccguggccauccacgccgaccagcugacgcccaccuggcggguguacuccaccggcagcaacgucuuccagacccgcgccgggugccucaucggcgcggaguacgugaacaacuccuacgagugcgacauccccaucggggccggcaucugcgccagcuaccagacgcagaccaacuccccgcggcgcgcccggagcguggcgucccagagcaucaucgccuacaccaugucccugggcgccgagaacagcgucgccuacuccaacaacagcaucgccauccccaccaacuucacgaucuccgugaccaccgagauccugcccgugagcaugaccaagacgagcgucgacugcaccauguacaucugcggggacuccaccgagugcagcaaccuccugcugcaguacggcuccuucugcacccagcucaaccgcgcgcugacggggaucgccguggagcaggacaagaacacccaggagguguucgcccaggucaagcagaucuacaagacgcccccgaucaaggacuucggcggguucaacuucagccagauccugcccgaccccuccaagcccagcaagcgguccuucaucgaggaccuccuguucaacaaggugacccuggccgacgccggcuucaucaagcaguacggcgacugccucggggacaucgcggcccgcgaccugaucugcgcccagaaguucaacggccugaccgugcucccgccccugcugaccgacgagaugaucgcccaguacaccagcgcccuccuggcggggaccaucacguccggcuggaccuucggggccggcgccgcccugcagauccccuucgcgaugcagauggccuaccgguucaacggcaucggggucacccagaacgugcucuacgagaaccagaagcugaucgccaaccaguucaacagcgccaucggcaagauccaggacucccugagcuccaccgccagcgcgcucgggaagcugcaggacguggucaaccagaacgcccaggcccugaacacgcucgugaagcagcuguccagcaacuucggcgccaucuccagcgugcugaacgacauccucucccgccuggacaaggucgaggccgaggugcagaucgaccggcugaucaccgggcgccuccagagccugcagaccuacgugacccagcagcugauccgggcggccgagauccgcgccagcgccaaccucgccgcgaucaagauguccgagugcguccugggccagagcaagcggguggacuucugcggcaagggguaccaccugauguccuucccccagagcgccccgcacggcguggucuuccuccacgugacguacguccccgcccaggagaagaacuucaccaccgcccccgcgaucugccacgacgggaaggcccacuucccccgcgagggcguguucguguccaacgggacccacugguucgucacgcagcggaacuucuacgagccgcagaucaucaccaccgacaacaccuucgugagcggcaacugcgacguggucaucggcaucgugaacaacacgguguacgacccccugcagcccgagcuggacuccuucaaggaggagcucgacaaguacuucaagaaccacaccagccccgacgucgaccugggggacaucuccggcaucaacgccagcguggugaacauccagaaggagaucgaccgccugaacgaggucgccaagaaccucaacgagucccugaucgaccugcaggagcucgggaaguacgagcaguacaucaaguggccgugguacaucuggcugggcuucaucgccggccugaucgcgaucgugauggugaccaucaugcucugcugcaugaccagcugcugcuccugccugaaggggugcugcagcugcggcuccugcugcaaguucgacgaggacgacagcgagcccguccugaagggggugaagcuccacuacacgugaggacuaguuauaagacugacuagcccgaugggccucccaacgggcccuccuccccuccuugcaccgagauuaauaaaaaaaaaaaaaaaaaaaaaaaaaaaaaaaaaaaaaaaaaaaaaaaaaaaaaaaaaaaaaaaaaaaaaaaaaaaaaaaaaaaaaaaaaaaaaaaaaaaa

SEQ ID NO: 25406 - RNA, 4011 nt, Artificial Sequence
  SARS-CoV-2/Wuhan/WIV05/2019__EPI_ISL_402128 spike protein mRNA gc (1-1273)(S13I_W152C_L452R_D614G)
aggagaaagcuuaccauguucguguuccugguccuccugccccuggugagcauccagugcgugaaccucaccacccgcacgcagcugccgcccgccuacaccaacagcuucacccggggcgucuacuaccccgacaagguguuccgcuccagcgugcugcacuccacccaggaccucuuccugcccuucuucagcaacgucacgugguuccacgccauccacguguccgggaccaacggcaccaagcgguucgacaacccggugcugcccuucaacgacggggucuacuucgcgagcaccgagaaguccaacaucauccgcggcuggaucuucgggacgacccucgacagcaagacccagucccugcugaucgugaacaacgccaccaacguggucaucaaggugugcgaguuccaguucugcaacgaccccuuccucggcguguacuaccacaagaacaacaagagcugcauggaguccgaguuccgggucuacagcuccgccaacaacugcacguucgaguacgugagccagcccuuccugauggaccuggagggcaagcaggggaacuucaagaaccuccgcgaguucguguucaagaacaucgacggcuacuucaagaucuacuccaagcacaccccgaucaaccugguccgggaccugccccagggguucagcgcccucgagccccugguggaccugcccaucggcaucaacaucacccgcuuccagacccuccuggcccugcaccgguccuaccucacgccgggggacagcagcuccggcuggaccgcgggcgccgccgccuacuacgugggguaccugcagccccgcaccuuccugcucaaguacaacgagaacggcaccaucacggacgcggucgacugcgcccuggacccccugagcgagaccaagugcacccucaaguccuucaccguggagaaggggaucuaccagacgagcaacuuccgggugcagcccaccgaguccaucguccgcuucccgaacaucaccaaccugugccccuucggcgagguguucaacgccacccgguucgccagcgucuacgccuggaaccgcaagcggaucuccaacugcguggcggacuacagcgugcuguacaacuccgccagcuucuccacguucaagugcuacggcgucagccccaccaagcucaacgaccugugcuucaccaacguguacgccgacuccuucgugauccgcggggacgagguccggcagaucgcccccggccagaccgggaagaucgccgacuacaacuacaagcugccggacgacuucacgggcugcgugaucgcguggaacagcaacaaccucgacuccaaggucgggggcaacuacaacuaccgcuaccgccuguuccgcaagagcaaccucaagcccuucgagcgggacaucuccaccgagaucuaccaggccggcagcacccccugcaacgggguggagggcuucaacugcuacuucccccugcaguccuacggguuccagccgaccaacggcgugggguaccagcccuaccggguggucgugcugagcuucgagcuccugcacgcccccgccacggugugcggccccaagaaguccaccaaccuggucaagaacaagugcgugaacuucaacuucaacggccucaccgggaccggcgugcugaccgagagcaacaagaaguuccugccguuccagcaguucgggcgcgacaucgccgacacgaccgacgcgguccgcgacccccagacccuggagauccucgacaucacccccugcagcuucggcgggguguccgugaucacgccgggcaccaacaccagcaaccaggucgccgugcuguaccagggcgugaacugcaccgagguccccguggccauccacgccgaccagcugacgcccaccuggcggguguacuccaccggcagcaacgucuuccagacccgcgccgggugccucaucggcgcggagcacgugaacaacuccuacgagugcgacauccccaucggggccggcaucugcgccagcuaccagacgcagaccaacuccccgcggcgcgcccggagcguggcgucccagagcaucaucgccuacaccaugucccugggcgccgagaacagcgucgccuacuccaacaacagcaucgccauccccaccaacuucacgaucuccgugaccaccgagauccugcccgugagcaugaccaagacgagcgucgacugcaccauguacaucugcggggacuccaccgagugcagcaaccuccugcugcaguacggcuccuucugcacccagcucaaccgcgcgcugacggggaucgccguggagcaggacaagaacacccaggagguguucgcccaggucaagcagaucuacaagacgcccccgaucaaggacuucggcggguucaacuucagccagauccugcccgaccccuccaagcccagcaagcgguccuucaucgaggaccuccuguucaacaaggugacccuggccgacgccggcuucaucaagcaguacggcgacugccucggggacaucgcggcccgcgaccugaucugcgcccagaaguucaacggccugaccgugcucccgccccugcugaccgacgagaugaucgcccaguacaccagcgcccuccuggcggggaccaucacguccggcuggaccuucggggccggcgccgcccugcagauccccuucgcgaugcagauggccuaccgguucaacggcaucggggucacccagaacgugcucuacgagaaccagaagcugaucgccaaccaguucaacagcgccaucggcaagauccaggacucccugagcuccaccgccagcgcgcucgggaagcugcaggacguggucaaccagaacgcccaggcccugaacacgcucgugaagcagcuguccagcaacuucggcgccaucuccagcgugcugaacgacauccucucccgccuggacaaggucgaggccgaggugcagaucgaccggcugaucaccgggcgccuccagagccugcagaccuacgugacccagcagcugauccgggcggccgagauccgcgccagcgccaaccucgccgcgaccaagauguccgagugcguccugggccagagcaagcggguggacuucugcggcaagggguaccaccugauguccuucccccagagcgccccgcacggcguggucuuccuccacgugacguacguccccgcccaggagaagaacuucaccaccgcccccgcgaucugccacgacgggaaggcccacuucccccgcgagggcguguucguguccaacgggacccacugguucgucacgcagcggaacuucuacgagccgcagaucaucaccaccgacaacaccuucgugagcggcaacugcgacguggucaucggcaucgugaacaacacgguguacgacccccugcagcccgagcuggacuccuucaaggaggagcucgacaaguacuucaagaaccacaccagccccgacgucgaccugggggacaucuccggcaucaacgccagcguggugaacauccagaaggagaucgaccgccugaacgaggucgccaagaaccucaacgagucccugaucgaccugcaggagcucgggaaguacgagcaguacaucaaguggccgugguacaucuggcugggcuucaucgccggccugaucgcgaucgugauggugaccaucaugcucugcugcaugaccagcugcugcuccugccugaaggggugcugcagcugcggcuccugcugcaaguucgacgaggacgacagcgagcccguccugaagggggugaagcuccacuacacgugaggacuaguuauaagacugacuagcccgaugggccucccaacgggcccuccuccccuccuugcaccgagauuaauaaaaaaaaaaaaaaaaaaaaaaaaaaaaaaaaaaaaaaaaaaaaaaaaaaaaaaaaaaaaaaaaaaaaaaaaaaaaaaaaaaaaaaaaaaaaaaaaaaaa

SEQ ID NO: 25407 - RNA, 4011 nt, Artificial Sequence; identical to SEQ ID NO: 25389
  SARS-CoV-2/Wuhan/WIV05/2019__EPI_ISL_402128 spike protein mRNA gc (1-1273)

SEQ ID NO: 25408 - RNA, 4011 nt, Artificial Sequence
  SARS-CoV-2/Wuhan/WIV05/2019__EPI_ISL_402128 spike protein mRNA gc (1-1273)(D614G)
aggagaaagcuuaccauguucguguuccugguccuccugccccuggugagcucccagugcgugaaccucaccacccgcacgcagcugccgcccgccuacaccaacagcuucacccggggcgucuacuaccccgacaagguguuccgcuccagcgugcugcacuccacccaggaccucuuccugcccuucuucagcaacgucacgugguuccacgccauccacguguccgggaccaacggcaccaagcgguucgacaacccggugcugcccuucaacgacggggucuacuucgcgagcaccgagaaguccaacaucauccgcggcuggaucuucgggacgacccucgacagcaagacccagucccugcugaucgugaacaacgccaccaacguggucaucaaggugugcgaguuccaguucugcaacgaccccuuccucggcguguacuaccacaagaacaacaagagcuggauggaguccgaguuccgggucuacagcuccgccaacaacugcacguucgaguacgugagccagcccuuccugauggaccuggagggcaagcaggggaacuucaagaaccuccgcgaguucguguucaagaacaucgacggcuacuucaagaucuacuccaagcacaccccgaucaaccugguccgggaccugccccagggguucagcgcccucgagccccugguggaccugcccaucggcaucaacaucacccgcuuccagacccuccuggcccugcaccgguccuaccucacgccgggggacagcagcuccggcuggaccgcgggcgccgccgccuacuacgugggguaccugcagccccgcaccuuccugcucaaguacaacgagaacggcaccaucacggacgcggucgacugcgcccuggacccccugagcgagaccaagugcacccucaaguccuucaccguggagaaggggaucuaccagacgagcaacuuccgggugcagcccaccgaguccaucguccgcuucccgaacaucaccaaccugugccccuucggcgagguguucaacgccacccgguucgccagcgucuacgccuggaaccgcaagcggaucuccaacugcguggcggacuacagcgugcuguacaacuccgccagcuucuccacguucaagugcuacggcgucagccccaccaagcucaacgaccugugcuucaccaacguguacgccgacuccuucgugauccgcggggacgagguccggcagaucgcccccggccagaccgggaagaucgccgacuacaacuacaagcugccggacgacuucacgggcugcgugaucgcguggaacagcaacaaccucgacuccaaggucgggggcaacuacaacuaccuguaccgccuguuccgcaagagcaaccucaagcccuucgagcgggacaucuccaccgagaucuaccaggccggcagcacccccugcaacgggguggagggcuucaacugcuacuucccccugcaguccuacggguuccagccgaccaacggcgugggguaccagcccuaccggguggucgugcugagcuucgagcuccugcacgcccccgccacggugugcggccccaagaaguccaccaaccuggucaagaacaagugcgugaacuucaacuucaacggccucaccgggaccggcgugcugaccgagagcaacaagaaguuccugccguuccagcaguucgggcgcgacaucgccgacacgaccgacgcgguccgcgacccccagacccuggagauccucgacaucacccccugcagcuucggcgggguguccgugaucacgccgggcaccaacaccagcaaccaggucgccgugcuguaccagggcgugaacugcaccgagguccccguggccauccacgccgaccagcugacgcccaccuggcggguguacuccaccgggagcaacgucuuccagacccgcgccggcugccucaucggggcggagcacgugaacaacuccuacgagugcgacauccccaucggcgccggcaucugcgccagcuaccagacgcagaccaacuccccgcggcgcgcccggagcguggcgucccagagcaucaucgccuacaccaugucccugggggccgagaacagcgucgccuacuccaacaacagcaucgccauccccaccaacuucacgaucuccgugaccaccgagauccugcccgugagcaugaccaagacgagcgucgacugcaccauguacaucugcggcgacuccaccgagugcagcaaccuccugcugcaguacggguccuucugcacccagcucaaccgcgcgcugacgggcaucgccguggagcaggacaagaacacccaggagguguucgcccaggucaagcagaucuacaagacgcccccgaucaaggacuucgggggcuucaacuucagccagauccugcccgaccccuccaagcccagcaagcgguccuucaucgaggaccuccuguucaacaaggugacccuggccgacgccggcuucaucaagcaguacggggacugccucggcgacaucgcggcccgcgaccugaucugcgcccagaaguucaacgggcugaccgugcucccgccccugcugaccgacgagaugaucgcccaguacaccagcgcccuccuggcgggcaccaucacguccggguggaccuucggcgccggcgccgcccugcagauccccuucgcgaugcagauggccuaccgguucaacgggaucggcgucacccagaacgugcucuacgagaaccagaagcugaucgccaaccaguucaacagcgccaucgggaagauccaggacucccugagcuccaccgccagcgcgcucggcaagcugcaggacguggucaaccagaacgcccaggcccugaacacgcucgugaagcagcuguccagcaacuucggggccaucuccagcgugcugaacgacauccucucccgccuggacaaggucgaggccgaggugcagaucgaccggcugaucaccggccgccuccagagccugcagaccuacgugacccagcagcugauccgggcggccgagauccgcgccagcgccaaccucgccgcgaccaagauguccgagugcguccugggccagagcaagcggguggacuucugcgggaagggcuaccaccugauguccuucccccagagcgccccgcacgggguggucuuccuccacgugacguacguccccgcccaggagaagaacuucaccaccgcccccgcgaucugccacgacggcaaggcccacuucccccgcgaggggguguucguguccaacggcacccacugguucgucacgcagcggaacuucuacgagccgcagaucaucaccaccgacaacaccuucgugagcggcaacugcgacguggucaucgggaucgugaacaacacgguguacgacccccugcagcccgagcuggacuccuucaaggaggagcucgacaaguacuucaagaaccacaccagccccgacgucgaccugggcgacaucuccgggaucaacgccagcguggugaacauccagaaggagaucgaccgccugaacgaggucgccaagaaccucaacgagucccugaucgaccugcaggagcucggcaaguacgagcaguacaucaaguggccgugguacaucuggcugggcuucaucgccgggcugaucgcgaucgugauggugaccaucaugcucugcugcaugaccagcugcugcuccugccugaagggcugcugcagcugcggguccugcugcaaguucgacgaggacgacagcgagcccguccugaagggcgugaagcuccacuacacgugaggacuaguuauaagacugacuagcccgaugggccucccaacgggcccuccuccccuccuugcaccgagauuaauaaaaaaaaaaaaaaaaaaaaaaaaaaaaaaaaaaaaaaaaaaaaaaaaaaaaaaaaaaaaaaaaaaaaaaaaaaaaaaaaaaaaaaaaaaaaaaaaaaaa

SEQ ID NO: 25409 - RNA, 4011 nt, Artificial Sequence
  SARS-CoV-2/Wuhan/WIV05/2019__EPI_ISL_402128 spike protein mRNA gc (1-1273)(A222V_D614G)
aggagaaagcuuaccauguucguguuccugguccuccugccccuggugagcucccagugcgugaaccucaccacccgcacgcagcugccgcccgccuacaccaacagcuucacccggggcgucuacuaccccgacaagguguuccgcuccagcgugcugcacuccacccaggaccucuuccugcccuucuucagcaacgucacgugguuccacgccauccacguguccgggaccaacggcaccaagcgguucgacaacccggugcugcccuucaacgacggggucuacuucgcgagcaccgagaaguccaacaucauccgcggcuggaucuucgggacgacccucgacagcaagacccagucccugcugaucgugaacaacgccaccaacguggucaucaaggugugcgaguuccaguucugcaacgaccccuuccucggcguguacuaccacaagaacaacaagagcuggauggaguccgaguuccgggucuacagcuccgccaacaacugcacguucgaguacgugagccagcccuuccugauggaccuggagggcaagcaggggaacuucaagaaccuccgcgaguucguguucaagaacaucgacggcuacuucaagaucuacuccaagcacaccccgaucaaccugguccgggaccugccccagggguucagcgugcucgagccccugguggaccugcccaucggcaucaacaucacccgcuuccagacccuccuggcccugcaccgguccuaccucacgccgggggacagcagcuccggcuggaccgccggcgcggccgccuacuacgucggguaccugcagccccgcaccuuccugcucaaguacaacgagaacggcaccaucacggacgccguggacugcgcgcuggacccccugagcgagaccaagugcacccucaaguccuucaccguggagaaggggaucuaccagacgagcaacuuccggguccagcccaccgaguccaucgugcgcuucccgaacaucaccaaccugugccccuucggcgaggucuucaacgccacccgguucgccagcguguacgccuggaaccgcaagcggaucuccaacugcguggccgacuacagcguccuguacaacuccgcgagcuucuccacguucaagugcuacggcgugagccccaccaagcucaacgaccugugcuucaccaacguguacgccgacuccuucgucauccgcggggacgaggugcggcagaucgcccccggccagaccgggaagaucgccgacuacaacuacaagcugccggacgacuucacgggcugcgugaucgccuggaacagcaacaaccucgacuccaaggucgggggcaacuacaacuaccuguaccgccuguuccgcaagagcaaccucaagcccuucgagcgggacaucuccaccgagaucuaccaggcgggcagcacccccugcaacgggguggagggcuucaacugcuacuucccccugcaguccuacggguuccagccgaccaacggcgugggguaccagcccuaccgggucguggugcugagcuucgagcuccugcacgcccccgccacggucugcggccccaagaaguccaccaaccuggugaagaacaagugcgugaacuucaacuucaacggccucaccgggaccggcguccugaccgagagcaacaagaaguuccugccguuccagcaguucgggcgcgacaucgccgacacgaccgacgccgugcgcgacccccagacccuggagauccucgacaucacccccugcagcuucggcgggguguccgucaucacgccgggcaccaacaccagcaaccagguggcggugcuguaccagggcgucaacugcaccgaggugcccguggccauccacgccgaccagcugacgcccaccuggcgggucuacuccaccgggagcaacguguuccagacccgcgccggcugccucaucggggccgagcacgugaacaacuccuacgagugcgacauccccaucggcgcgggcaucugcgccagcuaccagacgcagaccaacuccccgcggcgcgcccggagcgucgccucccagagcaucaucgcguacaccaugucccugggggccgagaacagcguggccuacuccaacaacagcaucgccauccccaccaacuucacgaucuccgugaccaccgagauccugcccgucagcaugaccaagacgagcguggacugcaccauguacaucugcggcgacuccaccgagugcagcaaccuccugcugcaguacggguccuucugcacccagcucaaccgcgcccugacgggcaucgcgguggagcaggacaagaacacccaggaggucuucgcccaggugaagcagaucuacaagacgcccccgaucaaggacuucgggggcuucaacuucagccagauccugcccgaccccuccaagcccagcaagcgguccuucaucgaggaccuccuguucaacaaggugacccuggccgacgccggcuucaucaagcaguacggggacugccucggcgacaucgccgcgcgcgaccugaucugcgcccagaaguucaacgggcugaccguccucccgccccugcugaccgacgagaugaucgcccaguacaccagcgcccuccuggccggcaccaucacguccggguggaccuucggcgcgggcgccgcccugcagauccccuucgccaugcagauggcguaccgguucaacgggaucggcgugacccagaacgugcucuacgagaaccagaagcugaucgccaaccaguucaacagcgccaucgggaagauccaggacucccugagcuccaccgccagcgcccucggcaagcugcaggacgucgugaaccagaacgcgcaggcccugaacacgcucgugaagcagcuguccagcaacuucggggccaucuccagcguccugaacgacauccucucccgccuggacaagguggaggccgaggugcagaucgaccggcugaucaccggccgccuccagagccugcagaccuacgucacccagcagcugauccgggccgcggagauccgcgccagcgccaaccucgccgccaccaagauguccgagugcgugcugggccagagcaagcggguggacuucugcgggaagggcuaccaccugauguccuucccccagagcgcgccgcacggggucguguuccuccacgucacguacgugcccgcccaggagaagaacuucaccaccgcccccgccaucugccacgacggcaaggcgcacuucccccgcgaggggguguucgucuccaacggcacccacugguucgugacgcagcggaacuucuacgagccgcagaucaucaccaccgacaacaccuucgugagcggcaacugcgacgucgugaucgggaucgugaacaacacggucuacgacccccugcagcccgagcuggacuccuucaaggaggagcucgacaaguacuucaagaaccacaccagccccgacguggaccugggcgacaucuccgggaucaacgccagcguggucaacauccagaaggagaucgaccgccugaacgagguggccaagaaccucaacgagucccugaucgaccugcaggagcucggcaaguacgagcaguacaucaaguggccgugguacaucuggcugggcuucaucgccgggcugaucgccaucgugauggucaccaucaugcucugcugcaugaccagcugcugcuccugccugaagggcugcugcagcugcggguccugcugcaaguucgacgaggacgacagcgagcccgugcugaagggcgugaagcuccacuacacgugaggacuaguuauaagacugacuagcccgaugggccucccaacgggcccuccuccccuccuugcaccgagauuaauaaaaaaaaaaaaaaaaaaaaaaaaaaaaaaaaaaaaaaaaaaaaaaaaaaaaaaaaaaaaaaaaaaaaaaaaaaaaaaaaaaaaaaaaaaaaaaaaaaaa

SEQ ID NO: 25410 - RNA, 4011 nt, Artificial Sequence
  SARS-CoV-2/Wuhan/WIV05/2019__EPI_ISL_402128 spike protein mRNA gc (1-1273)(N439K_D614G)
aggagaaagcuuaccauguucguguuccugguccuccugccccuggugagcucccagugcgugaaccucaccacccgcacgcagcugccgcccgccuacaccaacagcuucacccggggcgucuacuaccccgacaagguguuccgcuccagcgugcugcacuccacccaggaccucuuccugcccuucuucagcaacgucacgugguuccacgccauccacguguccgggaccaacggcaccaagcgguucgacaacccggugcugcccuucaacgacggggucuacuucgcgagcaccgagaaguccaacaucauccgcggcuggaucuucgggacgacccucgacagcaagacccagucccugcugaucgugaacaacgccaccaacguggucaucaaggugugcgaguuccaguucugcaacgaccccuuccucggcguguacuaccacaagaacaacaagagcuggauggaguccgaguuccgggucuacagcuccgccaacaacugcacguucgaguacgugagccagcccuuccugauggaccuggagggcaagcaggggaacuucaagaaccuccgcgaguucguguucaagaacaucgacggcuacuucaagaucuacuccaagcacaccccgaucaaccugguccgggaccugccccagggguucagcgcccucgagccccugguggaccugcccaucggcaucaacaucacccgcuuccagacccuccuggcccugcaccgguccuaccucacgccgggggacagcagcuccggcuggaccgcgggcgccgccgccuacuacgugggguaccugcagccccgcaccuuccugcucaaguacaacgagaacggcaccaucacggacgcggucgacugcgcccuggacccccugagcgagaccaagugcacccucaaguccuucaccguggagaaggggaucuaccagacgagcaacuuccgggugcagcccaccgaguccaucguccgcuucccgaacaucaccaaccugugccccuucggcgagguguucaacgccacccgguucgccagcgucuacgccuggaaccgcaagcggaucuccaacugcguggcggacuacagcgugcuguacaacuccgccagcuucuccacguucaagugcuacggcgucagccccaccaagcucaacgaccugugcuucaccaacguguacgccgacuccuucgugauccgcggggacgagguccggcagaucgcccccggccagaccgggaagaucgccgacuacaacuacaagcugccggacgacuucacgggcugcgugaucgcguggaacagcaagaaccucgacuccaaggucgggggcaacuacaacuaccuguaccgccuguuccgcaagagcaaccucaagcccuucgagcgggacaucuccaccgagaucuaccaggccggcagcacccccugcaacgggguggagggcuucaacugcuacuucccccugcaguccuacggguuccagccgaccaacggcgugggguaccagcccuaccggguggucgugcugagcuucgagcuccugcacgcccccgccacggugugcggccccaagaaguccaccaaccuggucaagaacaagugcgugaacuucaacuucaacggccucaccgggaccggcgugcugaccgagagcaacaagaaguuccugccguuccagcaguucgggcgcgacaucgccgacacgaccgacgcgguccgcgacccccagacccuggagauccucgacaucacccccugcagcuucggcgggguguccgugaucacgccgggcaccaacaccagcaaccaggucgccgugcuguaccagggcgugaacugcaccgagguccccguggccauccacgccgaccagcugacgcccaccuggcggguguacuccaccgggagcaacgucuuccagacccgcgccggcugccucaucggggcggagcacgugaacaacuccuacgagugcgacauccccaucggcgccggcaucugcgccagcuaccagacgcagaccaacuccccgcggcgcgcccggagcguggcgucccagagcaucaucgccuacaccaugucccugggggccgagaacagcgucgccuacuccaacaacagcaucgccauccccaccaacuucacgaucuccgugaccaccgagauccugcccgugagcaugaccaagacgagcgucgacugcaccauguacaucugcggcgacuccaccgagugcagcaaccuccugcugcaguacggguccuucugcacccagcucaaccgcgcgcugacgggcaucgccguggagcaggacaagaacacccaggagguguucgcccaggucaagcagaucuacaagacgcccccgaucaaggacuucgggggcuucaacuucagccagauccugcccgaccccuccaagcccagcaagcgguccuucaucgaggaccuccuguucaacaaggugacccuggccgacgccggcuucaucaagcaguacggggacugccucggcgacaucgcggcccgcgaccugaucugcgcccagaaguucaacgggcugaccgugcucccgccccugcugaccgacgagaugaucgcccaguacaccagcgcccuccuggcgggcaccaucacguccggguggaccuucggcgccggcgccgcccugcagauccccuucgcgaugcagauggccuaccgguucaacgggaucggcgucacccagaacgugcucuacgagaaccagaagcugaucgccaaccaguucaacagcgccaucgggaagauccaggacucccugagcuccaccgccagcgcgcucggcaagcugcaggacguggucaaccagaacgcccaggcccugaacacgcucgugaagcagcuguccagcaacuucggggccaucuccagcgugcugaacgacauccucucccgccuggacaaggucgaggccgaggugcagaucgaccggcugaucaccggccgccuccagagccugcagaccuacgugacccagcagcugauccgggcggccgagauccgcgccagcgccaaccucgccgcgaccaagauguccgagugcguccugggccagagcaagcggguggacuucugcgggaagggcuaccaccugauguccuucccccagagcgccccgcacgggguggucuuccuccacgugacguacguccccgcccaggagaagaacuucaccaccgcccccgcgaucugccacgacggcaaggcccacuucccccgcgaggggguguucguguccaacggcacccacugguucgucacgcagcggaacuucuacgagccgcagaucaucaccaccgacaacaccuucgugagcggcaacugcgacguggucaucgggaucgugaacaacacgguguacgacccccugcagcccgagcuggacuccuucaaggaggagcucgacaaguacuucaagaaccacaccagccccgacgucgaccugggcgacaucuccgggaucaacgccagcguggugaacauccagaaggagaucgaccgccugaacgaggucgccaagaaccucaacgagucccugaucgaccugcaggagcucggcaaguacgagcaguacaucaaguggccgugguacaucuggcugggcuucaucgccgggcugaucgcgaucgugauggugaccaucaugcucugcugcaugaccagcugcugcuccugccugaagggcugcugcagcugcggguccugcugcaaguucgacgaggacgacagcgagcccguccugaagggcgugaagcuccacuacacgugaggacuaguuauaagacugacuagcccgaugggccucccaacgggcccuccuccccuccuugcaccgagauuaauaaaaaaaaaaaaaaaaaaaaaaaaaaaaaaaaaaaaaaaaaaaaaaaaaaaaaaaaaaaaaaaaaaaaaaaaaaaaaaaaaaaaaaaaaaaaaaaaaaaa

SEQ ID NO: 25411 - RNA, 4011 nt, Artificial Sequence
  SARS-CoV-2/Wuhan/WIV05/2019__EPI_ISL_402128 spike protein mRNA gc (1-1273)(S477N_D614G)
aggagaaagcuuaccauguucguguuccugguccuccugccccuggugagcucccagugcgugaaccucaccacccgcacgcagcugccgcccgccuacaccaacagcuucacccggggcgucuacuaccccgacaagguguuccgcuccagcgugcugcacuccacccaggaccucuuccugcccuucuucagcaacgucacgugguuccacgccauccacguguccgggaccaacggcaccaagcgguucgacaacccggugcugcccuucaacgacggggucuacuucgcgagcaccgagaaguccaacaucauccgcggcuggaucuucgggacgacccucgacagcaagacccagucccugcugaucgugaacaacgccaccaacguggucaucaaggugugcgaguuccaguucugcaacgaccccuuccucggcguguacuaccacaagaacaacaagagcuggauggaguccgaguuccgggucuacagcuccgccaacaacugcacguucgaguacgugagccagcccuuccugauggaccuggagggcaagcaggggaacuucaagaaccuccgcgaguucguguucaagaacaucgacggcuacuucaagaucuacuccaagcacaccccgaucaaccugguccgggaccugccccagggguucagcgcccucgagccccugguggaccugcccaucggcaucaacaucacccgcuuccagacccuccuggcccugcaccgguccuaccucacgccgggggacagcagcuccggcuggaccgcgggcgccgccgccuacuacgugggguaccugcagccccgcaccuuccugcucaaguacaacgagaacggcaccaucacggacgcggucgacugcgcccuggacccccugagcgagaccaagugcacccucaaguccuucaccguggagaaggggaucuaccagacgagcaacuuccgggugcagcccaccgaguccaucguccgcuucccgaacaucaccaaccugugccccuucggcgagguguucaacgccacccgguucgccagcgucuacgccuggaaccgcaagcggaucuccaacugcguggcggacuacagcgugcuguacaacuccgccagcuucuccacguucaagugcuacggcgucagccccaccaagcucaacgaccugugcuucaccaacguguacgccgacuccuucgugauccgcggggacgagguccggcagaucgcccccggccagaccgggaagaucgccgacuacaacuacaagcugccggacgacuucacgggcugcgugaucgcguggaacagcaacaaccucgacuccaaggucgggggcaacuacaacuaccuguaccgccuguuccgcaagagcaaccucaagcccuucgagcgggacaucuccaccgagaucuaccaggccggcaacacccccugcaacgggguggagggcuucaacugcuacuucccccugcagagcuacggguuccagccgaccaacggcgugggguaccagcccuaccggguggucgugcuguccuucgagcuccugcacgcccccgccacggugugcggccccaagaaguccaccaaccuggucaagaacaagugcgugaacuucaacuucaacggccucaccgggaccggcgugcugaccgagagcaacaagaaguuccugccguuccagcaguucgggcgcgacaucgccgacacgaccgacgcgguccgcgacccccagacccuggagauccucgacaucacccccugcagcuucggcggggugagcgugaucacgccgggcaccaacaccuccaaccaggucgccgugcuguaccagggcgugaacugcaccgagguccccguggccauccacgccgaccagcugacgcccaccuggcggguguacagcaccggguccaacgucuuccagacccgcgccggcugccucaucggggcggagcacgugaacaacagcuacgagugcgacauccccaucggcgccggcaucugcgccuccuaccagacgcagaccaacagcccgcggcgcgcccgguccguggcgagccaguccaucaucgccuacaccaugagccugggggccgagaacuccgucgccuacagcaacaacuccaucgccauccccaccaacuucacgaucagcgugaccaccgagauccugcccguguccaugaccaagacgagcgucgacugcaccauguacaucugcggcgacagcaccgagugcuccaaccuccugcugcaguacgggagcuucugcacccagcucaaccgcgcgcugacgggcaucgccguggagcaggacaagaacacccaggagguguucgcccaggucaagcagaucuacaagacgcccccgaucaaggacuucgggggcuucaacuucucccagauccugcccgaccccagcaagcccuccaagcggagcuucaucgaggaccuccuguucaacaaggugacccuggccgacgccggcuucaucaagcaguacggggacugccucggcgacaucgcggcccgcgaccugaucugcgcccagaaguucaacgggcugaccgugcucccgccccugcugaccgacgagaugaucgcccaguacaccuccgcccuccuggcgggcaccaucacgagcggguggaccuucggcgccggcgccgcccugcagauccccuucgcgaugcagauggccuaccgguucaacgggaucggcgucacccagaacgugcucuacgagaaccagaagcugaucgccaaccaguucaacuccgccaucgggaagauccaggacagccuguccagcaccgccuccgcgcucggcaagcugcaggacguggucaaccagaacgcccaggcccugaacacgcucgugaagcagcugagcuccaacuucggggccaucagcuccgugcugaacgacauccucagccgccuggacaaggucgaggccgaggugcagaucgaccggcugaucaccggccgccuccagucccugcagaccuacgugacccagcagcugauccgggcggccgagauccgcgccagcgccaaccucgccgcgaccaagaugagcgagugcguccugggccaguccaagcggguggacuucugcgggaagggcuaccaccugaugagcuucccccaguccgccccgcacgggguggucuuccuccacgugacguacguccccgcccaggagaagaacuucaccaccgcccccgcgaucugccacgacggcaaggcccacuucccccgcgaggggguguucgugagcaacggcacccacugguucgucacgcagcggaacuucuacgagccgcagaucaucaccaccgacaacaccuucguguccggcaacugcgacguggucaucgggaucgugaacaacacgguguacgacccccugcagcccgagcuggacagcuucaaggaggagcucgacaaguacuucaagaaccacaccucccccgacgucgaccugggcgacaucagcgggaucaacgccuccguggugaacauccagaaggagaucgaccgccugaacgaggucgccaagaaccucaacgagagccugaucgaccugcaggagcucggcaaguacgagcaguacaucaaguggccgugguacaucuggcugggcuucaucgccgggcugaucgcgaucgugauggugaccaucaugcucugcugcaugaccuccugcugcagcugccugaagggcugcugcuccugcgggagcugcugcaaguucgacgaggacgacuccgagcccguccugaagggcgugaagcuccacuacacgugaggacuaguuauaagacugacuagcccgaugggccucccaacgggcccuccuccccuccuugcaccgagauuaauaaaaaaaaaaaaaaaaaaaaaaaaaaaaaaaaaaaaaaaaaaaaaaaaaaaaaaaaaaaaaaaaaaaaaaaaaaaaaaaaaaaaaaaaaaaaaaaaaaaa

SEQ ID NO: 25412 - RNA, 4011 nt, Artificial Sequence
  SARS-CoV-2/Wuhan/WIV05/2019__EPI_ISL_402128 spike protein mRNA gc (1-1273)(N501Y_D614G)
aggagaaagcuuaccauguucguguuccugguccuccugccccuggugagcucccagugcgugaaccucaccacccgcacgcagcugccgcccgccuacaccaacagcuucacccggggcgucuacuaccccgacaagguguuccgcuccagcgugcugcacuccacccaggaccucuuccugcccuucuucagcaacgucacgugguuccacgccauccacguguccgggaccaacggcaccaagcgguucgacaacccggugcugcccuucaacgacggggucuacuucgcgagcaccgagaaguccaacaucauccgcggcuggaucuucgggacgacccucgacagcaagacccagucccugcugaucgugaacaacgccaccaacguggucaucaaggugugcgaguuccaguucugcaacgaccccuuccucggcguguacuaccacaagaacaacaagagcuggauggaguccgaguuccgggucuacagcuccgccaacaacugcacguucgaguacgugagccagcccuuccugauggaccuggagggcaagcaggggaacuucaagaaccuccgcgaguucguguucaagaacaucgacggcuacuucaagaucuacuccaagcacaccccgaucaaccugguccgggaccugccccagggguucagcgcccucgagccccugguggaccugcccaucggcaucaacaucacccgcuuccagacccuccuggcccugcaccgguccuaccucacgccgggggacagcagcuccggcuggaccgcgggcgccgccgccuacuacgugggguaccugcagccccgcaccuuccugcucaaguacaacgagaacggcaccaucacggacgcggucgacugcgcccuggacccccugagcgagaccaagugcacccucaaguccuucaccguggagaaggggaucuaccagacgagcaacuuccgggugcagcccaccgaguccaucguccgcuucccgaacaucaccaaccugugccccuucggcgagguguucaacgccacccgguucgccagcgucuacgccuggaaccgcaagcggaucuccaacugcguggcggacuacagcgugcuguacaacuccgccagcuucuccacguucaagugcuacggcgucagccccaccaagcucaacgaccugugcuucaccaacguguacgccgacuccuucgugauccgcggggacgagguccggcagaucgcccccggccagaccgggaagaucgccgacuacaacuacaagcugccggacgacuucacgggcugcgugaucgcguggaacagcaacaaccucgacuccaaggucgggggcaacuacaacuaccuguaccgccuguuccgcaagagcaaccucaagcccuucgagcgggacaucuccaccgagaucuaccaggccggcagcacccccugcaacgggguggagggcuucaacugcuacuucccccugcaguccuacggguuccagccgaccuacggcgugggguaccagcccuaccggguggucgugcugagcuucgagcuccugcacgcccccgccacggugugcggccccaagaaguccaccaaccuggucaagaacaagugcgugaacuucaacuucaacggccucaccgggaccggcgugcugaccgagagcaacaagaaguuccugccguuccagcaguucgggcgcgacaucgccgacacgaccgacgcgguccgcgacccccagacccuggagauccucgacaucacccccugcagcuucggcgggguguccgugaucacgccgggcaccaacaccagcaaccaggucgccgugcuguaccagggcgugaacugcaccgagguccccguggccauccacgccgaccagcugacgcccaccuggcggguguacuccaccgggagcaacgucuuccagacccgcgccggcugccucaucggggcggagcacgugaacaacuccuacgagugcgacauccccaucggcgccggcaucugcgccagcuaccagacgcagaccaacuccccgcggcgcgcccggagcguggcgucccagagcaucaucgccuacaccaugucccugggggccgagaacagcgucgccuacuccaacaacagcaucgccauccccaccaacuucacgaucuccgugaccaccgagauccugcccgugagcaugaccaagacgagcgucgacugcaccauguacaucugcggcgacuccaccgagugcagcaaccuccugcugcaguacggguccuucugcacccagcucaaccgcgcgcugacgggcaucgccguggagcaggacaagaacacccaggagguguucgcccaggucaagcagaucuacaagacgcccccgaucaaggacuucgggggcuucaacuucagccagauccugcccgaccccuccaagcccagcaagcgguccuucaucgaggaccuccuguucaacaaggugacccuggccgacgccggcuucaucaagcaguacggggacugccucggcgacaucgcggcccgcgaccugaucugcgcccagaaguucaacgggcugaccgugcucccgccccugcugaccgacgagaugaucgcccaguacaccagcgcccuccuggcgggcaccaucacguccggguggaccuucggcgccggcgccgcccugcagauccccuucgcgaugcagauggccuaccgguucaacgggaucggcgucacccagaacgugcucuacgagaaccagaagcugaucgccaaccaguucaacagcgccaucgggaagauccaggacucccugagcuccaccgccagcgcgcucggcaagcugcaggacguggucaaccagaacgcccaggcccugaacacgcucgugaagcagcuguccagcaacuucggggccaucuccagcgugcugaacgacauccucucccgccuggacaaggucgaggccgaggugcagaucgaccggcugaucaccggccgccuccagagccugcagaccuacgugacccagcagcugauccgggcggccgagauccgcgccagcgccaaccucgccgcgaccaagauguccgagugcguccugggccagagcaagcggguggacuucugcgggaagggcuaccaccugauguccuucccccagagcgccccgcacgggguggucuuccuccacgugacguacguccccgcccaggagaagaacuucaccaccgcccccgcgaucugccacgacggcaaggcccacuucccccgcgaggggguguucguguccaacggcacccacugguucgucacgcagcggaacuucuacgagccgcagaucaucaccaccgacaacaccuucgugagcggcaacugcgacguggucaucgggaucgugaacaacacgguguacgacccccugcagcccgagcuggacuccuucaaggaggagcucgacaaguacuucaagaaccacaccagccccgacgucgaccugggcgacaucuccgggaucaacgccagcguggugaacauccagaaggagaucgaccgccugaacgaggucgccaagaaccucaacgagucccugaucgaccugcaggagcucggcaaguacgagcaguacaucaaguggccgugguacaucuggcugggcuucaucgccgggcugaucgcgaucgugauggugaccaucaugcucugcugcaugaccagcugcugcuccugccugaagggcugcugcagcugcggguccugcugcaaguucgacgaggacgacagcgagcccguccugaagggcgugaagcuccacuacacgugaggacuaguuauaagacugacuagcccgaugggccucccaacgggcccuccuccccuccuugcaccgagauuaauaaaaaaaaaaaaaaaaaaaaaaaaaaaaaaaaaaaaaaaaaaaaaaaaaaaaaaaaaaaaaaaaaaaaaaaaaaaaaaaaaaaaaaaaaaaaaaaaaaaa

SEQ ID NO: 25413 - RNA, 4005 nt, Artificial Sequence
  SARS-CoV-2/Wuhan/WIV05/2019__EPI_ISL_402128 spike protein mRNA gc (1-1273)(H69del_V70del_D614G)
aggagaaagcuuaccauguucguguuccugguccuccugccccuggugagcucccagugcgugaaccucaccacccgcacgcagcugccgcccgccuacaccaacagcuucacccggggcgucuacuaccccgacaagguguuccgcuccagcgugcugcacuccacccaggaccucuuccugcccuucuucagcaacgucacgugguuccacgccaucuccgggaccaacggcaccaagcgguucgacaacccggugcugcccuucaacgacgggguguacuucgcgagcaccgagaaguccaacaucauccgcggcuggaucuucgggacgacccucgacagcaagacccagucccugcugaucgucaacaacgccaccaacguggugaucaaggucugcgaguuccaguucugcaacgaccccuuccucggcguguacuaccacaagaacaacaagagcuggauggaguccgaguuccggguguacagcuccgccaacaacugcacguucgaguacgucagccagcccuuccugauggaccuggagggcaagcaggggaacuucaagaaccuccgcgaguucguguucaagaacaucgacggcuacuucaagaucuacuccaagcacaccccgaucaaccuggugcgggaccugccccagggguucagcgcccucgagccccuggucgaccugcccaucggcaucaacaucacccgcuuccagacccuccuggcccugcaccgguccuaccucacgccgggggacagcagcuccggcuggaccgcgggcgccgccgccuacuacgugggguaccugcagccccgcaccuuccugcucaaguacaacgagaacggcaccaucacggacgcgguggacugcgcccuggacccccugagcgagaccaagugcacccucaaguccuucaccgucgagaaggggaucuaccagacgagcaacuuccgggugcagcccaccgaguccaucgugcgcuucccgaacaucaccaaccugugccccuucggcgaggucuucaacgccacccgguucgccagcguguacgccuggaaccgcaagcggaucuccaacugcgucgcggacuacagcgugcuguacaacuccgccagcuucuccacguucaagugcuacggcgugagccccaccaagcucaacgaccugugcuucaccaacgucuacgccgacuccuucgugauccgcggggacgaggugcggcagaucgcccccggccagaccgggaagaucgccgacuacaacuacaagcugccggacgacuucacgggcugcgucaucgcguggaacagcaacaaccucgacuccaaggucgggggcaacuacaacuaccuguaccgccuguuccgcaagagcaaccucaagcccuucgagcgggacaucuccaccgagaucuaccaggccggcagcacccccugcaacgggguggagggcuucaacugcuacuucccccugcaguccuacggguuccagccgaccaacggcgugggguaccagcccuaccggguggugguccugagcuucgagcuccugcacgcccccgccacggugugcggccccaagaaguccaccaaccuggugaagaacaagugcgucaacuucaacuucaacggccucaccgggaccggcgugcugaccgagagcaacaagaaguuccugccguuccagcaguucgggcgcgacaucgccgacacgaccgacgcggugcgcgacccccagacccuggagauccucgacaucacccccugcagcuucggcggggucuccgugaucacgccgggcaccaacaccagcaaccagguggccguccuguaccagggcgugaacugcaccgaggugcccgucgccauccacgccgaccagcugacgcccaccuggcggguguacuccaccgggagcaacguguuccagacccgcgccggcugccucaucggggcggagcacgucaacaacuccuacgagugcgacauccccaucggcgccggcaucugcgccagcuaccagacgcagaccaacuccccgcggcgcgcccggagcguggcgucccagagcaucaucgccuacaccaugucccugggggccgagaacagcguggccuacuccaacaacagcaucgccauccccaccaacuucacgaucuccgucaccaccgagauccugcccgugagcaugaccaagacgagcguggacugcaccauguacaucugcggcgacuccaccgagugcagcaaccuccugcugcaguacggguccuucugcacccagcucaaccgcgcgcugacgggcaucgccgucgagcaggacaagaacacccaggagguguucgcccaggugaagcagaucuacaagacgcccccgaucaaggacuucgggggcuucaacuucagccagauccugcccgaccccuccaagcccagcaagcgguccuucaucgaggaccuccuguucaacaaggucacccuggccgacgccggcuucaucaagcaguacggggacugccucggcgacaucgcggcccgcgaccugaucugcgcccagaaguucaacgggcugaccgugcucccgccccugcugaccgacgagaugaucgcccaguacaccagcgcccuccuggcgggcaccaucacguccggguggaccuucggcgccggcgccgcccugcagauccccuucgcgaugcagauggccuaccgguucaacgggaucggcgugacccagaacguccucuacgagaaccagaagcugaucgccaaccaguucaacagcgccaucgggaagauccaggacucccugagcuccaccgccagcgcgcucggcaagcugcaggacguggugaaccagaacgcccaggcccugaacacgcucgucaagcagcuguccagcaacuucggggccaucuccagcgugcugaacgacauccucucccgccuggacaagguggaggccgagguccagaucgaccggcugaucaccggccgccuccagagccugcagaccuacgugacccagcagcugauccgggcggccgagauccgcgccagcgccaaccucgccgcgaccaagauguccgagugcgugcugggccagagcaagcgggucgacuucugcgggaagggcuaccaccugauguccuucccccagagcgccccgcacggggugguguuccuccacgucacguacgugcccgcccaggagaagaacuucaccaccgcccccgcgaucugccacgacggcaaggcccacuucccccgcgagggggucuucguguccaacggcacccacugguucgugacgcagcggaacuucuacgagccgcagaucaucaccaccgacaacaccuucgucagcggcaacugcgacguggugaucgggaucgucaacaacacgguguacgacccccugcagcccgagcuggacuccuucaaggaggagcucgacaaguacuucaagaaccacaccagccccgacguggaccugggcgacaucuccgggaucaacgccagcgucgugaacauccagaaggagaucgaccgccugaacgagguggccaagaaccucaacgagucccugaucgaccugcaggagcucggcaaguacgagcaguacaucaaguggccgugguacaucuggcugggcuucaucgccgggcugaucgcgaucgucauggugaccaucaugcucugcugcaugaccagcugcugcuccugccugaagggcugcugcagcugcggguccugcugcaaguucgacgaggacgacagcgagcccgugcugaagggcgucaagcuccacuacacgugaggacuaguuauaagacugacuagcccgaugggccucccaacgggcccuccuccccuccuugcaccgagauuaauaaaaaaaaaaaaaaaaaaaaaaaaaaaaaaaaaaaaaaaaaaaaaaaaaaaaaaaaaaaaaaaaaaaaaaaaaaaaaaaaaaaaaaaaaaaaaaaaaaaa

SEQ ID NO: 25414 - RNA, 4011 nt, Artificial Sequence
  SARS-CoV-2/Wuhan/WIV05/2019__EPI_ISL_402128 spike protein mRNA gc (1-1273)(Y453F_D614G)
aggagaaagcuuaccauguucguguuccugguccuccugccccuggugagcucccagugcgugaaccucaccacccgcacgcagcugccgcccgccuacaccaacagcuucacccggggcgucuacuaccccgacaagguguuccgcuccagcgugcugcacuccacccaggaccucuuccugcccuucuucagcaacgucacgugguuccacgccauccacguguccgggaccaacggcaccaagcgguucgacaacccggugcugcccuucaacgacggggucuacuucgcgagcaccgagaaguccaacaucauccgcggcuggaucuucgggacgacccucgacagcaagacccagucccugcugaucgugaacaacgccaccaacguggucaucaaggugugcgaguuccaguucugcaacgaccccuuccucggcguguacuaccacaagaacaacaagagcuggauggaguccgaguuccgggucuacagcuccgccaacaacugcacguucgaguacgugagccagcccuuccugauggaccuggagggcaagcaggggaacuucaagaaccuccgcgaguucguguucaagaacaucgacggcuacuucaagaucuacuccaagcacaccccgaucaaccugguccgggaccugccccagggguucagcgcccucgagccccugguggaccugcccaucggcaucaacaucacccgcuuccagacccuccuggcccugcaccgguccuaccucacgccgggggacagcagcuccggcuggaccgcgggcgccgccgccuacuacgugggguaccugcagccccgcaccuuccugcucaaguacaacgagaacggcaccaucacggacgcggucgacugcgcccuggacccccugagcgagaccaagugcacccucaaguccuucaccguggagaaggggaucuaccagacgagcaacuuccgggugcagcccaccgaguccaucguccgcuucccgaacaucaccaaccugugccccuucggcgagguguucaacgccacccgguucgccagcgucuacgccuggaaccgcaagcggaucuccaacugcguggcggacuacagcgugcuguacaacuccgccagcuucuccacguucaagugcuacggcgucagccccaccaagcucaacgaccugugcuucaccaacguguacgccgacuccuucgugauccgcggggacgagguccggcagaucgcccccggccagaccgggaagaucgccgacuacaacuacaagcugccggacgacuucacgggcugcgugaucgcguggaacagcaacaaccucgacuccaaggucgggggcaacuacaacuaccuguuccgccuguuccgcaagagcaaccucaagcccuucgagcgggacaucuccaccgagaucuaccaggccggcagcacccccugcaacgggguggagggcuucaacugcuacuucccccugcaguccuacggguuccagccgaccaacggcgugggguaccagcccuaccggguggucgugcugagcuucgagcuccugcacgcccccgccacggugugcggccccaagaaguccaccaaccuggucaagaacaagugcgugaacuucaacuucaacggccucaccgggaccggcgugcugaccgagagcaacaagaaguuccugccguuccagcaguucgggcgcgacaucgccgacacgaccgacgcgguccgcgacccccagacccuggagauccucgacaucacccccugcagcuucggcgggguguccgugaucacgccgggcaccaacaccagcaaccaggucgccgugcuguaccagggcgugaacugcaccgagguccccguggccauccacgccgaccagcugacgcccaccuggcggguguacuccaccgggagcaacgucuuccagacccgcgccggcugccucaucggggcggagcacgugaacaacuccuacgagugcgacauccccaucggcgccggcaucugcgccagcuaccagacgcagaccaacuccccgcggcgcgcccggagcguggcgucccagagcaucaucgccuacaccaugucccugggggccgagaacagcgucgccuacuccaacaacagcaucgccauccccaccaacuucacgaucuccgugaccaccgagauccugcccgugagcaugaccaagacgagcgucgacugcaccauguacaucugcggcgacuccaccgagugcagcaaccuccugcugcaguacggguccuucugcacccagcucaaccgcgcgcugacgggcaucgccguggagcaggacaagaacacccaggagguguucgcccaggucaagcagaucuacaagacgcccccgaucaaggacuucgggggcuucaacuucagccagauccugcccgaccccuccaagcccagcaagcgguccuucaucgaggaccuccuguucaacaaggugacccuggccgacgccggcuucaucaagcaguacggggacugccucggcgacaucgcggcccgcgaccugaucugcgcccagaaguucaacgggcugaccgugcucccgccccugcugaccgacgagaugaucgcccaguacaccagcgcccuccuggcgggcaccaucacguccggguggaccuucggcgccggcgccgcccugcagauccccuucgcgaugcagauggccuaccgguucaacgggaucggcgucacccagaacgugcucuacgagaaccagaagcugaucgccaaccaguucaacagcgccaucgggaagauccaggacucccugagcuccaccgccagcgcgcucggcaagcugcaggacguggucaaccagaacgcccaggcccugaacacgcucgugaagcagcuguccagcaacuucggggccaucuccagcgugcugaacgacauccucucccgccuggacaaggucgaggccgaggugcagaucgaccggcugaucaccggccgccuccagagccugcagaccuacgugacccagcagcugauccgggcggccgagauccgcgccagcgccaaccucgccgcgaccaagauguccgagugcguccugggccagagcaagcggguggacuucugcgggaagggcuaccaccugauguccuucccccagagcgccccgcacgggguggucuuccuccacgugacguacguccccgcccaggagaagaacuucaccaccgcccccgcgaucugccacgacggcaaggcccacuucccccgcgaggggguguucguguccaacggcacccacugguucgucacgcagcggaacuucuacgagccgcagaucaucaccaccgacaacaccuucgugagcggcaacugcgacguggucaucgggaucgugaacaacacgguguacgacccccugcagcccgagcuggacuccuucaaggaggagcucgacaaguacuucaagaaccacaccagccccgacgucgaccugggcgacaucuccgggaucaacgccagcguggugaacauccagaaggagaucgaccgccugaacgaggucgccaagaaccucaacgagucccugaucgaccugcaggagcucggcaaguacgagcaguacaucaaguggccgugguacaucuggcugggcuucaucgccgggcugaucgcgaucgugauggugaccaucaugcucugcugcaugaccagcugcugcuccugccugaagggcugcugcagcugcggguccugcugcaaguucgacgaggacgacagcgagcccguccugaagggcgugaagcuccacuacacgugaggacuaguuauaagacugacuagcccgaugggccucccaacgggcccuccuccccuccuugcaccgagauuaauaaaaaaaaaaaaaaaaaaaaaaaaaaaaaaaaaaaaaaaaaaaaaaaaaaaaaaaaaaaaaaaaaaaaaaaaaaaaaaaaaaaaaaaaaaaaaaaaaaaa

SEQ ID NO: 25415 - RNA, 4011 nt, Artificial Sequence
  SARS-CoV-2/Wuhan/WIV05/2019__EPI_ISL_402128 spike protein mRNA gc (1-1273)(D614G_I692V)
aggagaaagcuuaccauguucguguuccugguccuccugccccuggugagcucccagugcgugaaccucaccacccgcacgcagcugccgcccgccuacaccaacagcuucacccggggcgucuacuaccccgacaagguguuccgcuccagcgugcugcacuccacccaggaccucuuccugcccuucuucagcaacgucacgugguuccacgccauccacguguccgggaccaacggcaccaagcgguucgacaacccggugcugcccuucaacgacggggucuacuucgcgagcaccgagaaguccaacaucauccgcggcuggaucuucgggacgacccucgacagcaagacccagucccugcugaucgugaacaacgccaccaacguggucaucaaggugugcgaguuccaguucugcaacgaccccuuccucggcguguacuaccacaagaacaacaagagcuggauggaguccgaguuccgggucuacagcuccgccaacaacugcacguucgaguacgugagccagcccuuccugauggaccuggagggcaagcaggggaacuucaagaaccuccgcgaguucguguucaagaacaucgacggcuacuucaagaucuacuccaagcacaccccgaucaaccugguccgggaccugccccagggguucagcgcccucgagccccugguggaccugcccaucggcaucaacaucacccgcuuccagacccuccuggcccugcaccgguccuaccucacgccgggggacagcagcuccggcuggaccgcgggcgccgccgccuacuacgugggguaccugcagccccgcaccuuccugcucaaguacaacgagaacggcaccaucacggacgcggucgacugcgcccuggacccccugagcgagaccaagugcacccucaaguccuucaccguggagaaggggaucuaccagacgagcaacuuccgggugcagcccaccgaguccaucguccgcuucccgaacaucaccaaccugugccccuucggcgagguguucaacgccacccgguucgccagcgucuacgccuggaaccgcaagcggaucuccaacugcguggcggacuacagcgugcuguacaacuccgccagcuucuccacguucaagugcuacggcgucagccccaccaagcucaacgaccugugcuucaccaacguguacgccgacuccuucgugauccgcggggacgagguccggcagaucgcccccggccagaccgggaagaucgccgacuacaacuacaagcugccggacgacuucacgggcugcgugaucgcguggaacagcaacaaccucgacuccaaggucgggggcaacuacaacuaccuguaccgccuguuccgcaagagcaaccucaagcccuucgagcgggacaucuccaccgagaucuaccaggccggcagcacccccugcaacgggguggagggcuucaacugcuacuucccccugcaguccuacggguuccagccgaccaacggcgugggguaccagcccuaccggguggucgugcugagcuucgagcuccugcacgcccccgccacggugugcggccccaagaaguccaccaaccuggucaagaacaagugcgugaacuucaacuucaacggccucaccgggaccggcgugcugaccgagagcaacaagaaguuccugccguuccagcaguucgggcgcgacaucgccgacacgaccgacgcgguccgcgacccccagacccuggagauccucgacaucacccccugcagcuucggcgggguguccgugaucacgccgggcaccaacaccagcaaccaggucgccgugcuguaccagggcgugaacugcaccgagguccccguggccauccacgccgaccagcugacgcccaccuggcggguguacuccaccgggagcaacgucuuccagacccgcgccggcugccucaucggggcggagcacgugaacaacuccuacgagugcgacauccccaucggcgccggcaucugcgccagcuaccagacgcagaccaacuccccgcggcgcgcccggagcguggcgucccagagcgucaucgccuacaccaugucccugggggccgagaacagcguggccuacuccaacaacagcaucgccauccccaccaacuucacgaucuccgugaccaccgagauccugcccgucagcaugaccaagacgagcguggacugcaccauguacaucugcggcgacuccaccgagugcagcaaccuccugcugcaguacggguccuucugcacccagcucaaccgcgcgcugacgggcaucgccguggagcaggacaagaacacccaggaggucuucgcccaggugaagcagaucuacaagacgcccccgaucaaggacuucgggggcuucaacuucagccagauccugcccgaccccuccaagcccagcaagcgguccuucaucgaggaccuccuguucaacaaggugacccuggccgacgccggcuucaucaagcaguacggggacugccucggcgacaucgcggcccgcgaccugaucugcgcccagaaguucaacgggcugaccguccucccgccccugcugaccgacgagaugaucgcccaguacaccagcgcccuccuggcgggcaccaucacguccggguggaccuucggcgccggcgccgcccugcagauccccuucgcgaugcagauggccuaccgguucaacgggaucggcgugacccagaacgugcucuacgagaaccagaagcugaucgccaaccaguucaacagcgccaucgggaagauccaggacucccugagcuccaccgccagcgcgcucggcaagcugcaggacgucgugaaccagaacgcccaggcccugaacacgcucgugaagcagcuguccagcaacuucggggccaucuccagcguccugaacgacauccucucccgccuggacaagguggaggccgaggugcagaucgaccggcugaucaccggccgccuccagagccugcagaccuacgucacccagcagcugauccgggcggccgagauccgcgccagcgccaaccucgccgcgaccaagauguccgagugcgugcugggccagagcaagcggguggacuucugcgggaagggcuaccaccugauguccuucccccagagcgccccgcacggggucguguuccuccacgucacguacgugcccgcccaggagaagaacuucaccaccgcccccgcgaucugccacgacggcaaggcccacuucccccgcgaggggguguucgucuccaacggcacccacugguucgugacgcagcggaacuucuacgagccgcagaucaucaccaccgacaacaccuucgugagcggcaacugcgacgucgugaucgggaucgugaacaacacggucuacgacccccugcagcccgagcuggacuccuucaaggaggagcucgacaaguacuucaagaaccacaccagccccgacguggaccugggcgacaucuccgggaucaacgccagcguggucaacauccagaaggagaucgaccgccugaacgagguggccaagaaccucaacgagucccugaucgaccugcaggagcucggcaaguacgagcaguacaucaaguggccgugguacaucuggcugggcuucaucgccgggcugaucgcgaucgugauggucaccaucaugcucugcugcaugaccagcugcugcuccugccugaagggcugcugcagcugcggguccugcugcaaguucgacgaggacgacagcgagcccgugcugaagggcgugaagcuccacuacacgugaggacuaguuauaagacugacuagcccgaugggccucccaacgggcccuccuccccuccuugcaccgagauuaauaaaaaaaaaaaaaaaaaaaaaaaaaaaaaaaaaaaaaaaaaaaaaaaaaaaaaaaaaaaaaaaaaaaaaaaaaaaaaaaaaaaaaaaaaaaaaaaaaaaa

SEQ ID NO: 25416 - RNA, 4011 nt, Artificial Sequence
  SARS-CoV-2/Wuhan/WIV05/2019__EPI_ISL_402128 spike protein mRNA gc (1-1273)(D614G_M1229I)
aggagaaagcuuaccauguucguguuccugguccuccugccccuggugagcucccagugcgugaaccucaccacccgcacgcagcugccgcccgccuacaccaacagcuucacccggggcgucuacuaccccgacaagguguuccgcuccagcgugcugcacuccacccaggaccucuuccugcccuucuucagcaacgucacgugguuccacgccauccacguguccgggaccaacggcaccaagcgguucgacaacccggugcugcccuucaacgacggggucuacuucgcgagcaccgagaaguccaacaucauccgcggcuggaucuucgggacgacccucgacagcaagacccagucccugcugaucgugaacaacgccaccaacguggucaucaaggugugcgaguuccaguucugcaacgaccccuuccucggcguguacuaccacaagaacaacaagagcuggauggaguccgaguuccgggucuacagcuccgccaacaacugcacguucgaguacgugagccagcccuuccugauggaccuggagggcaagcaggggaacuucaagaaccuccgcgaguucguguucaagaacaucgacggcuacuucaagaucuacuccaagcacaccccgaucaaccugguccgggaccugccccagggguucagcgcccucgagccccugguggaccugcccaucggcaucaacaucacccgcuuccagacccuccuggcccugcaccgguccuaccucacgccgggggacagcagcuccggcuggaccgcgggcgccgccgccuacuacgugggguaccugcagccccgcaccuuccugcucaaguacaacgagaacggcaccaucacggacgcggucgacugcgcccuggacccccugagcgagaccaagugcacccucaaguccuucaccguggagaaggggaucuaccagacgagcaacuuccgggugcagcccaccgaguccaucguccgcuucccgaacaucaccaaccugugccccuucggcgagguguucaacgccacccgguucgccagcgucuacgccuggaaccgcaagcggaucuccaacugcguggcggacuacagcgugcuguacaacuccgccagcuucuccacguucaagugcuacggcgucagccccaccaagcucaacgaccugugcuucaccaacguguacgccgacuccuucgugauccgcggggacgagguccggcagaucgcccccggccagaccgggaagaucgccgacuacaacuacaagcugccggacgacuucacgggcugcgugaucgcguggaacagcaacaaccucgacuccaaggucgggggcaacuacaacuaccuguaccgccuguuccgcaagagcaaccucaagcccuucgagcgggacaucuccaccgagaucuaccaggccggcagcacccccugcaacgggguggagggcuucaacugcuacuucccccugcaguccuacggguuccagccgaccaacggcgugggguaccagcccuaccggguggucgugcugagcuucgagcuccugcacgcccccgccacggugugcggccccaagaaguccaccaaccuggucaagaacaagugcgugaacuucaacuucaacggccucaccgggaccggcgugcugaccgagagcaacaagaaguuccugccguuccagcaguucgggcgcgacaucgccgacacgaccgacgcgguccgcgacccccagacccuggagauccucgacaucacccccugcagcuucggcgggguguccgugaucacgccgggcaccaacaccagcaaccaggucgccgugcuguaccagggcgugaacugcaccgagguccccguggccauccacgccgaccagcugacgcccaccuggcggguguacuccaccgggagcaacgucuuccagacccgcgccggcugccucaucggggcggagcacgugaacaacuccuacgagugcgacauccccaucggcgccggcaucugcgccagcuaccagacgcagaccaacuccccgcggcgcgcccggagcguggcgucccagagcaucaucgccuacaccaugucccugggggccgagaacagcgucgccuacuccaacaacagcaucgccauccccaccaacuucacgaucuccgugaccaccgagauccugcccgugagcaugaccaagacgagcgucgacugcaccauguacaucugcggcgacuccaccgagugcagcaaccuccugcugcaguacggguccuucugcacccagcucaaccgcgcgcugacgggcaucgccguggagcaggacaagaacacccaggagguguucgcccaggucaagcagaucuacaagacgcccccgaucaaggacuucgggggcuucaacuucagccagauccugcccgaccccuccaagcccagcaagcgguccuucaucgaggaccuccuguucaacaaggugacccuggccgacgccggcuucaucaagcaguacggggacugccucggcgacaucgcggcccgcgaccugaucugcgcccagaaguucaacgggcugaccgugcucccgccccugcugaccgacgagaugaucgcccaguacaccagcgcccuccuggcgggcaccaucacguccggguggaccuucggcgccggcgccgcccugcagauccccuucgcgaugcagauggccuaccgguucaacgggaucggcgucacccagaacgugcucuacgagaaccagaagcugaucgccaaccaguucaacagcgccaucgggaagauccaggacucccugagcuccaccgccagcgcgcucggcaagcugcaggacguggucaaccagaacgcccaggcccugaacacgcucgugaagcagcuguccagcaacuucggggccaucuccagcgugcugaacgacauccucucccgccuggacaaggucgaggccgaggugcagaucgaccggcugaucaccggccgccuccagagccugcagaccuacgugacccagcagcugauccgggcggccgagauccgcgccagcgccaaccucgccgcgaccaagauguccgagugcguccugggccagagcaagcggguggacuucugcgggaagggcuaccaccugauguccuucccccagagcgccccgcacgggguggucuuccuccacgugacguacguccccgcccaggagaagaacuucaccaccgcccccgcgaucugccacgacggcaaggcccacuucccccgcgaggggguguucguguccaacggcacccacugguucgucacgcagcggaacuucuacgagccgcagaucaucaccaccgacaacaccuucgugagcggcaacugcgacguggucaucgggaucgugaacaacacgguguacgacccccugcagcccgagcuggacuccuucaaggaggagcucgacaaguacuucaagaaccacaccagccccgacgucgaccugggcgacaucuccgggaucaacgccagcguggugaacauccagaaggagaucgaccgccugaacgaggucgccaagaaccucaacgagucccugaucgaccugcaggagcucggcaaguacgagcaguacaucaaguggccgugguacaucuggcugggcuucaucgccgggcugaucgcgaucgugaucgugaccaucaugcucugcugcaugaccagcugcugcuccugccugaagggcugcugcagcugcggguccugcugcaaguucgacgaggacgacagcgagcccguccugaagggcgugaagcuccacuacacgugaggacuaguuauaagacugacuagcccgaugggccucccaacgggcccuccuccccuccuugcaccgagauuaauaaaaaaaaaaaaaaaaaaaaaaaaaaaaaaaaaaaaaaaaaaaaaaaaaaaaaaaaaaaaaaaaaaaaaaaaaaaaaaaaaaaaaaaaaaaaaaaaaaaa

SEQ ID NO: 25417 - RNA, 4005 nt, Artificial Sequence
  SARS-CoV-2/Wuhan/WIV05/2019__EPI_ISL_402128 spike protein mRNA gc (1-1273)(H69del_V70del_A222V_Y453F_S477N_D614G_I692V)
aggagaaagcuuaccauguucguguuccugguccuccugccccuggugagcucccagugcgugaaccucaccacccgcacgcagcugccgcccgccuacaccaacagcuucacccggggcgucuacuaccccgacaagguguuccgcuccagcgugcugcacuccacccaggaccucuuccugcccuucuucagcaacgucacgugguuccacgccaucuccgggaccaacggcaccaagcgguucgacaacccggugcugcccuucaacgacgggguguacuucgcgagcaccgagaaguccaacaucauccgcggcuggaucuucgggacgacccucgacagcaagacccagucccugcugaucgucaacaacgccaccaacguggugaucaaggucugcgaguuccaguucugcaacgaccccuuccucggcguguacuaccacaagaacaacaagagcuggauggaguccgaguuccggguguacagcuccgccaacaacugcacguucgaguacgucagccagcccuuccugauggaccuggagggcaagcaggggaacuucaagaaccuccgcgaguucguguucaagaacaucgacggcuacuucaagaucuacuccaagcacaccccgaucaaccuggugcgggaccugccccagggguucagcguccucgagccccugguggaccugcccaucggcaucaacaucacccgcuuccagacccuccuggcccugcaccgguccuaccucacgccgggggacagcagcuccggcuggaccgccggcgcggccgccuacuacgugggguaccugcagccccgcaccuuccugcucaaguacaacgagaacggcaccaucacggacgccgucgacugcgcgcuggacccccugagcgagaccaagugcacccucaaguccuucaccguggagaaggggaucuaccagacgagcaacuuccgggugcagcccaccgaguccaucguccgcuucccgaacaucaccaaccugugccccuucggcgagguguucaacgccacccgguucgccagcgucuacgccuggaaccgcaagcggaucuccaacugcguggccgacuacagcgugcuguacaacuccgcgagcuucuccacguucaagugcuacggcgucagccccaccaagcucaacgaccugugcuucaccaacguguacgccgacuccuucgugauccgcggggacgagguccggcagaucgcccccggccagaccgggaagaucgccgacuacaacuacaagcugccggacgacuucacgggcugcgugaucgccuggaacagcaacaaccucgacuccaaggucgggggcaacuacaacuaccuguuccgccuguuccgcaagagcaaccucaagcccuucgagcgggacaucuccaccgagaucuaccaggcgggcaacacccccugcaacgggguggagggcuucaacugcuacuucccccugcagagcuacggguuccagccgaccaacggcgugggguaccagcccuaccggguggucgugcuguccuucgagcuccugcacgcccccgccacggugugcggccccaagaaguccaccaaccuggucaagaacaagugcgugaacuucaacuucaacggccucaccgggaccggcgugcugaccgagagcaacaagaaguuccugccguuccagcaguucgggcgcgacaucgccgacacgaccgacgccguccgcgacccccagacccuggagauccucgacaucacccccugcagcuucggcggggugagcgugaucacgccgggcaccaacaccuccaaccaggucgcggugcuguaccagggcgugaacugcaccgagguccccguggccauccacgccgaccagcugacgcccaccuggcggguguacagcaccggguccaacgucuuccagacccgcgccggcugccucaucggggccgagcacgugaacaacagcuacgagugcgacauccccaucggcgcgggcaucugcgccuccuaccagacgcagaccaacagcccgcggcgcgcccgguccguggccagccaguccgucaucgcguacaccaugagccugggggccgagaacuccguggccuacagcaacaacuccaucgccauccccaccaacuucacgaucagcgugaccaccgagauccugcccgucuccaugaccaagacgagcguggacugcaccauguacaucugcggcgacagcaccgagugcuccaaccuccugcugcaguacgggagcuucugcacccagcucaaccgcgcccugacgggcaucgcgguggagcaggacaagaacacccaggaggucuucgcccaggugaagcagaucuacaagacgcccccgaucaaggacuucgggggcuucaacuucucccagauccugcccgaccccagcaagcccuccaagcggagcuucaucgaggaccuccuguucaacaaggugacccuggccgacgccggcuucaucaagcaguacggggacugccucggcgacaucgccgcgcgcgaccugaucugcgcccagaaguucaacgggcugaccguccucccgccccugcugaccgacgagaugaucgcccaguacaccuccgcccuccuggccggcaccaucacgagcggguggaccuucggcgcgggcgccgcccugcagauccccuucgccaugcagauggcguaccgguucaacgggaucggcgugacccagaacgugcucuacgagaaccagaagcugaucgccaaccaguucaacuccgccaucgggaagauccaggacagccuguccagcaccgccuccgcccucggcaagcugcaggacgucgugaaccagaacgcgcaggcccugaacacgcucgugaagcagcugagcuccaacuucggggccaucagcuccguccugaacgacauccucagccgccuggacaagguggaggccgaggugcagaucgaccggcugaucaccggccgccuccagucccugcagaccuacgucacccagcagcugauccgggccgcggagauccgcgccagcgccaaccucgccgccaccaagaugagcgagugcgugcugggccaguccaagcggguggacuucugcgggaagggcuaccaccugaugagcuucccccaguccgcgccgcacggggucguguuccuccacgucacguacgugcccgcccaggagaagaacuucaccaccgcccccgccaucugccacgacggcaaggcgcacuucccccgcgaggggguguucgucagcaacggcacccacugguucgugacgcagcggaacuucuacgagccgcagaucaucaccaccgacaacaccuucguguccggcaacugcgacgucgugaucgggaucgugaacaacacggucuacgacccccugcagcccgagcuggacagcuucaaggaggagcucgacaaguacuucaagaaccacaccucccccgacguggaccugggcgacaucagcgggaucaacgccuccguggucaacauccagaaggagaucgaccgccugaacgagguggccaagaaccucaacgagagccugaucgaccugcaggagcucggcaaguacgagcaguacaucaaguggccgugguacaucuggcugggcuucaucgccgggcugaucgccaucgugauggucaccaucaugcucugcugcaugaccuccugcugcagcugccugaagggcugcugcuccugcgggagcugcugcaaguucgacgaggacgacuccgagcccgugcugaagggcgugaagcuccacuacacgugaggacuaguuauaagacugacuagcccgaugggccucccaacgggcccuccuccccuccuugcaccgagauuaauaaaaaaaaaaaaaaaaaaaaaaaaaaaaaaaaaaaaaaaaaaaaaaaaaaaaaaaaaaaaaaaaaaaaaaaaaaaaaaaaaaaaaaaaaaaaaaaaaaaa

SEQ ID NO: 25418 - RNA, 4005 nt, Artificial Sequence
  SARS-CoV-2/Wuhan/WIV05/2019__EPI_ISL_402128 spike protein mRNA gc (1-1273)(H69del_V70del_Y453F_D614G_I692V_M1229I)
aggagaaagcuuaccauguucguguuccugguccuccugccccuggugagcucccagugcgugaaccucaccacccgcacgcagcugccgcccgccuacaccaacagcuucacccggggcgucuacuaccccgacaagguguuccgcuccagcgugcugcacuccacccaggaccucuuccugcccuucuucagcaacgucacgugguuccacgccaucuccgggaccaacggcaccaagcgguucgacaacccggugcugcccuucaacgacgggguguacuucgcgagcaccgagaaguccaacaucauccgcggcuggaucuucgggacgacccucgacagcaagacccagucccugcugaucgucaacaacgccaccaacguggugaucaaggucugcgaguuccaguucugcaacgaccccuuccucggcguguacuaccacaagaacaacaagagcuggauggaguccgaguuccggguguacagcuccgccaacaacugcacguucgaguacgucagccagcccuuccugauggaccuggagggcaagcaggggaacuucaagaaccuccgcgaguucguguucaagaacaucgacggcuacuucaagaucuacuccaagcacaccccgaucaaccuggugcgggaccugccccagggguucagcgcccucgagccccuggucgaccugcccaucggcaucaacaucacccgcuuccagacccuccuggcccugcaccgguccuaccucacgccgggggacagcagcuccggcuggaccgcgggcgccgccgccuacuacgugggguaccugcagccccgcaccuuccugcucaaguacaacgagaacggcaccaucacggacgcgguggacugcgcccuggacccccugagcgagaccaagugcacccucaaguccuucaccgucgagaaggggaucuaccagacgagcaacuuccgggugcagcccaccgaguccaucgugcgcuucccgaacaucaccaaccugugccccuucggcgaggucuucaacgccacccgguucgccagcguguacgccuggaaccgcaagcggaucuccaacugcgucgcggacuacagcgugcuguacaacuccgccagcuucuccacguucaagugcuacggcgugagccccaccaagcucaacgaccugugcuucaccaacgucuacgccgacuccuucgugauccgcggggacgaggugcggcagaucgcccccggccagaccgggaagaucgccgacuacaacuacaagcugccggacgacuucacgggcugcgucaucgcguggaacagcaacaaccucgacuccaaggucgggggcaacuacaacuaccuguuccgccuguuccgcaagagcaaccucaagcccuucgagcgggacaucuccaccgagaucuaccaggccggcagcacccccugcaacgggguggagggcuucaacugcuacuucccccugcaguccuacggguuccagccgaccaacggcgugggguaccagcccuaccggguggugguccugagcuucgagcuccugcacgcccccgccacggugugcggccccaagaaguccaccaaccuggugaagaacaagugcgucaacuucaacuucaacggccucaccgggaccggcgugcugaccgagagcaacaagaaguuccugccguuccagcaguucgggcgcgacaucgccgacacgaccgacgcggugcgcgacccccagacccuggagauccucgacaucacccccugcagcuucggcggggucuccgugaucacgccgggcaccaacaccagcaaccagguggccguccuguaccagggcgugaacugcaccgaggugcccgucgccauccacgccgaccagcugacgcccaccuggcggguguacuccaccgggagcaacguguuccagacccgcgccggcugccucaucggggcggagcacgucaacaacuccuacgagugcgacauccccaucggcgccggcaucugcgccagcuaccagacgcagaccaacuccccgcggcgcgcccggagcguggcgucccagagcgugaucgccuacaccaugucccugggggccgagaacagcgucgccuacuccaacaacagcaucgccauccccaccaacuucacgaucuccgugaccaccgagauccugcccgugagcaugaccaagacgagcgucgacugcaccauguacaucugcggcgacuccaccgagugcagcaaccuccugcugcaguacggguccuucugcacccagcucaaccgcgcgcugacgggcaucgccguggagcaggacaagaacacccaggagguguucgcccaggucaagcagaucuacaagacgcccccgaucaaggacuucgggggcuucaacuucagccagauccugcccgaccccuccaagcccagcaagcgguccuucaucgaggaccuccuguucaacaaggugacccuggccgacgccggcuucaucaagcaguacggggacugccucggcgacaucgcggcccgcgaccugaucugcgcccagaaguucaacgggcugaccgugcucccgccccugcugaccgacgagaugaucgcccaguacaccagcgcccuccuggcgggcaccaucacguccggguggaccuucggcgccggcgccgcccugcagauccccuucgcgaugcagauggccuaccgguucaacgggaucggcgucacccagaacgugcucuacgagaaccagaagcugaucgccaaccaguucaacagcgccaucgggaagauccaggacucccugagcuccaccgccagcgcgcucggcaagcugcaggacguggucaaccagaacgcccaggcccugaacacgcucgugaagcagcuguccagcaacuucggggccaucuccagcgugcugaacgacauccucucccgccuggacaaggucgaggccgaggugcagaucgaccggcugaucaccggccgccuccagagccugcagaccuacgugacccagcagcugauccgggcggccgagauccgcgccagcgccaaccucgccgcgaccaagauguccgagugcguccugggccagagcaagcggguggacuucugcgggaagggcuaccaccugauguccuucccccagagcgccccgcacgggguggucuuccuccacgugacguacguccccgcccaggagaagaacuucaccaccgcccccgcgaucugccacgacggcaaggcccacuucccccgcgaggggguguucguguccaacggcacccacugguucgucacgcagcggaacuucuacgagccgcagaucaucaccaccgacaacaccuucgugagcggcaacugcgacguggucaucgggaucgugaacaacacgguguacgacccccugcagcccgagcuggacuccuucaaggaggagcucgacaaguacuucaagaaccacaccagccccgacgucgaccugggcgacaucuccgggaucaacgccagcguggugaacauccagaaggagaucgaccgccugaacgaggucgccaagaaccucaacgagucccugaucgaccugcaggagcucggcaaguacgagcaguacaucaaguggccgugguacaucuggcugggcuucaucgccgggcugaucgcgaucgugaucgugaccaucaugcucugcugcaugaccagcugcugcuccugccugaagggcugcugcagcugcggguccugcugcaaguucgacgaggacgacagcgagcccguccugaagggcgugaagcuccacuacacgugaggacuaguuauaagacugacuagcccgaugggccucccaacgggcccuccuccccuccuugcaccgagauuaauaaaaaaaaaaaaaaaaaaaaaaaaaaaaaaaaaaaaaaaaaaaaaaaaaaaaaaaaaaaaaaaaaaaaaaaaaaaaaaaaaaaaaaaaaaaaaaaaaaaa

SEQ ID NO: 25419 - RNA, 4002 nt, Artificial Sequence
  SARS-CoV-2/Wuhan/WIV05/2019__EPI_ISL_402128 spike protein mRNA gc (1-1273)(H69del_V70del_Y144del_N501Y_A570D_D614G_P681H_T716I_S982 A_D1118H)
aggagaaagcuuaccauguucguguuccugguccuccugccccuggugagcucccagugcgugaaccucaccacccgcacgcagcugccgcccgccuacaccaacagcuucacccggggcgucuacuaccccgacaagguguuccgcuccagcgugcugcacuccacccaggaccucuuccugcccuucuucagcaacgucacgugguuccacgccaucuccgggaccaacggcaccaagcgguucgacaacccggugcugcccuucaacgacgggguguacuucgcgagcaccgagaaguccaacaucauccgcggcuggaucuucgggacgacccucgacagcaagacccagucccugcugaucgucaacaacgccaccaacguggugaucaaggucugcgaguuccaguucugcaacgaccccuuccucggcguguaccacaagaacaacaagagcuggauggaguccgaguuccggguguacagcuccgccaacaacugcacguucgaguacgucagccagcccuuccugauggaccuggagggcaagcaggggaacuucaagaaccuccgcgaguucguguucaagaacaucgacggcuacuucaagaucuacuccaagcacaccccgaucaaccuggugcgggaccugccccagggguucagcgcccucgagccccuggucgaccugcccaucggcaucaacaucacccgcuuccagacccuccuggcccugcaccgguccuaccucacgccgggggacagcagcuccggcuggaccgcgggcgccgccgccuacuacgugggguaccugcagccccgcaccuuccugcucaaguacaacgagaacggcaccaucacggacgcgguggacugcgcccuggacccccugagcgagaccaagugcacccucaaguccuucaccgucgagaaggggaucuaccagacgagcaacuuccgggugcagcccaccgaguccaucgugcgcuucccgaacaucaccaaccugugccccuucggcgaggucuucaacgccacccgguucgccagcguguacgccuggaaccgcaagcggaucuccaacugcgucgcggacuacagcgugcuguacaacuccgccagcuucuccacguucaagugcuacggcgugagccccaccaagcucaacgaccugugcuucaccaacgucuacgccgacuccuucgugauccgcggggacgaggugcggcagaucgcccccggccagaccgggaagaucgccgacuacaacuacaagcugccggacgacuucacgggcugcgucaucgcguggaacagcaacaaccucgacuccaaggucgggggcaacuacaacuaccuguaccgccuguuccgcaagagcaaccucaagcccuucgagcgggacaucuccaccgagaucuaccaggccggcagcacccccugcaacgggguggagggcuucaacugcuacuucccccugcaguccuacggguuccagccgaccuacggcgugggguaccagcccuaccggguggugguccugagcuucgagcuccugcacgcccccgccacggugugcggccccaagaaguccaccaaccuggugaagaacaagugcgucaacuucaacuucaacggccucaccgggaccggcgugcugaccgagagcaacaagaaguuccugccguuccagcaguucgggcgcgacaucgacgacacgaccgacgccgugcgcgacccccagacccuggagauccucgacaucacccccugcagcuucggcggggucuccgugaucacgccgggcaccaacaccagcaaccagguggcgguccuguaccagggcgugaacugcaccgaggugcccgucgccauccacgccgaccagcugacgcccaccuggcggguguacuccaccgggagcaacguguuccagacccgcgccggcugccucaucggggccgagcacgucaacaacuccuacgagugcgacauccccaucggcgcgggcaucugcgccagcuaccagacgcagaccaacucccaccggcgcgcccggagcguggccucccagagcaucaucgcguacaccaugucccugggggccgagaacagcguggccuacuccaacaacagcaucgccaucccgaucaacuucaccaucuccgucacgaccgagauccugcccgugagcaugaccaagaccagcguggacugcacgauguacaucugcggcgacuccaccgagugcagcaaccuccugcugcaguacggguccuucugcacccagcucaaccgcgcccugaccggcaucgcggucgagcaggacaagaacacgcaggagguguucgcccaggugaagcagaucuacaagaccccgcccaucaaggacuucgggggcuucaacuucagccagauccugcccgaccccuccaagcccagcaagcgguccuucaucgaggaccuccuguucaacaaggucacccuggccgacgccggcuucaucaagcaguacggggacugccucggcgacaucgccgcgcgcgaccugaucugcgcccagaaguucaacgggcugaccgugcugcccccgcuccugacggacgagaugaucgcccaguacaccagcgcccuccuggccggcaccaucaccuccggguggacguucggcgcgggcgccgcccugcagauccccuucgccaugcagauggcguaccgguucaacgggaucggcgugacccagaacguccucuacgagaaccagaagcugaucgccaaccaguucaacagcgccaucgggaagauccaggacucccugagcuccaccgccagcgcccucggcaagcugcaggacguggugaaccagaacgcgcaggcccugaacacccucgucaagcagcuguccagcaacuucggggccaucuccagcgugcugaacgacauccucgcccgccuggacaagguggaggccgagguccagaucgaccggcugaucacgggccgccuccagucccugcagaccuacgugacccagcagcugauccgggcggccgagauccgcgccagcgccaaccucgccgcgaccaagaugagcgagugcgugcugggccaguccaagcgggucgacuucugcgggaagggcuaccaccugaugagcuucccccaguccgcgccccacggggugguguuccuccacgucaccuacgugccggcccaggagaagaacuucacgaccgcccccgccaucugccacgacggcaaggcccacuucccccgcgagggggucuucgugagcaacggcacccacugguucgugacccagcggaacuucuacgagccccagaucaucacgacccacaacaccuucgucuccggcaacugcgacguggugaucgggaucgucaacaacaccguguacgacccgcugcagcccgagcuggacagcuucaaggaggagcucgacaaguacuucaagaaccacacgucccccgacguggaccugggcgacaucagcgggaucaacgccuccgucgugaacauccagaaggagaucgaccgccugaacgagguggccaagaaccucaacgagagccugaucgaccugcaggagcucggcaaguacgagcaguacaucaaguggcccugguacaucuggcugggcuucaucgccgggcugaucgcgaucgucauggugaccaucaugcucugcugcaugaccuccugcugcagcugccugaagggcugcugcuccugcgggagcugcugcaaguucgacgaggacgacuccgagccggugcugaagggcgucaagcuccacuacaccugaggacuaguuauaagacugacuagcccgaugggccucccaacgggcccuccuccccuccuugcaccgagauuaauaaaaaaaaaaaaaaaaaaaaaaaaaaaaaaaaaaaaaaaaaaaaaaaaaaaaaaaaaaaaaaaaaaaaaaaaaaaaaaaaaaaaaaaaaaaaaaaaaaaa

SEQ ID NO: 25420 - RNA, 4011 nt, Artificial Sequence
  SARS-CoV-2/Wuhan/WIV05/2019__EPI_ISL_402128 spike protein mRNA gc (1-1273)(K417N_E484K_N501Y_D614G)
aggagaaagcuuaccauguucguguuccugguccuccugccccuggugagcucccagugcgugaaccucaccacccgcacgcagcugccgcccgccuacaccaacagcuucacccggggcgucuacuaccccgacaagguguuccgcuccagcgugcugcacuccacccaggaccucuuccugcccuucuucagcaacgucacgugguuccacgccauccacguguccgggaccaacggcaccaagcgguucgacaacccggugcugcccuucaacgacggggucuacuucgcgagcaccgagaaguccaacaucauccgcggcuggaucuucgggacgacccucgacagcaagacccagucccugcugaucgugaacaacgccaccaacguggucaucaaggugugcgaguuccaguucugcaacgaccccuuccucggcguguacuaccacaagaacaacaagagcuggauggaguccgaguuccgggucuacagcuccgccaacaacugcacguucgaguacgugagccagcccuuccugauggaccuggagggcaagcaggggaacuucaagaaccuccgcgaguucguguucaagaacaucgacggcuacuucaagaucuacuccaagcacaccccgaucaaccugguccgggaccugccccagggguucagcgcccucgagccccugguggaccugcccaucggcaucaacaucacccgcuuccagacccuccuggcccugcaccgguccuaccucacgccgggggacagcagcuccggcuggaccgcgggcgccgccgccuacuacgugggguaccugcagccccgcaccuuccugcucaaguacaacgagaacggcaccaucacggacgcggucgacugcgcccuggacccccugagcgagaccaagugcacccucaaguccuucaccguggagaaggggaucuaccagacgagcaacuuccgggugcagcccaccgaguccaucguccgcuucccgaacaucaccaaccugugccccuucggcgagguguucaacgccacccgguucgccagcgucuacgccuggaaccgcaagcggaucuccaacugcguggcggacuacagcgugcuguacaacuccgccagcuucuccacguucaagugcuacggcgucagccccaccaagcucaacgaccugugcuucaccaacguguacgccgacuccuucgugauccgcggggacgagguccggcagaucgcccccggccagaccgggaacaucgccgacuacaacuacaagcugccggacgacuucacgggcugcgugaucgcguggaacagcaacaaccucgacuccaaggucgggggcaacuacaacuaccuguaccgccuguuccgcaagagcaaccucaagcccuucgagcgggacaucuccaccgagaucuaccaggccggcagcacccccugcaacggggugaagggcuucaacugcuacuucccccugcaguccuacggguuccagccgaccuacggcgugggguaccagcccuaccggguggucgugcugagcuucgagcuccugcacgcccccgccacggugugcggccccaagaaguccaccaaccuggucaagaacaagugcgugaacuucaacuucaacggccucaccgggaccggcgugcugaccgagagcaacaagaaguuccugccguuccagcaguucgggcgcgacaucgccgacacgaccgacgcgguccgcgacccccagacccuggagauccucgacaucacccccugcagcuucggcgggguguccgugaucacgccgggcaccaacaccagcaaccaggucgccgugcuguaccagggcgugaacugcaccgagguccccguggccauccacgccgaccagcugacgcccaccuggcggguguacuccaccgggagcaacgucuuccagacccgcgccggcugccucaucggggcggagcacgugaacaacuccuacgagugcgacauccccaucggcgccggcaucugcgccagcuaccagacgcagaccaacuccccgcggcgcgcccggagcguggcgucccagagcaucaucgccuacaccaugucccugggggccgagaacagcgucgccuacuccaacaacagcaucgccauccccaccaacuucacgaucuccgugaccaccgagauccugcccgugagcaugaccaagacgagcgucgacugcaccauguacaucugcggcgacuccaccgagugcagcaaccuccugcugcaguacggguccuucugcacccagcucaaccgcgcgcugacgggcaucgccguggagcaggacaagaacacccaggagguguucgcccaggucaagcagaucuacaagacgcccccgaucaaggacuucgggggcuucaacuucagccagauccugcccgaccccuccaagcccagcaagcgguccuucaucgaggaccuccuguucaacaaggugacccuggccgacgccggcuucaucaagcaguacggggacugccucggcgacaucgcggcccgcgaccugaucugcgcccagaaguucaacgggcugaccgugcucccgccccugcugaccgacgagaugaucgcccaguacaccagcgcccuccuggcgggcaccaucacguccggguggaccuucggcgccggcgccgcccugcagauccccuucgcgaugcagauggccuaccgguucaacgggaucggcgucacccagaacgugcucuacgagaaccagaagcugaucgccaaccaguucaacagcgccaucgggaagauccaggacucccugagcuccaccgccagcgcgcucggcaagcugcaggacguggucaaccagaacgcccaggcccugaacacgcucgugaagcagcuguccagcaacuucggggccaucuccagcgugcugaacgacauccucucccgccuggacaaggucgaggccgaggugcagaucgaccggcugaucaccggccgccuccagagccugcagaccuacgugacccagcagcugauccgggcggccgagauccgcgccagcgccaaccucgccgcgaccaagauguccgagugcguccugggccagagcaagcggguggacuucugcgggaagggcuaccaccugauguccuucccccagagcgccccgcacgggguggucuuccuccacgugacguacguccccgcccaggagaagaacuucaccaccgcccccgcgaucugccacgacggcaaggcccacuucccccgcgaggggguguucguguccaacggcacccacugguucgucacgcagcggaacuucuacgagccgcagaucaucaccaccgacaacaccuucgugagcggcaacugcgacguggucaucgggaucgugaacaacacgguguacgacccccugcagcccgagcuggacuccuucaaggaggagcucgacaaguacuucaagaaccacaccagccccgacgucgaccugggcgacaucuccgggaucaacgccagcguggugaacauccagaaggagaucgaccgccugaacgaggucgccaagaaccucaacgagucccugaucgaccugcaggagcucggcaaguacgagcaguacaucaaguggccgugguacaucuggcugggcuucaucgccgggcugaucgcgaucgugauggugaccaucaugcucugcugcaugaccagcugcugcuccugccugaagggcugcugcagcugcggguccugcugcaaguucgacgaggacgacagcgagcccguccugaagggcgugaagcuccacuacacgugaggacuaguuauaagacugacuagcccgaugggccucccaacgggcccuccuccccuccuugcaccgagauuaauaaaaaaaaaaaaaaaaaaaaaaaaaaaaaaaaaaaaaaaaaaaaaaaaaaaaaaaaaaaaaaaaaaaaaaaaaaaaaaaaaaaaaaaaaaaaaaaaaaaa

SEQ ID NO: 25421 - RNA, 4002 nt, Artificial Sequence
  SARS-CoV-2/Wuhan/WIV05/2019__EPI_ISL_402128 spike protein mRNA gc (1-1273)(L18F_D80A_D215G_L242del_A243del_L244del_R246I_K417N_E484 K_N501Y_D614G_A701V)
aggagaaagcuuaccauguucguguuccugguccuccugccccuggugagcucccagugcgugaacuucaccacccgcacgcagcucccgcccgccuacaccaacagcuucacccggggcgucuacuaccccgacaagguguuccgcuccagcgugcugcacuccacccaggaccuguuccuccccuucuucagcaacgucacgugguuccacgccauccacguguccgggaccaacggcaccaagcgguucgcgaacccggugcugcccuucaacgacggggucuacuucgccagcaccgagaaguccaacaucauccgcggcuggaucuucgggacgacccuggacagcaagacccagucccuccugaucgugaacaacgccaccaacguggucaucaaggugugcgaguuccaguucugcaacgaccccuuccugggcguguacuaccacaagaacaacaagagcuggauggaguccgaguuccgggucuacagcuccgccaacaacugcacguucgaguacgugagccagcccuuccucauggaccuggagggcaagcaggggaacuucaagaaccugcgcgaguucguguucaagaacaucgacggcuacuucaagaucuacuccaagcacaccccgaucaaccucguccgggggcugccccagggcuucagcgcccuggagccccucguggaccugcccaucgggaucaacaucacccgcuuccagacccugcacaucuccuaccucacgccgggcgacagcagcuccggcuggaccgcgggggccgccgccuacuacgugggcuaccugcagccccggaccuuccugcucaaguacaacgagaacgggaccaucacggacgcggucgacugcgcccuggacccccugagcgagaccaagugcacccucaaguccuucaccguggagaagggcaucuaccagacgagcaacuuccgcgugcagcccaccgaguccaucguccgguucccgaacaucaccaaccugugccccuucggcgagguguucaacgccacccgcuucgccagcgucuacgccuggaaccggaagcgcaucuccaacugcguggcggacuacagcgugcuguacaacuccgccagcuucuccacguucaagugcuacggggucagccccaccaagcucaacgaccugugcuucaccaacguguacgccgacuccuucgugauccggggcgacgagguccgccagaucgcccccgggcagaccggcaacaucgccgacuacaacuacaagcugccggacgacuucacggggugcgugaucgcguggaacagcaacaaccucgacuccaaggugggcggcaacuacaacuaccuguaccggcuguuccgcaagagcaaccucaagcccuucgagcgggacaucuccaccgagaucuaccaggccgggagcacccccugcaacggcgucaagggguucaacugcuacuucccccugcaguccuacggcuuccagccgaccuacggggugggcuaccagcccuaccgcguggucgugcugagcuucgagcuccugcacgcccccgccacggugugcggccccaagaaguccaccaaccuggucaagaacaagugcgugaacuucaacuucaacgggcucaccggcaccggggugcugaccgagagcaacaagaaguuccugccguuccagcaguucggccgggacaucgccgacacgaccgacgcgguccgcgacccccagacccucgagauccuggacaucacccccugcagcuucgggggcguguccgugaucacgccgggcaccaacaccagcaaccaggucgccgugcuguaccagggggugaacugcaccgagguccccguggccauccacgccgaccagcugacgcccaccuggcgcguguacuccaccggcagcaacgucuuccagacccgggccgggugccucaucggcgcggagcacgugaacaacuccuacgagugcgacauccccaucggcgccgggaucugcgccagcuaccagacgcagaccaacuccccgcgccgggcccgcagcguggcgucccagagcaucaucgccuacaccaugucccugggcgucgagaacagcguggccuacuccaacaacagcaucgccauccccaccaacuucacgaucuccgugaccaccgagauccugcccgucagcaugaccaagacgagcguggacugcaccauguacaucugcggggacuccaccgagugcagcaaccuccugcugcaguacggcuccuucugcacccagcucaaccgggcccugacggggaucgcgguggagcaggacaagaacacccaggaggucuucgcccaggugaagcagaucuacaagacgcccccgaucaaggacuucggcggcuucaacuucagccagauccugcccgaccccuccaagcccagcaagcgcuccuucaucgaggaccuccuguucaacaaggugacccuggccgacgccggguucaucaagcaguacggcgacugccucggggacaucgccgcgcgggaccugaucugcgcccagaaguucaacggccugaccguccucccgccccugcugaccgacgagaugaucgcccaguacaccagcgcccuccuggccgggaccaucacguccggcuggaccuucggcgcgggggccgcccugcagauccccuucgccaugcagauggcguaccgcuucaacggcaucggggugacccagaacgugcucuacgagaaccagaagcugaucgccaaccaguucaacagcgccaucggcaagauccaggacucccugagcuccaccgccagcgcccucgggaagcugcaggacgucgugaaccagaacgcgcaggcccugaacacgcucgugaagcagcuguccagcaacuucggcgccaucuccagcguccugaacgacauccucucccggcuggacaagguggaggccgaggugcagaucgaccgccugaucaccggccggcuccagagccugcagaccuacgucacccagcagcugauccgcgccgcggagauccgggccagcgccaaccucgccgccaccaagauguccgagugcgugcuggggcagagcaagcgcguggacuucugcggcaagggguaccaccugauguccuucccccagagcgcgccgcacggcgucguguuccuccacgucacguacgugcccgcccaggagaagaacuucaccaccgcccccgccaucugccacgacgggaaggcgcacuucccccgggagggcguguucgucuccaacggcacccacugguucgugacgcagcgcaacuucuacgagccgcagaucaucaccaccgacaacaccuucgugagcgggaacugcgacgucgugaucggcaucgugaacaacacggucuacgacccccugcagcccgagcuggacuccuucaaggaggagcucgacaaguacuucaagaaccacaccagccccgacguggaccugggggacaucuccggcaucaacgccagcguggucaacauccagaaggagaucgaccggcugaacgagguggccaagaaccucaacgagucccugaucgaccugcaggagcucggcaaguacgagcaguacaucaaguggccgugguacaucuggcugggguucaucgccggccugaucgccaucgugauggucaccaucaugcucugcugcaugaccagcugcugcuccugccugaaggggugcugcagcugcggcuccugcugcaaguucgacgaggacgacagcgagcccgugcugaagggggugaagcuccacuacacgugaggacuaguuauaagacugacuagcccgaugggccucccaacgggcccuccuccccuccuugcaccgagauuaauaaaaaaaaaaaaaaaaaaaaaaaaaaaaaaaaaaaaaaaaaaaaaaaaaaaaaaaaaaaaaaaaaaaaaaaaaaaaaaaaaaaaaaaaaaaaaaaaaaaa

SEQ ID NO: 25422 - RNA, 4011 nt, Artificial Sequence
  SARS-CoV-2/Wuhan/WIV05/2019__EPI_ISL_402128 spike protein mRNA gc (1-1273)(E484K_D614G)
aggagaaagcuuaccauguucguguuccugguccuccugccccuggugagcucccagugcgugaaccucaccacccgcacgcagcugccgcccgccuacaccaacagcuucacccggggcgucuacuaccccgacaagguguuccgcuccagcgugcugcacuccacccaggaccucuuccugcccuucuucagcaacgucacgugguuccacgccauccacguguccgggaccaacggcaccaagcgguucgacaacccggugcugcccuucaacgacggggucuacuucgcgagcaccgagaaguccaacaucauccgcggcuggaucuucgggacgacccucgacagcaagacccagucccugcugaucgugaacaacgccaccaacguggucaucaaggugugcgaguuccaguucugcaacgaccccuuccucggcguguacuaccacaagaacaacaagagcuggauggaguccgaguuccgggucuacagcuccgccaacaacugcacguucgaguacgugagccagcccuuccugauggaccuggagggcaagcaggggaacuucaagaaccuccgcgaguucguguucaagaacaucgacggcuacuucaagaucuacuccaagcacaccccgaucaaccugguccgggaccugccccagggguucagcgcccucgagccccugguggaccugcccaucggcaucaacaucacccgcuuccagacccuccuggcccugcaccgguccuaccucacgccgggggacagcagcuccggcuggaccgcgggcgccgccgccuacuacgugggguaccugcagccccgcaccuuccugcucaaguacaacgagaacggcaccaucacggacgcggucgacugcgcccuggacccccugagcgagaccaagugcacccucaaguccuucaccguggagaaggggaucuaccagacgagcaacuuccgggugcagcccaccgaguccaucguccgcuucccgaacaucaccaaccugugccccuucggcgagguguucaacgccacccgguucgccagcgucuacgccuggaaccgcaagcggaucuccaacugcguggcggacuacagcgugcuguacaacuccgccagcuucuccacguucaagugcuacggcgucagccccaccaagcucaacgaccugugcuucaccaacguguacgccgacuccuucgugauccgcggggacgagguccggcagaucgcccccggccagaccgggaagaucgccgacuacaacuacaagcugccggacgacuucacgggcugcgugaucgcguggaacagcaacaaccucgacuccaaggucgggggcaacuacaacuaccuguaccgccuguuccgcaagagcaaccucaagcccuucgagcgggacaucuccaccgagaucuaccaggccggcagcacccccugcaacggggugaagggcuucaacugcuacuucccccugcaguccuacggguuccagccgaccaacggcgugggguaccagcccuaccggguggucgugcugagcuucgagcuccugcacgcccccgccacggugugcggccccaagaaguccaccaaccuggucaagaacaagugcgugaacuucaacuucaacggccucaccgggaccggcgugcugaccgagagcaacaagaaguuccugccguuccagcaguucgggcgcgacaucgccgacacgaccgacgcgguccgcgacccccagacccuggagauccucgacaucacccccugcagcuucggcgggguguccgugaucacgccgggcaccaacaccagcaaccaggucgccgugcuguaccagggcgugaacugcaccgagguccccguggccauccacgccgaccagcugacgcccaccuggcggguguacuccaccgggagcaacgucuuccagacccgcgccggcugccucaucggggcggagcacgugaacaacuccuacgagugcgacauccccaucggcgccggcaucugcgccagcuaccagacgcagaccaacuccccgcggcgcgcccggagcguggcgucccagagcaucaucgccuacaccaugucccugggggccgagaacagcgucgccuacuccaacaacagcaucgccauccccaccaacuucacgaucuccgugaccaccgagauccugcccgugagcaugaccaagacgagcgucgacugcaccauguacaucugcggcgacuccaccgagugcagcaaccuccugcugcaguacggguccuucugcacccagcucaaccgcgcgcugacgggcaucgccguggagcaggacaagaacacccaggagguguucgcccaggucaagcagaucuacaagacgcccccgaucaaggacuucgggggcuucaacuucagccagauccugcccgaccccuccaagcccagcaagcgguccuucaucgaggaccuccuguucaacaaggugacccuggccgacgccggcuucaucaagcaguacggggacugccucggcgacaucgcggcccgcgaccugaucugcgcccagaaguucaacgggcugaccgugcucccgccccugcugaccgacgagaugaucgcccaguacaccagcgcccuccuggcgggcaccaucacguccggguggaccuucggcgccggcgccgcccugcagauccccuucgcgaugcagauggccuaccgguucaacgggaucggcgucacccagaacgugcucuacgagaaccagaagcugaucgccaaccaguucaacagcgccaucgggaagauccaggacucccugagcuccaccgccagcgcgcucggcaagcugcaggacguggucaaccagaacgcccaggcccugaacacgcucgugaagcagcuguccagcaacuucggggccaucuccagcgugcugaacgacauccucucccgccuggacaaggucgaggccgaggugcagaucgaccggcugaucaccggccgccuccagagccugcagaccuacgugacccagcagcugauccgggcggccgagauccgcgccagcgccaaccucgccgcgaccaagauguccgagugcguccugggccagagcaagcggguggacuucugcgggaagggcuaccaccugauguccuucccccagagcgccccgcacgggguggucuuccuccacgugacguacguccccgcccaggagaagaacuucaccaccgcccccgcgaucugccacgacggcaaggcccacuucccccgcgaggggguguucguguccaacggcacccacugguucgucacgcagcggaacuucuacgagccgcagaucaucaccaccgacaacaccuucgugagcggcaacugcgacguggucaucgggaucgugaacaacacgguguacgacccccugcagcccgagcuggacuccuucaaggaggagcucgacaaguacuucaagaaccacaccagccccgacgucgaccugggcgacaucuccgggaucaacgccagcguggugaacauccagaaggagaucgaccgccugaacgaggucgccaagaaccucaacgagucccugaucgaccugcaggagcucggcaaguacgagcaguacaucaaguggccgugguacaucuggcugggcuucaucgccgggcugaucgcgaucgugauggugaccaucaugcucugcugcaugaccagcugcugcuccugccugaagggcugcugcagcugcggguccugcugcaaguucgacgaggacgacagcgagcccguccugaagggcgugaagcuccacuacacgugaggacuaguuauaagacugacuagcccgaugggccucccaacgggcccuccuccccuccuugcaccgagauuaauaaaaaaaaaaaaaaaaaaaaaaaaaaaaaaaaaaaaaaaaaaaaaaaaaaaaaaaaaaaaaaaaaaaaaaaaaaaaaaaaaaaaaaaaaaaaaaaaaaaa

SEQ ID NO: 25423 - RNA, 4011 nt, Artificial Sequence
  SARS-CoV-2/Wuhan/WIV05/2019__EPI_ISL_402128 spike protein mRNA gc (1-1273)(L18F_T20N_P26S_D138Y_R190S_K417T_E484K_N501Y_D614G_H655Y _T1027I)
aggagaaagcuuaccauguucguguuccugguccuccugccccuggugagcucccagugcgugaacuucaccaaccgcacccagcucccgagcgccuacacgaacuccuucacccggggcgucuacuaccccgacaagguguuccgcagcuccgugcugcacagcacccaggaccuguuccuccccuucuucuccaacgucaccugguuccacgccauccacgugagcgggacgaacggcaccaagcgguucgacaaccccgugcugccguucaacgacggggucuacuucgcguccaccgagaaguccaacaucauccgcggcuggaucuucgggaccacgcuggacuccaagacccagagccuccugaucgugaacaacgccaccaacguggucaucaaggugugcgaguuccaguucugcaacuaccccuuccugggcguguacuaccacaagaacaacaaguccuggauggagagcgaguuccgggucuacuccagcgccaacaacugcaccuucgaguacgugucccagcccuuccucauggaccuggagggcaagcaggggaacuucaagaaccugagcgaguucguguucaagaacaucgacggcuacuucaagaucuacuccaagcacacgcccaucaaccucguccgcgaccugccgcagggguucagcgcccuggagccccucguggaccugcccaucggcaucaacaucacccgguuccagacccugcucgcccugcaccgcagcuaccugacccccggggacuccagcuccggcuggacggcgggcgccgccgccuacuacgugggguaccuccagccgcggaccuuccugcugaaguacaacgagaacggcaccaucaccgacgcggucgacugcgcccucgacccccugagcgagacgaagugcacccugaaguccuucaccguggagaaggggaucuaccagaccagcaacuuccgcgugcagcccacggaguccaucguccgguuccccaacaucaccaaccucugcccguucggcgagguguucaacgccacccgcuucgccagcgucuacgccuggaaccggaagcgcaucuccaacugcguggcggacuacagcgugcuguacaacuccgccagcuucuccaccuucaagugcuacggcgucagccccacgaagcugaacgaccucugcuucaccaacguguacgccgacuccuucgugauccgcggggacgagguccggcagaucgcccccggccagaccgggaccaucgccgacuacaacuacaagcugcccgacgacuucacgggcugcgugaucgcguggaacagcaacaaccuggacuccaaggucgggggcaacuacaacuaccucuaccggcuguuccgcaagagcaaccugaagccguucgagcgggacaucuccaccgagaucuaccaggccggcagcacccccugcaacggggugaagggcuucaacugcuacuucccccuccagagcuacggguuccagcccaccuacggcgugggguaccagccguaccgcguggucgugcuguccuucgagcugcuccacgcccccgccacggugugcggccccaagaaguccaccaaccuggucaagaacaagugcgugaacuucaacuucaacggccugaccgggaccggcgugcucaccgagagcaacaagaaguuccugcccuuccagcaguucgggcgggacaucgccgacacgaccgacgcgguccgcgacccgcagacccuggagauccuggacaucacccccugcagcuucggcgggguguccgugaucacgcccggcaccaacaccagcaaccaggucgccgugcucuaccagggcgugaacugcaccgaggucccgguggccauccacgccgaccagcugacgcccaccuggcgcguguacuccaccgggagcaacgucuuccagacccgggccggcugccugaucggggcggaguacgugaacaacuccuacgagugcgacauccccaucggcgccggcaucugcgccagcuaccagacgcagaccaacagcccccgccgggcccgcagcguggcgucccagagcaucaucgccuacaccaugucccucggggccgagaacagcgucgccuacuccaacaacagcaucgccaucccgaccaacuucacgaucagcgugaccaccgagauccugcccguguccaugaccaagacgagcgucgacugcaccauguacaucugcggcgacuccaccgagugcagcaaccugcuccugcaguacggguccuucugcacccagcugaaccgggcgcucacgggcaucgccguggagcaggacaagaacacccaggagguguucgcccaggucaagcagaucuacaagaccccgcccaucaaggacuucgggggcuucaacuucagccagauccugcccgaccccuccaagcccagcaagcgcuccuucaucgaggaccuccuguucaacaaggugacccuggccgacgccggcuucaucaagcaguacggggacugccugggcgacaucgcggcccgggaccucaucugcgcccagaaguucaacgggcugacggugcugcccccgcuccugaccgacgagaugaucgcccaguacaccagcgcccugcucgcgggcaccaucacguccggguggaccuucggcgccggcgccgcccugcagauccccuucgcgaugcagauggccuaccgcuucaacgggaucggcgucacccagaacgugcuguacgagaaccagaagcucaucgccaaccaguucaacagcgccaucgggaagauccaggacucccugagcuccaccgccagcgcgcugggcaagcuccaggacguggucaaccagaacgcccaggcccugaacacgcuggugaagcagcucuccagcaacuucggggccaucuccagcgugcugaacgacauccugagccggcucgacaaggucgaggccgaggugcagaucgaccgccugaucaccggccggcugcagucccuccagaccuacgugacccagcagcugauccgcgcggccgagauccgggccagcgccaaccuggccgcgaucaagauguccgagugcguccucggccagagcaagcgcguggacuucugcgggaagggcuaccaccugauguccuucccccagagcgcgccccacgggguggucuuccugcacgugaccuacgucccggcccaggagaagaacuucacgaccgcccccgccaucugccacgacggcaaggcccacuucccccgggaggggguguucguguccaacggcacccacugguucgucacccagcgcaacuucuacgagccccagaucaucacgaccgacaacaccuucgugagcggcaacugcgacguggucaucgggaucgugaacaacaccguguacgacccgcuccagcccgagcuggacuccuucaaggaggagcuggacaaguacuucaagaaccacacgagccccgacgucgaccucggcgacaucuccgggaucaacgccagcguggugaacauccagaaggagaucgaccggcugaacgaggucgccaagaaccugaacgagucccucaucgaccugcaggagcugggcaaguacgagcaguacaucaaguggcccugguacaucuggcucggcuucaucgccgggcugaucgcgaucgugauggugaccaucaugcugugcugcaugaccagcugcugcuccugccucaagggcugcugcagcugcggguccugcugcaaguucgacgaggacgacagcgagccgguccugaagggcgugaagcugcacuacaccugaggacuaguuauaagacugacuagcccgaugggccucccaacgggcccuccuccccuccuugcaccgagauuaauaaaaaaaaaaaaaaaaaaaaaaaaaaaaaaaaaaaaaaaaaaaaaaaaaaaaaaaaaaaaaaaaaaaaaaaaaaaaaaaaaaaaaaaaaaaaaaaaaaaa

SEQ ID NO: 25424 - RNA, 4011 nt, Artificial Sequence
  SARS-CoV-2/Wuhan/WIV05/2019__EPI_ISL_402128 spike protein mRNA gc (1-1273)(S13I_W152C_L452R_D614G)
aggagaaagcuuaccauguucguguuccugguccuccugccccuggugagcauccagugcgugaaccucaccacccgcacgcagcugccgcccgccuacaccaacuccuucacccggggcgucuacuaccccgacaagguguuccgcagcuccgugcugcacagcacccaggaccucuuccugcccuucuucuccaacgucacgugguuccacgccauccacgugagcgggaccaacggcaccaagcgguucgacaacccggugcugcccuucaacgacggggucuacuucgcguccaccgagaaguccaacaucauccgcggcuggaucuucgggacgacccucgacagcaagacccagagccugcugaucgugaacaacgccaccaacguggucaucaaggugugcgaguuccaguucugcaacgaccccuuccucggcguguacuaccacaagaacaacaaguccugcauggagagcgaguuccgggucuacuccagcgccaacaacugcacguucgaguacgugucccagcccuuccugauggaccuggagggcaagcaggggaacuucaagaaccuccgcgaguucguguucaagaacaucgacggcuacuucaagaucuacagcaagcacaccccgaucaaccugguccgggaccugccccagggguucuccgcccucgagccccugguggaccugcccaucggcaucaacaucacccgcuuccagacccuccuggcccugcaccggagcuaccucacgccgggggacuccagcagcggcuggaccgcgggcgccgccgccuacuacgugggguaccugcagccccgcaccuuccugcucaaguacaacgagaacggcaccaucacggacgcggucgacugcgcccuggacccccuguccgagaccaagugcacccucaagagcuucaccguggagaaggggaucuaccagacguccaacuuccgggugcagcccaccgagagcaucguccgcuucccgaacaucaccaaccugugccccuucggcgagguguucaacgccacccgguucgccuccgucuacgccuggaaccgcaagcggaucagcaacugcguggcggacuacuccgugcuguacaacagcgccuccuucagcacguucaagugcuacggcgucucccccaccaagcucaacgaccugugcuucaccaacguguacgccgacagcuucgugauccgcggggacgagguccggcagaucgcccccggccagaccgggaagaucgccgacuacaacuacaagcugccggacgacuucacgggcugcgugaucgcguggaacuccaacaaccucgacagcaaggucgggggcaacuacaacuaccgcuaccggcuguuccgcaaguccaaccugaagcccuucgagcgggacaucagcaccgagaucuaccaggccggcuccacccccugcaacgggguggagggcuucaacugcuacuucccccuccagagcuacggguuccagccgaccaacggcgugggguaccagcccuaccgcguggucgugcuguccuucgagcugcuccacgcccccgccacggugugcggccccaagaaguccaccaaccuggucaagaacaagugcgugaacuucaacuucaacggccugaccgggaccggcgugcucaccgagagcaacaagaaguuccugccguuccagcaguucgggcgcgacaucgccgacacgaccgacgcgguccgggacccccagacccuggagauccuggacaucacccccugcagcuucggcggggugagcgugaucacgccgggcaccaacaccuccaaccaggucgccgugcucuaccagggcgugaacugcaccgagguccccguggccauccacgccgaccagcugacgcccaccuggcgcguguacagcaccggguccaacgucuuccagacccgggccggcugccugaucggggcggagcacgugaacaacagcuacgagugcgacauccccaucggcgccggcaucugcgccuccuaccagacgcagaccaacagcccgcgccgggcccgcuccguggcgagccaguccaucaucgccuacaccaugagccucggggccgagaacuccgucgccuacagcaacaacuccaucgccauccccaccaacuucacgaucagcgugaccaccgagauccugcccguguccaugaccaagacgagcgucgacugcaccauguacaucugcggcgacagcaccgagugcuccaaccugcuccugcaguacgggagcuucugcacccagcugaaccgggcgcucacgggcaucgccguggagcaggacaagaacacccaggagguguucgcccaggucaagcagaucuacaagacgcccccgaucaaggacuucgggggcuucaacuucucccagauccugcccgaccccagcaagcccuccaagcgcagcuucaucgaggaccuccuguucaacaaggugacccuggccgacgccggcuucaucaagcaguacggggacugccugggcgacaucgcggcccgggaccucaucugcgcccagaaguucaacgggcugaccgugcugccgccccuccugaccgacgagaugaucgcccaguacaccuccgcccugcucgcgggcaccaucacgagcggguggaccuucggcgccggcgccgcccugcagauccccuucgcgaugcagauggccuaccgcuucaacgggaucggcgucacccagaacgugcuguacgagaaccagaagcucaucgccaaccaguucaacuccgccaucgggaagauccaggacagccuguccagcaccgccuccgcgcugggcaagcuccaggacguggucaaccagaacgcccaggcccugaacacgcuggugaagcagcucagcuccaacuucggggccaucagcuccgugcugaacgacauccugagccggcucgacaaggucgaggccgaggugcagaucgaccgccugaucaccggccggcugcagucccuccagaccuacgugacccagcagcugauccgcgcggccgagauccgggccagcgccaaccuggccgcgaccaagaugagcgagugcguccucggccaguccaagcgcguggacuucugcgggaagggcuaccaccugaugagcuucccccaguccgccccgcacgggguggucuuccugcacgugacguacguccccgcccaggagaagaacuucaccaccgcccccgcgaucugccacgacggcaaggcccacuucccccgggaggggguguucgugagcaacggcacccacugguucgucacgcagcgcaacuucuacgagccgcagaucaucaccaccgacaacaccuucguguccggcaacugcgacguggucaucgggaucgugaacaacacgguguacgacccccuccagcccgagcuggacagcuucaaggaggagcuggacaaguacuucaagaaccacaccucccccgacgucgaccucggcgacaucagcgggaucaacgccuccguggugaacauccagaaggagaucgaccggcugaacgaggucgccaagaaccugaacgagagccucaucgaccugcaggagcugggcaaguacgagcaguacaucaaguggccgugguacaucuggcucggcuucaucgccgggcugaucgcgaucgugauggugaccaucaugcugugcugcaugaccuccugcugcagcugccucaagggcugcugcuccugcgggagcugcugcaaguucgacgaggacgacuccgagcccguccugaagggcgugaagcugcacuacacgugaggacuaguuauaagacugacuagcccgaugggccucccaacgggcccuccuccccuccuugcaccgagauuaauaaaaaaaaaaaaaaaaaaaaaaaaaaaaaaaaaaaaaaaaaaaaaaaaaaaaaaaaaaaaaaaaaaaaaaaaaaaaaaaaaaaaaaaaaaaaaaaaaaaa

SEQ ID NO: 25425 - RNA, 4011 nt, Artificial Sequence
  SARS-CoV-2/Wuhan/WIV05/2019__EPI_ISL_402128 spike protein mRNA gc (1-1273)
aggagaaagcuuaccauguucguguuccuggugcugcugccccuggugagcagccagugcgugaaccugaccacccggacccagcugccaccagccuacaccaacagcuucacccggggcgucuacuaccccgacaagguguuccggagcagcguccugcacagcacccaggaccuguuccugcccuucuucagcaacgugaccugguuccacgccauccacgugagcggcaccaacggcaccaagcgguucgacaaccccgugcugcccuucaacgacggcguguacuucgccagcaccgagaagagcaacaucauccggggcuggaucuucggcaccacccuggacagcaagacccagagccugcugaucgugaauaacgccaccaacguggugaucaaggugugcgaguuccaguucugcaacgaccccuuccugggcguguacuaccacaagaacaacaagagcuggauggagagcgaguuccggguguacagcagcgccaacaacugcaccuucgaguacgugagccagcccuuccugauggaccuggagggcaagcagggcaacuucaagaaccugcgggaguucguguucaagaacaucgacggcuacuucaagaucuacagcaagcacaccccaaucaaccuggugcgggaucugccccagggcuucucagcccuggagccccugguggaccugcccaucggcaucaacaucacccgguuccagacccugcuggcccugcaccggagcuaccugaccccaggcgacagcagcagcggguggacagcaggcgcggcugcuuacuacgugggcuaccugcagccccggaccuuccugcugaaguacaacgagaacggcaccaucaccgacgccguggacugcgcccuggacccucugagcgagaccaagugcacccugaagagcuucaccguggagaagggcaucuaccagaccagcaacuuccgggugcagcccaccgagagcaucgugcgguuccccaacaucaccaaccugugccccuucggcgagguguucaacgccacccgguucgccagcguguacgccuggaaccggaagcggaucagcaacugcguggccgacuacagcgugcuguacaacagcgccagcuucagcaccuucaagugcuacggcgugagccccaccaagcugaacgaccugugcuucaccaacguguacgccgacagcuucgugauccguggcgacgaggugcggcagaucgcacccggccagacaggcaagaucgccgacuacaacuacaagcugcccgacgacuucaccggcugcgugaucgccuggaacagcaacaaccucgacagcaaggugggcggcaacuacaacuaccuguaccggcuguuccggaagagcaaccugaagcccuucgagcgggacaucagcaccgagaucuaccaagccggcuccaccccuugcaacggcguggagggcuucaacugcuacuucccucugcagagcuacggcuuccagcccaccaacggcgugggcuaccagcccuaccgggugguggugcugagcuucgagcugcugcacgccccagccaccguguguggccccaagaagagcaccaaccuggugaagaacaagugcgugaacuucaacuucaacggccuuaccggcaccggcgugcugaccgagagcaacaagaaauuccugcccuuucagcaguucggccgggacaucgccgacaccaccgacgcugugcgggauccccagacccuggagauccuggacaucaccccuugcagcuucggcggcgugagcgugaucaccccaggcaccaacaccagcaaccagguggccgugcuguaccaggacgugaacugcaccgaggugcccguggccauccacgccgaccagcugacacccaccuggcgggucuacagcaccggcagcaacguguuccagacccgggccgguugccugaucggcgccgagcacgugaacaacagcuacgagugcgacauccccaucggcgccggcaucugugccagcuaccagacccagaccaauucaccccggagggcaaggagcguggccagccagagcaucaucgccuacaccaugagccugggcgccgagaacagcguggccuacagcaacaacagcaucgccauccccaccaacuucaccaucagcgugaccaccgagauucugcccgugagcaugaccaagaccagcguggacugcaccauguacaucugcggcgacagcaccgagugcagcaaccugcugcugcaguacggcagcuucugcacccagcugaaccgggcccugaccggcaucgccguggagcaggacaagaacacccaggagguguucgcccaggugaagcagaucuacaagaccccucccaucaaggacuucggcggcuucaacuucagccagauccugcccgaccccagcaagcccagcaagcggagcuucaucgaggaccugcuguucaacaaggugacccuagccgacgccggcuucaucaagcaguacggcgacugccucggcgacauagccgcccgggaccugaucugcgcccagaaguucaacggccugaccgugcugccuccccugcugaccgacgagaugaucgcccaguacaccagcgcccuguuagccggaaccaucaccagcggcuggacuuucggcgcuggagccgcucugcagauccccuucgccaugcagauggccuaccgguucaacggcaucggcgugacccagaacgugcuguacgagaaccagaagcugaucgccaaccaguucaacagcgccaucggcaagauccaggacagccugagcagcaccgcuagcgcccugggcaagcugcaggacguggugaaccagaacgcccaggcccugaacacccuggugaagcagcugagcagcaacuucggcgccaucagcagcgugcugaacgacauccugagccggcuggacaaggucgaggccgaggugcagaucgaccggcugaucacuggccggcugcagagccugcagaccuacgugacccagcagcugauccgggccgccgagauucgggccagcgccaaccuggccgccaccaagaugagcgagugcgugcugggccagagcaagcggguggacuucugcggcaagggcuaccaccugaugagcuuuccccagagcgcaccccacggagugguguuccugcacgugaccuacgugcccgcccaggagaagaacuucaccaccgccccagccaucugccacgacggcaaggcccacuuuccccgggagggcguguucgugagcaacggcacccacugguucgugacccagcggaacuucuacgagccccagaucaucaccaccgacaacaccuucgugagcggcaacugcgacguggugaucggcaucgugaacaacaccguguacgauccccugcagcccgagcuggacagcuucaaggaggagcuggacaaguacuucaagaaucacaccagccccgacguggaccugggcgacaucagcggcaucaacgccagcguggugaacauccagaaggagaucgaucggcugaacgagguggccaagaaccugaacgagagccugaucgaccugcaggagcugggcaaguacgagcaguacaucaaguggcccugguacaucuggcugggcuucaucgccggccugaucgccaucgugauggugaccaucaugcugugcugcaugaccagcugcugcagcugccugaagggcuguugcagcugcggcagcugcugcaaguucgacgaggacgacagcgagcccgugcugaagggcgugaagcugcacuacaccugaggacuaguuauaagacugacuagcccgaugggccucccaacgggcccuccuccccuccuugcaccgagauuaauaaaaaaaaaaaaaaaaaaaaaaaaaaaaaaaaaaaaaaaaaaaaaaaaaaaaaaaaaaaaaaaaaaaaaaaaaaaaaaaaaaaaaaaaaaaaaaaaaaaa

SEQ ID NO: 25426 - RNA, 4011 nt, Artificial Sequence
  SARS-CoV-2/Wuhan/WIV05/2019__EPI_ISL_402128 spike protein mRNA gc (1-1273)(D614G)
aggagaaagcuuaccauguucguguuccuggugcugcugccccuggugagcagccagugcgugaaccugaccacccggacccagcugccaccagccuacaccaacagcuucacccggggcgucuacuaccccgacaagguguuccggagcagcguccugcacagcacccaggaccuguuccugcccuucuucagcaacgugaccugguuccacgccauccacgugagcggcaccaacggcaccaagcgguucgacaaccccgugcugcccuucaacgacggcguguacuucgccagcaccgagaagagcaacaucauccggggcuggaucuucggcaccacccuggacagcaagacccagagccugcugaucgugaauaacgccaccaacguggugaucaaggugugcgaguuccaguucugcaacgaccccuuccugggcguguacuaccacaagaacaacaagagcuggauggagagcgaguuccggguguacagcagcgccaacaacugcaccuucgaguacgugagccagcccuuccugauggaccuggagggcaagcagggcaacuucaagaaccugcgggaguucguguucaagaacaucgacggcuacuucaagaucuacagcaagcacaccccaaucaaccuggugcgggaucugccccagggcuucucagcccuggagccccugguggaccugcccaucggcaucaacaucacccgguuccagacccugcuggcccugcaccggagcuaccugaccccaggcgacagcagcagcggguggacagcaggcgcggcugcuuacuacgugggcuaccugcagccccggaccuuccugcugaaguacaacgagaacggcaccaucaccgacgccguggacugcgcccuggacccucugagcgagaccaagugcacccugaagagcuucaccguggagaagggcaucuaccagaccagcaacuuccgggugcagcccaccgagagcaucgugcgguuccccaacaucaccaaccugugccccuucggcgagguguucaacgccacccgguucgccagcguguacgccuggaaccggaagcggaucagcaacugcguggccgacuacagcgugcuguacaacagcgccagcuucagcaccuucaagugcuacggcgugagccccaccaagcugaacgaccugugcuucaccaacguguacgccgacagcuucgugauccguggcgacgaggugcggcagaucgcacccggccagacaggcaagaucgccgacuacaacuacaagcugcccgacgacuucaccggcugcgugaucgccuggaacagcaacaaccucgacagcaaggugggcggcaacuacaacuaccuguaccggcuguuccggaagagcaaccugaagcccuucgagcgggacaucagcaccgagaucuaccaagccggcuccaccccuugcaacggcguggagggcuucaacugcuacuucccucugcagagcuacggcuuccagcccaccaacggcgugggcuaccagcccuaccgggugguggugcugagcuucgagcugcugcacgccccagccaccguguguggccccaagaagagcaccaaccuggugaagaacaagugcgugaacuucaacuucaacggccuuaccggcaccggcgugcugaccgagagcaacaagaaauuccugcccuuucagcaguucggccgggacaucgccgacaccaccgacgcugugcgggauccccagacccuggagauccuggacaucaccccuugcagcuucggcggcgugagcgugaucaccccaggcaccaacaccagcaaccagguggccgugcuguaccagggcgugaacugcaccgaggugcccguggccauccacgccgaccagcugacacccaccuggcgggucuacagcaccggcagcaacguguuccagacccgggccgguugccugaucggcgccgagcacgugaacaacagcuacgagugcgacauccccaucggcgccggcaucugugccagcuaccagacccagaccaauucaccccggagggcaaggagcguggccagccagagcaucaucgccuacaccaugagccugggcgccgagaacagcguggccuacagcaacaacagcaucgccauccccaccaacuucaccaucagcgugaccaccgagauucugcccgugagcaugaccaagaccagcguggacugcaccauguacaucugcggcgacagcaccgagugcagcaaccugcugcugcaguacggcagcuucugcacccagcugaaccgggcccugaccggcaucgccguggagcaggacaagaacacccaggagguguucgcccaggugaagcagaucuacaagaccccucccaucaaggacuucggcggcuucaacuucagccagauccugcccgaccccagcaagcccagcaagcggagcuucaucgaggaccugcuguucaacaaggugacccuagccgacgccggcuucaucaagcaguacggcgacugccucggcgacauagccgcccgggaccugaucugcgcccagaaguucaacggccugaccgugcugccuccccugcugaccgacgagaugaucgcccaguacaccagcgcccuguuagccggaaccaucaccagcggcuggacuuucggcgcuggagccgcucugcagauccccuucgccaugcagauggccuaccgguucaacggcaucggcgugacccagaacgugcuguacgagaaccagaagcugaucgccaaccaguucaacagcgccaucggcaagauccaggacagccugagcagcaccgcuagcgcccugggcaagcugcaggacguggugaaccagaacgcccaggcccugaacacccuggugaagcagcugagcagcaacuucggcgccaucagcagcgugcugaacgacauccugagccggcuggacaaggucgaggccgaggugcagaucgaccggcugaucacuggccggcugcagagccugcagaccuacgugacccagcagcugauccgggccgccgagauucgggccagcgccaaccuggccgccaccaagaugagcgagugcgugcugggccagagcaagcggguggacuucugcggcaagggcuaccaccugaugagcuuuccccagagcgcaccccacggagugguguuccugcacgugaccuacgugcccgcccaggagaagaacuucaccaccgccccagccaucugccacgacggcaaggcccacuuuccccgggagggcguguucgugagcaacggcacccacugguucgugacccagcggaacuucuacgagccccagaucaucaccaccgacaacaccuucgugagcggcaacugcgacguggugaucggcaucgugaacaacaccguguacgauccccugcagcccgagcuggacagcuucaaggaggagcuggacaaguacuucaagaaucacaccagccccgacguggaccugggcgacaucagcggcaucaacgccagcguggugaacauccagaaggagaucgaucggcugaacgagguggccaagaaccugaacgagagccugaucgaccugcaggagcugggcaaguacgagcaguacaucaaguggcccugguacaucuggcugggcuucaucgccggccugaucgccaucgugauggugaccaucaugcugugcugcaugaccagcugcugcagcugccugaagggcuguugcagcugcggcagcugcugcaaguucgacgaggacgacagcgagcccgugcugaagggcgugaagcugcacuacaccugaggacuaguuauaagacugacuagcccgaugggccucccaacgggcccuccuccccuccuugcaccgagauuaauaaaaaaaaaaaaaaaaaaaaaaaaaaaaaaaaaaaaaaaaaaaaaaaaaaaaaaaaaaaaaaaaaaaaaaaaaaaaaaaaaaaaaaaaaaaaaaaaaaaa

SEQ ID NO: 25427 - RNA, 4011 nt, Artificial Sequence
  SARS-CoV-2/Wuhan/WIV05/2019__EPI_ISL_402128 spike protein mRNA gc (1-1273)(A222V_D614G)
aggagaaagcuuaccauguucguguuccuggugcugcugccccuggugagcagccagugcgugaaccugaccacccggacccagcugccaccagccuacaccaacagcuucacccggggcgucuacuaccccgacaagguguuccggagcagcguccugcacagcacccaggaccuguuccugcccuucuucagcaacgugaccugguuccacgccauccacgugagcggcaccaacggcaccaagcgguucgacaaccccgugcugcccuucaacgacggcguguacuucgccagcaccgagaagagcaacaucauccggggcuggaucuucggcaccacccuggacagcaagacccagagccugcugaucgugaauaacgccaccaacguggugaucaaggugugcgaguuccaguucugcaacgaccccuuccugggcguguacuaccacaagaacaacaagagcuggauggagagcgaguuccggguguacagcagcgccaacaacugcaccuucgaguacgugagccagcccuuccugauggaccuggagggcaagcagggcaacuucaagaaccugcgggaguucguguucaagaacaucgacggcuacuucaagaucuacagcaagcacaccccaaucaaccuggugcgggaucugccccagggcuucucagugcuggagccccugguggaccugcccaucggcaucaacaucacccgguuccagacccugcuggcccugcaccggagcuaccugaccccaggcgacagcagcagcggguggacagcaggcgcggcugcuuacuacgugggcuaccugcagccccggaccuuccugcugaaguacaacgagaacggcaccaucaccgacgccguggacugcgcccuggacccucugagcgagaccaagugcacccugaagagcuucaccguggagaagggcaucuaccagaccagcaacuuccgggugcagcccaccgagagcaucgugcgguuccccaacaucaccaaccugugccccuucggcgagguguucaacgccacccgguucgccagcguguacgccuggaaccggaagcggaucagcaacugcguggccgacuacagcgugcuguacaacagcgccagcuucagcaccuucaagugcuacggcgugagccccaccaagcugaacgaccugugcuucaccaacguguacgccgacagcuucgugauccguggcgacgaggugcggcagaucgcacccggccagacaggcaagaucgccgacuacaacuacaagcugcccgacgacuucaccggcugcgugaucgccuggaacagcaacaaccucgacagcaaggugggcggcaacuacaacuaccuguaccggcuguuccggaagagcaaccugaagcccuucgagcgggacaucagcaccgagaucuaccaagccggcuccaccccuugcaacggcguggagggcuucaacugcuacuucccucugcagagcuacggcuuccagcccaccaacggcgugggcuaccagcccuaccgggugguggugcugagcuucgagcugcugcacgccccagccaccguguguggccccaagaagagcaccaaccuggugaagaacaagugcgugaacuucaacuucaacggccuuaccggcaccggcgugcugaccgagagcaacaagaaauuccugcccuuucagcaguucggccgggacaucgccgacaccaccgacgcugugcgggauccccagacccuggagauccuggacaucaccccuugcagcuucggcggcgugagcgugaucaccccaggcaccaacaccagcaaccagguggccgugcuguaccagggcgugaacugcaccgaggugcccguggccauccacgccgaccagcugacacccaccuggcgggucuacagcaccggcagcaacguguuccagacccgggccgguugccugaucggcgccgagcacgugaacaacagcuacgagugcgacauccccaucggcgccggcaucugugccagcuaccagacccagaccaauucaccccggagggcaaggagcguggccagccagagcaucaucgccuacaccaugagccugggcgccgagaacagcguggccuacagcaacaacagcaucgccauccccaccaacuucaccaucagcgugaccaccgagauucugcccgugagcaugaccaagaccagcguggacugcaccauguacaucugcggcgacagcaccgagugcagcaaccugcugcugcaguacggcagcuucugcacccagcugaaccgggcccugaccggcaucgccguggagcaggacaagaacacccaggagguguucgcccaggugaagcagaucuacaagaccccucccaucaaggacuucggcggcuucaacuucagccagauccugcccgaccccagcaagcccagcaagcggagcuucaucgaggaccugcuguucaacaaggugacccuagccgacgccggcuucaucaagcaguacggcgacugccucggcgacauagccgcccgggaccugaucugcgcccagaaguucaacggccugaccgugcugccuccccugcugaccgacgagaugaucgcccaguacaccagcgcccuguuagccggaaccaucaccagcggcuggacuuucggcgcuggagccgcucugcagauccccuucgccaugcagauggccuaccgguucaacggcaucggcgugacccagaacgugcuguacgagaaccagaagcugaucgccaaccaguucaacagcgccaucggcaagauccaggacagccugagcagcaccgcuagcgcccugggcaagcugcaggacguggugaaccagaacgcccaggcccugaacacccuggugaagcagcugagcagcaacuucggcgccaucagcagcgugcugaacgacauccugagccggcuggacaaggucgaggccgaggugcagaucgaccggcugaucacuggccggcugcagagccugcagaccuacgugacccagcagcugauccgggccgccgagauucgggccagcgccaaccuggccgccaccaagaugagcgagugcgugcugggccagagcaagcggguggacuucugcggcaagggcuaccaccugaugagcuuuccccagagcgcaccccacggagugguguuccugcacgugaccuacgugcccgcccaggagaagaacuucaccaccgccccagccaucugccacgacggcaaggcccacuuuccccgggagggcguguucgugagcaacggcacccacugguucgugacccagcggaacuucuacgagccccagaucaucaccaccgacaacaccuucgugagcggcaacugcgacguggugaucggcaucgugaacaacaccguguacgauccccugcagcccgagcuggacagcuucaaggaggagcuggacaaguacuucaagaaucacaccagccccgacguggaccugggcgacaucagcggcaucaacgccagcguggugaacauccagaaggagaucgaucggcugaacgagguggccaagaaccugaacgagagccugaucgaccugcaggagcugggcaaguacgagcaguacaucaaguggcccugguacaucuggcugggcuucaucgccggccugaucgccaucgugauggugaccaucaugcugugcugcaugaccagcugcugcagcugccugaagggcuguugcagcugcggcagcugcugcaaguucgacgaggacgacagcgagcccgugcugaagggcgugaagcugcacuacaccugaggacuaguuauaagacugacuagcccgaugggccucccaacgggcccuccuccccuccuugcaccgagauuaauaaaaaaaaaaaaaaaaaaaaaaaaaaaaaaaaaaaaaaaaaaaaaaaaaaaaaaaaaaaaaaaaaaaaaaaaaaaaaaaaaaaaaaaaaaaaaaaaaaaa

SEQ ID NO: 25428 - RNA, 4011 nt, Artificial Sequence
  SARS-CoV-2/Wuhan/WIV05/2019__EPI_ISL_402128 spike protein mRNA gc (1-1273)(N439K_D614G)
aggagaaagcuuaccauguucguguuccuggugcugcugccccuggugagcagccagugcgugaaccugaccacccggacccagcugccaccagccuacaccaacagcuucacccggggcgucuacuaccccgacaagguguuccggagcagcguccugcacagcacccaggaccuguuccugcccuucuucagcaacgugaccugguuccacgccauccacgugagcggcaccaacggcaccaagcgguucgacaaccccgugcugcccuucaacgacggcguguacuucgccagcaccgagaagagcaacaucauccggggcuggaucuucggcaccacccuggacagcaagacccagagccugcugaucgugaauaacgccaccaacguggugaucaaggugugcgaguuccaguucugcaacgaccccuuccugggcguguacuaccacaagaacaacaagagcuggauggagagcgaguuccggguguacagcagcgccaacaacugcaccuucgaguacgugagccagcccuuccugauggaccuggagggcaagcagggcaacuucaagaaccugcgggaguucguguucaagaacaucgacggcuacuucaagaucuacagcaagcacaccccaaucaaccuggugcgggaucugccccagggcuucucagcccuggagccccugguggaccugcccaucggcaucaacaucacccgguuccagacccugcuggcccugcaccggagcuaccugaccccaggcgacagcagcagcggguggacagcaggcgcggcugcuuacuacgugggcuaccugcagccccggaccuuccugcugaaguacaacgagaacggcaccaucaccgacgccguggacugcgcccuggacccucugagcgagaccaagugcacccugaagagcuucaccguggagaagggcaucuaccagaccagcaacuuccgggugcagcccaccgagagcaucgugcgguuccccaacaucaccaaccugugccccuucggcgagguguucaacgccacccgguucgccagcguguacgccuggaaccggaagcggaucagcaacugcguggccgacuacagcgugcuguacaacagcgccagcuucagcaccuucaagugcuacggcgugagccccaccaagcugaacgaccugugcuucaccaacguguacgccgacagcuucgugauccguggcgacgaggugcggcagaucgcacccggccagacaggcaagaucgccgacuacaacuacaagcugcccgacgacuucaccggcugcgugaucgccuggaacagcaagaaccucgacagcaaggugggcggcaacuacaacuaccuguaccggcuguuccggaagagcaaccugaagcccuucgagcgggacaucagcaccgagaucuaccaagccggcuccaccccuugcaacggcguggagggcuucaacugcuacuucccucugcagagcuacggcuuccagcccaccaacggcgugggcuaccagcccuaccgggugguggugcugagcuucgagcugcugcacgccccagccaccguguguggccccaagaagagcaccaaccuggugaagaacaagugcgugaacuucaacuucaacggccuuaccggcaccggcgugcugaccgagagcaacaagaaauuccugcccuuucagcaguucggccgggacaucgccgacaccaccgacgcugugcgggauccccagacccuggagauccuggacaucaccccuugcagcuucggcggcgugagcgugaucaccccaggcaccaacaccagcaaccagguggccgugcuguaccagggcgugaacugcaccgaggugcccguggccauccacgccgaccagcugacacccaccuggcgggucuacagcaccggcagcaacguguuccagacccgggccgguugccugaucggcgccgagcacgugaacaacagcuacgagugcgacauccccaucggcgccggcaucugugccagcuaccagacccagaccaauucaccccggagggcaaggagcguggccagccagagcaucaucgccuacaccaugagccugggcgccgagaacagcguggccuacagcaacaacagcaucgccauccccaccaacuucaccaucagcgugaccaccgagauucugcccgugagcaugaccaagaccagcguggacugcaccauguacaucugcggcgacagcaccgagugcagcaaccugcugcugcaguacggcagcuucugcacccagcugaaccgggcccugaccggcaucgccguggagcaggacaagaacacccaggagguguucgcccaggugaagcagaucuacaagaccccucccaucaaggacuucggcggcuucaacuucagccagauccugcccgaccccagcaagcccagcaagcggagcuucaucgaggaccugcuguucaacaaggugacccuagccgacgccggcuucaucaagcaguacggcgacugccucggcgacauagccgcccgggaccugaucugcgcccagaaguucaacggccugaccgugcugccuccccugcugaccgacgagaugaucgcccaguacaccagcgcccuguuagccggaaccaucaccagcggcuggacuuucggcgcuggagccgcucugcagauccccuucgccaugcagauggccuaccgguucaacggcaucggcgugacccagaacgugcuguacgagaaccagaagcugaucgccaaccaguucaacagcgccaucggcaagauccaggacagccugagcagcaccgcuagcgcccugggcaagcugcaggacguggugaaccagaacgcccaggcccugaacacccuggugaagcagcugagcagcaacuucggcgccaucagcagcgugcugaacgacauccugagccggcuggacaaggucgaggccgaggugcagaucgaccggcugaucacuggccggcugcagagccugcagaccuacgugacccagcagcugauccgggccgccgagauucgggccagcgccaaccuggccgccaccaagaugagcgagugcgugcugggccagagcaagcggguggacuucugcggcaagggcuaccaccugaugagcuuuccccagagcgcaccccacggagugguguuccugcacgugaccuacgugcccgcccaggagaagaacuucaccaccgccccagccaucugccacgacggcaaggcccacuuuccccgggagggcguguucgugagcaacggcacccacugguucgugacccagcggaacuucuacgagccccagaucaucaccaccgacaacaccuucgugagcggcaacugcgacguggugaucggcaucgugaacaacaccguguacgauccccugcagcccgagcuggacagcuucaaggaggagcuggacaaguacuucaagaaucacaccagccccgacguggaccugggcgacaucagcggcaucaacgccagcguggugaacauccagaaggagaucgaucggcugaacgagguggccaagaaccugaacgagagccugaucgaccugcaggagcugggcaaguacgagcaguacaucaaguggcccugguacaucuggcugggcuucaucgccggccugaucgccaucgugauggugaccaucaugcugugcugcaugaccagcugcugcagcugccugaagggcuguugcagcugcggcagcugcugcaaguucgacgaggacgacagcgagcccgugcugaagggcgugaagcugcacuacaccugaggacuaguuauaagacugacuagcccgaugggccucccaacgggcccuccuccccuccuugcaccgagauuaauaaaaaaaaaaaaaaaaaaaaaaaaaaaaaaaaaaaaaaaaaaaaaaaaaaaaaaaaaaaaaaaaaaaaaaaaaaaaaaaaaaaaaaaaaaaaaaaaaaaa

SEQ ID NO: 25429 - RNA, 4011 nt, Artificial Sequence
  SARS-CoV-2/Wuhan/WIV05/2019__EPI_ISL_402128 spike protein mRNA gc (1-1273)(S477N_D614G)
aggagaaagcuuaccauguucguguuccuggugcugcugccccuggugagcagccagugcgugaaccugaccacccggacccagcugccaccagccuacaccaacagcuucacccggggcgucuacuaccccgacaagguguuccggagcagcguccugcacagcacccaggaccuguuccugcccuucuucagcaacgugaccugguuccacgccauccacgugagcggcaccaacggcaccaagcgguucgacaaccccgugcugcccuucaacgacggcguguacuucgccagcaccgagaagagcaacaucauccggggcuggaucuucggcaccacccuggacagcaagacccagagccugcugaucgugaauaacgccaccaacguggugaucaaggugugcgaguuccaguucugcaacgaccccuuccugggcguguacuaccacaagaacaacaagagcuggauggagagcgaguuccggguguacagcagcgccaacaacugcaccuucgaguacgugagccagcccuuccugauggaccuggagggcaagcagggcaacuucaagaaccugcgggaguucguguucaagaacaucgacggcuacuucaagaucuacagcaagcacaccccaaucaaccuggugcgggaucugccccagggcuucucagcccuggagccccugguggaccugcccaucggcaucaacaucacccgguuccagacccugcuggcccugcaccggagcuaccugaccccaggcgacagcagcagcggguggacagcaggcgcggcugcuuacuacgugggcuaccugcagccccggaccuuccugcugaaguacaacgagaacggcaccaucaccgacgccguggacugcgcccuggacccucugagcgagaccaagugcacccugaagagcuucaccguggagaagggcaucuaccagaccagcaacuuccgggugcagcccaccgagagcaucgugcgguuccccaacaucaccaaccugugccccuucggcgagguguucaacgccacccgguucgccagcguguacgccuggaaccggaagcggaucagcaacugcguggccgacuacagcgugcuguacaacagcgccagcuucagcaccuucaagugcuacggcgugagccccaccaagcugaacgaccugugcuucaccaacguguacgccgacagcuucgugauccguggcgacgaggugcggcagaucgcacccggccagacaggcaagaucgccgacuacaacuacaagcugcccgacgacuucaccggcugcgugaucgccuggaacagcaacaaccucgacagcaaggugggcggcaacuacaacuaccuguaccggcuguuccggaagagcaaccugaagcccuucgagcgggacaucagcaccgagaucuaccaagccggcaacaccccuugcaacggcguggagggcuucaacugcuacuucccucugcagagcuacggcuuccagcccaccaacggcgugggcuaccagcccuaccgggugguggugcugagcuucgagcugcugcacgccccagccaccguguguggccccaagaagagcaccaaccuggugaagaacaagugcgugaacuucaacuucaacggccuuaccggcaccggcgugcugaccgagagcaacaagaaauuccugcccuuucagcaguucggccgggacaucgccgacaccaccgacgcugugcgggauccccagacccuggagauccuggacaucaccccuugcagcuucggcggcgugagcgugaucaccccaggcaccaacaccagcaaccagguggccgugcuguaccagggcgugaacugcaccgaggugcccguggccauccacgccgaccagcugacacccaccuggcgggucuacagcaccggcagcaacguguuccagacccgggccgguugccugaucggcgccgagcacgugaacaacagcuacgagugcgacauccccaucggcgccggcaucugugccagcuaccagacccagaccaauucaccccggagggcaaggagcguggccagccagagcaucaucgccuacaccaugagccugggcgccgagaacagcguggccuacagcaacaacagcaucgccauccccaccaacuucaccaucagcgugaccaccgagauucugcccgugagcaugaccaagaccagcguggacugcaccauguacaucugcggcgacagcaccgagugcagcaaccugcugcugcaguacggcagcuucugcacccagcugaaccgggcccugaccggcaucgccguggagcaggacaagaacacccaggagguguucgcccaggugaagcagaucuacaagaccccucccaucaaggacuucggcggcuucaacuucagccagauccugcccgaccccagcaagcccagcaagcggagcuucaucgaggaccugcuguucaacaaggugacccuagccgacgccggcuucaucaagcaguacggcgacugccucggcgacauagccgcccgggaccugaucugcgcccagaaguucaacggccugaccgugcugccuccccugcugaccgacgagaugaucgcccaguacaccagcgcccuguuagccggaaccaucaccagcggcuggacuuucggcgcuggagccgcucugcagauccccuucgccaugcagauggccuaccgguucaacggcaucggcgugacccagaacgugcuguacgagaaccagaagcugaucgccaaccaguucaacagcgccaucggcaagauccaggacagccugagcagcaccgcuagcgcccugggcaagcugcaggacguggugaaccagaacgcccaggcccugaacacccuggugaagcagcugagcagcaacuucggcgccaucagcagcgugcugaacgacauccugagccggcuggacaaggucgaggccgaggugcagaucgaccggcugaucacuggccggcugcagagccugcagaccuacgugacccagcagcugauccgggccgccgagauucgggccagcgccaaccuggccgccaccaagaugagcgagugcgugcugggccagagcaagcggguggacuucugcggcaagggcuaccaccugaugagcuuuccccagagcgcaccccacggagugguguuccugcacgugaccuacgugcccgcccaggagaagaacuucaccaccgccccagccaucugccacgacggcaaggcccacuuuccccgggagggcguguucgugagcaacggcacccacugguucgugacccagcggaacuucuacgagccccagaucaucaccaccgacaacaccuucgugagcggcaacugcgacguggugaucggcaucgugaacaacaccguguacgauccccugcagcccgagcuggacagcuucaaggaggagcuggacaaguacuucaagaaucacaccagccccgacguggaccugggcgacaucagcggcaucaacgccagcguggugaacauccagaaggagaucgaucggcugaacgagguggccaagaaccugaacgagagccugaucgaccugcaggagcugggcaaguacgagcaguacaucaaguggcccugguacaucuggcugggcuucaucgccggccugaucgccaucgugauggugaccaucaugcugugcugcaugaccagcugcugcagcugccugaagggcuguugcagcugcggcagcugcugcaaguucgacgaggacgacagcgagcccgugcugaagggcgugaagcugcacuacaccugaggacuaguuauaagacugacuagcccgaugggccucccaacgggcccuccuccccuccuugcaccgagauuaauaaaaaaaaaaaaaaaaaaaaaaaaaaaaaaaaaaaaaaaaaaaaaaaaaaaaaaaaaaaaaaaaaaaaaaaaaaaaaaaaaaaaaaaaaaaaaaaaaaaa

SEQ ID NO: 25430 - RNA, 4011 nt, Artificial Sequence
  SARS-CoV-2/Wuhan/WIV05/2019__EPI_ISL_402128 spike protein mRNA gc (1-1273)(N501Y_D614G)
aggagaaagcuuaccauguucguguuccuggugcugcugccccuggugagcagccagugcgugaaccugaccacccggacccagcugccaccagccuacaccaacagcuucacccggggcgucuacuaccccgacaagguguuccggagcagcguccugcacagcacccaggaccuguuccugcccuucuucagcaacgugaccugguuccacgccauccacgugagcggcaccaacggcaccaagcgguucgacaaccccgugcugcccuucaacgacggcguguacuucgccagcaccgagaagagcaacaucauccggggcuggaucuucggcaccacccuggacagcaagacccagagccugcugaucgugaauaacgccaccaacguggugaucaaggugugcgaguuccaguucugcaacgaccccuuccugggcguguacuaccacaagaacaacaagagcuggauggagagcgaguuccggguguacagcagcgccaacaacugcaccuucgaguacgugagccagcccuuccugauggaccuggagggcaagcagggcaacuucaagaaccugcgggaguucguguucaagaacaucgacggcuacuucaagaucuacagcaagcacaccccaaucaaccuggugcgggaucugccccagggcuucucagcccuggagccccugguggaccugcccaucggcaucaacaucacccgguuccagacccugcuggcccugcaccggagcuaccugaccccaggcgacagcagcagcggguggacagcaggcgcggcugcuuacuacgugggcuaccugcagccccggaccuuccugcugaaguacaacgagaacggcaccaucaccgacgccguggacugcgcccuggacccucugagcgagaccaagugcacccugaagagcuucaccguggagaagggcaucuaccagaccagcaacuuccgggugcagcccaccgagagcaucgugcgguuccccaacaucaccaaccugugccccuucggcgagguguucaacgccacccgguucgccagcguguacgccuggaaccggaagcggaucagcaacugcguggccgacuacagcgugcuguacaacagcgccagcuucagcaccuucaagugcuacggcgugagccccaccaagcugaacgaccugugcuucaccaacguguacgccgacagcuucgugauccguggcgacgaggugcggcagaucgcacccggccagacaggcaagaucgccgacuacaacuacaagcugcccgacgacuucaccggcugcgugaucgccuggaacagcaacaaccucgacagcaaggugggcggcaacuacaacuaccuguaccggcuguuccggaagagcaaccugaagcccuucgagcgggacaucagcaccgagaucuaccaagccggcuccaccccuugcaacggcguggagggcuucaacugcuacuucccucugcagagcuacggcuuccagcccaccuacggcgugggcuaccagcccuaccgggugguggugcugagcuucgagcugcugcacgccccagccaccguguguggccccaagaagagcaccaaccuggugaagaacaagugcgugaacuucaacuucaacggccuuaccggcaccggcgugcugaccgagagcaacaagaaauuccugcccuuucagcaguucggccgggacaucgccgacaccaccgacgcugugcgggauccccagacccuggagauccuggacaucaccccuugcagcuucggcggcgugagcgugaucaccccaggcaccaacaccagcaaccagguggccgugcuguaccagggcgugaacugcaccgaggugcccguggccauccacgccgaccagcugacacccaccuggcgggucuacagcaccggcagcaacguguuccagacccgggccgguugccugaucggcgccgagcacgugaacaacagcuacgagugcgacauccccaucggcgccggcaucugugccagcuaccagacccagaccaauucaccccggagggcaaggagcguggccagccagagcaucaucgccuacaccaugagccugggcgccgagaacagcguggccuacagcaacaacagcaucgccauccccaccaacuucaccaucagcgugaccaccgagauucugcccgugagcaugaccaagaccagcguggacugcaccauguacaucugcggcgacagcaccgagugcagcaaccugcugcugcaguacggcagcuucugcacccagcugaaccgggcccugaccggcaucgccguggagcaggacaagaacacccaggagguguucgcccaggugaagcagaucuacaagaccccucccaucaaggacuucggcggcuucaacuucagccagauccugcccgaccccagcaagcccagcaagcggagcuucaucgaggaccugcuguucaacaaggugacccuagccgacgccggcuucaucaagcaguacggcgacugccucggcgacauagccgcccgggaccugaucugcgcccagaaguucaacggccugaccgugcugccuccccugcugaccgacgagaugaucgcccaguacaccagcgcccuguuagccggaaccaucaccagcggcuggacuuucggcgcuggagccgcucugcagauccccuucgccaugcagauggccuaccgguucaacggcaucggcgugacccagaacgugcuguacgagaaccagaagcugaucgccaaccaguucaacagcgccaucggcaagauccaggacagccugagcagcaccgcuagcgcccugggcaagcugcaggacguggugaaccagaacgcccaggcccugaacacccuggugaagcagcugagcagcaacuucggcgccaucagcagcgugcugaacgacauccugagccggcuggacaaggucgaggccgaggugcagaucgaccggcugaucacuggccggcugcagagccugcagaccuacgugacccagcagcugauccgggccgccgagauucgggccagcgccaaccuggccgccaccaagaugagcgagugcgugcugggccagagcaagcggguggacuucugcggcaagggcuaccaccugaugagcuuuccccagagcgcaccccacggagugguguuccugcacgugaccuacgugcccgcccaggagaagaacuucaccaccgccccagccaucugccacgacggcaaggcccacuuuccccgggagggcguguucgugagcaacggcacccacugguucgugacccagcggaacuucuacgagccccagaucaucaccaccgacaacaccuucgugagcggcaacugcgacguggugaucggcaucgugaacaacaccguguacgauccccugcagcccgagcuggacagcuucaaggaggagcuggacaaguacuucaagaaucacaccagccccgacguggaccugggcgacaucagcggcaucaacgccagcguggugaacauccagaaggagaucgaucggcugaacgagguggccaagaaccugaacgagagccugaucgaccugcaggagcugggcaaguacgagcaguacaucaaguggcccugguacaucuggcugggcuucaucgccggccugaucgccaucgugauggugaccaucaugcugugcugcaugaccagcugcugcagcugccugaagggcuguugcagcugcggcagcugcugcaaguucgacgaggacgacagcgagcccgugcugaagggcgugaagcugcacuacaccugaggacuaguuauaagacugacuagcccgaugggccucccaacgggcccuccuccccuccuugcaccgagauuaauaaaaaaaaaaaaaaaaaaaaaaaaaaaaaaaaaaaaaaaaaaaaaaaaaaaaaaaaaaaaaaaaaaaaaaaaaaaaaaaaaaaaaaaaaaaaaaaaaaaa

SEQ ID NO: 25431 - RNA, 4005 nt, Artificial Sequence
  SARS-CoV-2/Wuhan/WIV05/2019__EPI_ISL_402128 spike protein mRNA gc (1-1273)(H69del_V70del_D614G)
aggagaaagcuuaccauguucguguuccuggugcugcugccccuggugagcagccagugcgugaaccugaccacccggacccagcugccaccagccuacaccaacagcuucacccggggcgucuacuaccccgacaagguguuccggagcagcguccugcacagcacccaggaccuguuccugcccuucuucagcaacgugaccugguuccacgccaucagcggcaccaacggcaccaagcgguucgacaaccccgugcugcccuucaacgacggcguguacuucgccagcaccgagaagagcaacaucauccggggcuggaucuucggcaccacccuggacagcaagacccagagccugcugaucgugaauaacgccaccaacguggugaucaaggugugcgaguuccaguucugcaacgaccccuuccugggcguguacuaccacaagaacaacaagagcuggauggagagcgaguuccggguguacagcagcgccaacaacugcaccuucgaguacgugagccagcccuuccugauggaccuggagggcaagcagggcaacuucaagaaccugcgggaguucguguucaagaacaucgacggcuacuucaagaucuacagcaagcacaccccaaucaaccuggugcgggaucugccccagggcuucucagcccuggagccccugguggaccugcccaucggcaucaacaucacccgguuccagacccugcuggcccugcaccggagcuaccugaccccaggcgacagcagcagcggguggacagcaggcgcggcugcuuacuacgugggcuaccugcagccccggaccuuccugcugaaguacaacgagaacggcaccaucaccgacgccguggacugcgcccuggacccucugagcgagaccaagugcacccugaagagcuucaccguggagaagggcaucuaccagaccagcaacuuccgggugcagcccaccgagagcaucgugcgguuccccaacaucaccaaccugugccccuucggcgagguguucaacgccacccgguucgccagcguguacgccuggaaccggaagcggaucagcaacugcguggccgacuacagcgugcuguacaacagcgccagcuucagcaccuucaagugcuacggcgugagccccaccaagcugaacgaccugugcuucaccaacguguacgccgacagcuucgugauccguggcgacgaggugcggcagaucgcacccggccagacaggcaagaucgccgacuacaacuacaagcugcccgacgacuucaccggcugcgugaucgccuggaacagcaacaaccucgacagcaaggugggcggcaacuacaacuaccuguaccggcuguuccggaagagcaaccugaagcccuucgagcgggacaucagcaccgagaucuaccaagccggcuccaccccuugcaacggcguggagggcuucaacugcuacuucccucugcagagcuacggcuuccagcccaccaacggcgugggcuaccagcccuaccgggugguggugcugagcuucgagcugcugcacgccccagccaccguguguggccccaagaagagcaccaaccuggugaagaacaagugcgugaacuucaacuucaacggccuuaccggcaccggcgugcugaccgagagcaacaagaaauuccugcccuuucagcaguucggccgggacaucgccgacaccaccgacgcugugcgggauccccagacccuggagauccuggacaucaccccuugcagcuucggcggcgugagcgugaucaccccaggcaccaacaccagcaaccagguggccgugcuguaccagggcgugaacugcaccgaggugcccguggccauccacgccgaccagcugacacccaccuggcgggucuacagcaccggcagcaacguguuccagacccgggccgguugccugaucggcgccgagcacgugaacaacagcuacgagugcgacauccccaucggcgccggcaucugugccagcuaccagacccagaccaauucaccccggagggcaaggagcguggccagccagagcaucaucgccuacaccaugagccugggcgccgagaacagcguggccuacagcaacaacagcaucgccauccccaccaacuucaccaucagcgugaccaccgagauucugcccgugagcaugaccaagaccagcguggacugcaccauguacaucugcggcgacagcaccgagugcagcaaccugcugcugcaguacggcagcuucugcacccagcugaaccgggcccugaccggcaucgccguggagcaggacaagaacacccaggagguguucgcccaggugaagcagaucuacaagaccccucccaucaaggacuucggcggcuucaacuucagccagauccugcccgaccccagcaagcccagcaagcggagcuucaucgaggaccugcuguucaacaaggugacccuagccgacgccggcuucaucaagcaguacggcgacugccucggcgacauagccgcccgggaccugaucugcgcccagaaguucaacggccugaccgugcugccuccccugcugaccgacgagaugaucgcccaguacaccagcgcccuguuagccggaaccaucaccagcggcuggacuuucggcgcuggagccgcucugcagauccccuucgccaugcagauggccuaccgguucaacggcaucggcgugacccagaacgugcuguacgagaaccagaagcugaucgccaaccaguucaacagcgccaucggcaagauccaggacagccugagcagcaccgcuagcgcccugggcaagcugcaggacguggugaaccagaacgcccaggcccugaacacccuggugaagcagcugagcagcaacuucggcgccaucagcagcgugcugaacgacauccugagccggcuggacaaggucgaggccgaggugcagaucgaccggcugaucacuggccggcugcagagccugcagaccuacgugacccagcagcugauccgggccgccgagauucgggccagcgccaaccuggccgccaccaagaugagcgagugcgugcugggccagagcaagcggguggacuucugcggcaagggcuaccaccugaugagcuuuccccagagcgcaccccacggagugguguuccugcacgugaccuacgugcccgcccaggagaagaacuucaccaccgccccagccaucugccacgacggcaaggcccacuuuccccgggagggcguguucgugagcaacggcacccacugguucgugacccagcggaacuucuacgagccccagaucaucaccaccgacaacaccuucgugagcggcaacugcgacguggugaucggcaucgugaacaacaccguguacgauccccugcagcccgagcuggacagcuucaaggaggagcuggacaaguacuucaagaaucacaccagccccgacguggaccugggcgacaucagcggcaucaacgccagcguggugaacauccagaaggagaucgaucggcugaacgagguggccaagaaccugaacgagagccugaucgaccugcaggagcugggcaaguacgagcaguacaucaaguggcccugguacaucuggcugggcuucaucgccggccugaucgccaucgugauggugaccaucaugcugugcugcaugaccagcugcugcagcugccugaagggcuguugcagcugcggcagcugcugcaaguucgacgaggacgacagcgagcccgugcugaagggcgugaagcugcacuacaccugaggacuaguuauaagacugacuagcccgaugggccucccaacgggcccuccuccccuccuugcaccgagauuaauaaaaaaaaaaaaaaaaaaaaaaaaaaaaaaaaaaaaaaaaaaaaaaaaaaaaaaaaaaaaaaaaaaaaaaaaaaaaaaaaaaaaaaaaaaaaaaaaaaaa

SEQ ID NO: 25432 - RNA, 4011 nt, Artificial Sequence
  SARS-CoV-2/Wuhan/WIV05/2019__EPI_ISL_402128 spike protein mRNA gc (1-1273)(Y453F_D614G)
aggagaaagcuuaccauguucguguuccuggugcugcugccccuggugagcagccagugcgugaaccugaccacccggacccagcugccaccagccuacaccaacagcuucacccggggcgucuacuaccccgacaagguguuccggagcagcguccugcacagcacccaggaccuguuccugcccuucuucagcaacgugaccugguuccacgccauccacgugagcggcaccaacggcaccaagcgguucgacaaccccgugcugcccuucaacgacggcguguacuucgccagcaccgagaagagcaacaucauccggggcuggaucuucggcaccacccuggacagcaagacccagagccugcugaucgugaauaacgccaccaacguggugaucaaggugugcgaguuccaguucugcaacgaccccuuccugggcguguacuaccacaagaacaacaagagcuggauggagagcgaguuccggguguacagcagcgccaacaacugcaccuucgaguacgugagccagcccuuccugauggaccuggagggcaagcagggcaacuucaagaaccugcgggaguucguguucaagaacaucgacggcuacuucaagaucuacagcaagcacaccccaaucaaccuggugcgggaucugccccagggcuucucagcccuggagccccugguggaccugcccaucggcaucaacaucacccgguuccagacccugcuggcccugcaccggagcuaccugaccccaggcgacagcagcagcggguggacagcaggcgcggcugcuuacuacgugggcuaccugcagccccggaccuuccugcugaaguacaacgagaacggcaccaucaccgacgccguggacugcgcccuggacccucugagcgagaccaagugcacccugaagagcuucaccguggagaagggcaucuaccagaccagcaacuuccgggugcagcccaccgagagcaucgugcgguuccccaacaucaccaaccugugccccuucggcgagguguucaacgccacccgguucgccagcguguacgccuggaaccggaagcggaucagcaacugcguggccgacuacagcgugcuguacaacagcgccagcuucagcaccuucaagugcuacggcgugagccccaccaagcugaacgaccugugcuucaccaacguguacgccgacagcuucgugauccguggcgacgaggugcggcagaucgcacccggccagacaggcaagaucgccgacuacaacuacaagcugcccgacgacuucaccggcugcgugaucgccuggaacagcaacaaccucgacagcaaggugggcggcaacuacaacuaccuguuccggcuguuccggaagagcaaccugaagcccuucgagcgggacaucagcaccgagaucuaccaagccggcuccaccccuugcaacggcguggagggcuucaacugcuacuucccucugcagagcuacggcuuccagcccaccaacggcgugggcuaccagcccuaccgggugguggugcugagcuucgagcugcugcacgccccagccaccguguguggccccaagaagagcaccaaccuggugaagaacaagugcgugaacuucaacuucaacggccuuaccggcaccggcgugcugaccgagagcaacaagaaauuccugcccuuucagcaguucggccgggacaucgccgacaccaccgacgcugugcgggauccccagacccuggagauccuggacaucaccccuugcagcuucggcggcgugagcgugaucaccccaggcaccaacaccagcaaccagguggccgugcuguaccagggcgugaacugcaccgaggugcccguggccauccacgccgaccagcugacacccaccuggcgggucuacagcaccggcagcaacguguuccagacccgggccgguugccugaucggcgccgagcacgugaacaacagcuacgagugcgacauccccaucggcgccggcaucugugccagcuaccagacccagaccaauucaccccggagggcaaggagcguggccagccagagcaucaucgccuacaccaugagccugggcgccgagaacagcguggccuacagcaacaacagcaucgccauccccaccaacuucaccaucagcgugaccaccgagauucugcccgugagcaugaccaagaccagcguggacugcaccauguacaucugcggcgacagcaccgagugcagcaaccugcugcugcaguacggcagcuucugcacccagcugaaccgggcccugaccggcaucgccguggagcaggacaagaacacccaggagguguucgcccaggugaagcagaucuacaagaccccucccaucaaggacuucggcggcuucaacuucagccagauccugcccgaccccagcaagcccagcaagcggagcuucaucgaggaccugcuguucaacaaggugacccuagccgacgccggcuucaucaagcaguacggcgacugccucggcgacauagccgcccgggaccugaucugcgcccagaaguucaacggccugaccgugcugccuccccugcugaccgacgagaugaucgcccaguacaccagcgcccuguuagccggaaccaucaccagcggcuggacuuucggcgcuggagccgcucugcagauccccuucgccaugcagauggccuaccgguucaacggcaucggcgugacccagaacgugcuguacgagaaccagaagcugaucgccaaccaguucaacagcgccaucggcaagauccaggacagccugagcagcaccgcuagcgcccugggcaagcugcaggacguggugaaccagaacgcccaggcccugaacacccuggugaagcagcugagcagcaacuucggcgccaucagcagcgugcugaacgacauccugagccggcuggacaaggucgaggccgaggugcagaucgaccggcugaucacuggccggcugcagagccugcagaccuacgugacccagcagcugauccgggccgccgagauucgggccagcgccaaccuggccgccaccaagaugagcgagugcgugcugggccagagcaagcggguggacuucugcggcaagggcuaccaccugaugagcuuuccccagagcgcaccccacggagugguguuccugcacgugaccuacgugcccgcccaggagaagaacuucaccaccgccccagccaucugccacgacggcaaggcccacuuuccccgggagggcguguucgugagcaacggcacccacugguucgugacccagcggaacuucuacgagccccagaucaucaccaccgacaacaccuucgugagcggcaacugcgacguggugaucggcaucgugaacaacaccguguacgauccccugcagcccgagcuggacagcuucaaggaggagcuggacaaguacuucaagaaucacaccagccccgacguggaccugggcgacaucagcggcaucaacgccagcguggugaacauccagaaggagaucgaucggcugaacgagguggccaagaaccugaacgagagccugaucgaccugcaggagcugggcaaguacgagcaguacaucaaguggcccugguacaucuggcugggcuucaucgccggccugaucgccaucgugauggugaccaucaugcugugcugcaugaccagcugcugcagcugccugaagggcuguugcagcugcggcagcugcugcaaguucgacgaggacgacagcgagcccgugcugaagggcgugaagcugcacuacaccugaggacuaguuauaagacugacuagcccgaugggccucccaacgggcccuccuccccuccuugcaccgagauuaauaaaaaaaaaaaaaaaaaaaaaaaaaaaaaaaaaaaaaaaaaaaaaaaaaaaaaaaaaaaaaaaaaaaaaaaaaaaaaaaaaaaaaaaaaaaaaaaaaaaa

SEQ ID NO: 25433 - RNA, 4011 nt, Artificial Sequence
  SARS-CoV-2/Wuhan/WIV05/2019__EPI_ISL_402128 spike protein mRNA gc (1-1273)(D614G_I692V)
aggagaaagcuuaccauguucguguuccuggugcugcugccccuggugagcagccagugcgugaaccugaccacccggacccagcugccaccagccuacaccaacagcuucacccggggcgucuacuaccccgacaagguguuccggagcagcguccugcacagcacccaggaccuguuccugcccuucuucagcaacgugaccugguuccacgccauccacgugagcggcaccaacggcaccaagcgguucgacaaccccgugcugcccuucaacgacggcguguacuucgccagcaccgagaagagcaacaucauccggggcuggaucuucggcaccacccuggacagcaagacccagagccugcugaucgugaauaacgccaccaacguggugaucaaggugugcgaguuccaguucugcaacgaccccuuccugggcguguacuaccacaagaacaacaagagcuggauggagagcgaguuccggguguacagcagcgccaacaacugcaccuucgaguacgugagccagcccuuccugauggaccuggagggcaagcagggcaacuucaagaaccugcgggaguucguguucaagaacaucgacggcuacuucaagaucuacagcaagcacaccccaaucaaccuggugcgggaucugccccagggcuucucagcccuggagccccugguggaccugcccaucggcaucaacaucacccgguuccagacccugcuggcccugcaccggagcuaccugaccccaggcgacagcagcagcggguggacagcaggcgcggcugcuuacuacgugggcuaccugcagccccggaccuuccugcugaaguacaacgagaacggcaccaucaccgacgccguggacugcgcccuggacccucugagcgagaccaagugcacccugaagagcuucaccguggagaagggcaucuaccagaccagcaacuuccgggugcagcccaccgagagcaucgugcgguuccccaacaucaccaaccugugccccuucggcgagguguucaacgccacccgguucgccagcguguacgccuggaaccggaagcggaucagcaacugcguggccgacuacagcgugcuguacaacagcgccagcuucagcaccuucaagugcuacggcgugagccccaccaagcugaacgaccugugcuucaccaacguguacgccgacagcuucgugauccguggcgacgaggugcggcagaucgcacccggccagacaggcaagaucgccgacuacaacuacaagcugcccgacgacuucaccggcugcgugaucgccuggaacagcaacaaccucgacagcaaggugggcggcaacuacaacuaccuguaccggcuguuccggaagagcaaccugaagcccuucgagcgggacaucagcaccgagaucuaccaagccggcuccaccccuugcaacggcguggagggcuucaacugcuacuucccucugcagagcuacggcuuccagcccaccaacggcgugggcuaccagcccuaccgggugguggugcugagcuucgagcugcugcacgccccagccaccguguguggccccaagaagagcaccaaccuggugaagaacaagugcgugaacuucaacuucaacggccuuaccggcaccggcgugcugaccgagagcaacaagaaauuccugcccuuucagcaguucggccgggacaucgccgacaccaccgacgcugugcgggauccccagacccuggagauccuggacaucaccccuugcagcuucggcggcgugagcgugaucaccccaggcaccaacaccagcaaccagguggccgugcuguaccagggcgugaacugcaccgaggugcccguggccauccacgccgaccagcugacacccaccuggcgggucuacagcaccggcagcaacguguuccagacccgggccgguugccugaucggcgccgagcacgugaacaacagcuacgagugcgacauccccaucggcgccggcaucugugccagcuaccagacccagaccaauucaccccggagggcaaggagcguggccagccagagcgugaucgccuacaccaugagccugggcgccgagaacagcguggccuacagcaacaacagcaucgccauccccaccaacuucaccaucagcgugaccaccgagauucugcccgugagcaugaccaagaccagcguggacugcaccauguacaucugcggcgacagcaccgagugcagcaaccugcugcugcaguacggcagcuucugcacccagcugaaccgggcccugaccggcaucgccguggagcaggacaagaacacccaggagguguucgcccaggugaagcagaucuacaagaccccucccaucaaggacuucggcggcuucaacuucagccagauccugcccgaccccagcaagcccagcaagcggagcuucaucgaggaccugcuguucaacaaggugacccuagccgacgccggcuucaucaagcaguacggcgacugccucggcgacauagccgcccgggaccugaucugcgcccagaaguucaacggccugaccgugcugccuccccugcugaccgacgagaugaucgcccaguacaccagcgcccuguuagccggaaccaucaccagcggcuggacuuucggcgcuggagccgcucugcagauccccuucgccaugcagauggccuaccgguucaacggcaucggcgugacccagaacgugcuguacgagaaccagaagcugaucgccaaccaguucaacagcgccaucggcaagauccaggacagccugagcagcaccgcuagcgcccugggcaagcugcaggacguggugaaccagaacgcccaggcccugaacacccuggugaagcagcugagcagcaacuucggcgccaucagcagcgugcugaacgacauccugagccggcuggacaaggucgaggccgaggugcagaucgaccggcugaucacuggccggcugcagagccugcagaccuacgugacccagcagcugauccgggccgccgagauucgggccagcgccaaccuggccgccaccaagaugagcgagugcgugcugggccagagcaagcggguggacuucugcggcaagggcuaccaccugaugagcuuuccccagagcgcaccccacggagugguguuccugcacgugaccuacgugcccgcccaggagaagaacuucaccaccgccccagccaucugccacgacggcaaggcccacuuuccccgggagggcguguucgugagcaacggcacccacugguucgugacccagcggaacuucuacgagccccagaucaucaccaccgacaacaccuucgugagcggcaacugcgacguggugaucggcaucgugaacaacaccguguacgauccccugcagcccgagcuggacagcuucaaggaggagcuggacaaguacuucaagaaucacaccagccccgacguggaccugggcgacaucagcggcaucaacgccagcguggugaacauccagaaggagaucgaucggcugaacgagguggccaagaaccugaacgagagccugaucgaccugcaggagcugggcaaguacgagcaguacaucaaguggcccugguacaucuggcugggcuucaucgccggccugaucgccaucgugauggugaccaucaugcugugcugcaugaccagcugcugcagcugccugaagggcuguugcagcugcggcagcugcugcaaguucgacgaggacgacagcgagcccgugcugaagggcgugaagcugcacuacaccugaggacuaguuauaagacugacuagcccgaugggccucccaacgggcccuccuccccuccuugcaccgagauuaauaaaaaaaaaaaaaaaaaaaaaaaaaaaaaaaaaaaaaaaaaaaaaaaaaaaaaaaaaaaaaaaaaaaaaaaaaaaaaaaaaaaaaaaaaaaaaaaaaaaa

SEQ ID NO: 25434 - RNA, 4011 nt, Artificial Sequence
  SARS-CoV-2/Wuhan/WIV05/2019__EPI_ISL_402128 spike protein mRNA gc (1-1273)(D614G_M1229I)
aggagaaagcuuaccauguucguguuccuggugcugcugccccuggugagcagccagugcgugaaccugaccacccggacccagcugccaccagccuacaccaacagcuucacccggggcgucuacuaccccgacaagguguuccggagcagcguccugcacagcacccaggaccuguuccugcccuucuucagcaacgugaccugguuccacgccauccacgugagcggcaccaacggcaccaagcgguucgacaaccccgugcugcccuucaacgacggcguguacuucgccagcaccgagaagagcaacaucauccggggcuggaucuucggcaccacccuggacagcaagacccagagccugcugaucgugaauaacgccaccaacguggugaucaaggugugcgaguuccaguucugcaacgaccccuuccugggcguguacuaccacaagaacaacaagagcuggauggagagcgaguuccggguguacagcagcgccaacaacugcaccuucgaguacgugagccagcccuuccugauggaccuggagggcaagcagggcaacuucaagaaccugcgggaguucguguucaagaacaucgacggcuacuucaagaucuacagcaagcacaccccaaucaaccuggugcgggaucugccccagggcuucucagcccuggagccccugguggaccugcccaucggcaucaacaucacccgguuccagacccugcuggcccugcaccggagcuaccugaccccaggcgacagcagcagcggguggacagcaggcgcggcugcuuacuacgugggcuaccugcagccccggaccuuccugcugaaguacaacgagaacggcaccaucaccgacgccguggacugcgcccuggacccucugagcgagaccaagugcacccugaagagcuucaccguggagaagggcaucuaccagaccagcaacuuccgggugcagcccaccgagagcaucgugcgguuccccaacaucaccaaccugugccccuucggcgagguguucaacgccacccgguucgccagcguguacgccuggaaccggaagcggaucagcaacugcguggccgacuacagcgugcuguacaacagcgccagcuucagcaccuucaagugcuacggcgugagccccaccaagcugaacgaccugugcuucaccaacguguacgccgacagcuucgugauccguggcgacgaggugcggcagaucgcacccggccagacaggcaagaucgccgacuacaacuacaagcugcccgacgacuucaccggcugcgugaucgccuggaacagcaacaaccucgacagcaaggugggcggcaacuacaacuaccuguaccggcuguuccggaagagcaaccugaagcccuucgagcgggacaucagcaccgagaucuaccaagccggcuccaccccuugcaacggcguggagggcuucaacugcuacuucccucugcagagcuacggcuuccagcccaccaacggcgugggcuaccagcccuaccgggugguggugcugagcuucgagcugcugcacgccccagccaccguguguggccccaagaagagcaccaaccuggugaagaacaagugcgugaacuucaacuucaacggccuuaccggcaccggcgugcugaccgagagcaacaagaaauuccugcccuuucagcaguucggccgggacaucgccgacaccaccgacgcugugcgggauccccagacccuggagauccuggacaucaccccuugcagcuucggcggcgugagcgugaucaccccaggcaccaacaccagcaaccagguggccgugcuguaccagggcgugaacugcaccgaggugcccguggccauccacgccgaccagcugacacccaccuggcgggucuacagcaccggcagcaacguguuccagacccgggccgguugccugaucggcgccgagcacgugaacaacagcuacgagugcgacauccccaucggcgccggcaucugugccagcuaccagacccagaccaauucaccccggagggcaaggagcguggccagccagagcaucaucgccuacaccaugagccugggcgccgagaacagcguggccuacagcaacaacagcaucgccauccccaccaacuucaccaucagcgugaccaccgagauucugcccgugagcaugaccaagaccagcguggacugcaccauguacaucugcggcgacagcaccgagugcagcaaccugcugcugcaguacggcagcuucugcacccagcugaaccgggcccugaccggcaucgccguggagcaggacaagaacacccaggagguguucgcccaggugaagcagaucuacaagaccccucccaucaaggacuucggcggcuucaacuucagccagauccugcccgaccccagcaagcccagcaagcggagcuucaucgaggaccugcuguucaacaaggugacccuagccgacgccggcuucaucaagcaguacggcgacugccucggcgacauagccgcccgggaccugaucugcgcccagaaguucaacggccugaccgugcugccuccccugcugaccgacgagaugaucgcccaguacaccagcgcccuguuagccggaaccaucaccagcggcuggacuuucggcgcuggagccgcucugcagauccccuucgccaugcagauggccuaccgguucaacggcaucggcgugacccagaacgugcuguacgagaaccagaagcugaucgccaaccaguucaacagcgccaucggcaagauccaggacagccugagcagcaccgcuagcgcccugggcaagcugcaggacguggugaaccagaacgcccaggcccugaacacccuggugaagcagcugagcagcaacuucggcgccaucagcagcgugcugaacgacauccugagccggcuggacaaggucgaggccgaggugcagaucgaccggcugaucacuggccggcugcagagccugcagaccuacgugacccagcagcugauccgggccgccgagauucgggccagcgccaaccuggccgccaccaagaugagcgagugcgugcugggccagagcaagcggguggacuucugcggcaagggcuaccaccugaugagcuuuccccagagcgcaccccacggagugguguuccugcacgugaccuacgugcccgcccaggagaagaacuucaccaccgccccagccaucugccacgacggcaaggcccacuuuccccgggagggcguguucgugagcaacggcacccacugguucgugacccagcggaacuucuacgagccccagaucaucaccaccgacaacaccuucgugagcggcaacugcgacguggugaucggcaucgugaacaacaccguguacgauccccugcagcccgagcuggacagcuucaaggaggagcuggacaaguacuucaagaaucacaccagccccgacguggaccugggcgacaucagcggcaucaacgccagcguggugaacauccagaaggagaucgaucggcugaacgagguggccaagaaccugaacgagagccugaucgaccugcaggagcugggcaaguacgagcaguacaucaaguggcccugguacaucuggcugggcuucaucgccggccugaucgccaucgugaucgugaccaucaugcugugcugcaugaccagcugcugcagcugccugaagggcuguugcagcugcggcagcugcugcaaguucgacgaggacgacagcgagcccgugcugaagggcgugaagcugcacuacaccugaggacuaguuauaagacugacuagcccgaugggccucccaacgggcccuccuccccuccuugcaccgagauuaauaaaaaaaaaaaaaaaaaaaaaaaaaaaaaaaaaaaaaaaaaaaaaaaaaaaaaaaaaaaaaaaaaaaaaaaaaaaaaaaaaaaaaaaaaaaaaaaaaaaa

SEQ ID NO: 25435 - RNA, 4005 nt, Artificial Sequence
  SARS-CoV-2/Wuhan/WIV05/2019__EPI_ISL_402128 spike protein mRNA gc (1-1273)(H69del_V70del_A222V_Y453F_S477N_D614G_I692V)
aggagaaagcuuaccauguucguguuccuggugcugcugccccuggugagcagccagugcgugaaccugaccacccggacccagcugccaccagccuacaccaacagcuucacccggggcgucuacuaccccgacaagguguuccggagcagcguccugcacagcacccaggaccuguuccugcccuucuucagcaacgugaccugguuccacgccaucagcggcaccaacggcaccaagcgguucgacaaccccgugcugcccuucaacgacggcguguacuucgccagcaccgagaagagcaacaucauccggggcuggaucuucggcaccacccuggacagcaagacccagagccugcugaucgugaauaacgccaccaacguggugaucaaggugugcgaguuccaguucugcaacgaccccuuccugggcguguacuaccacaagaacaacaagagcuggauggagagcgaguuccggguguacagcagcgccaacaacugcaccuucgaguacgugagccagcccuuccugauggaccuggagggcaagcagggcaacuucaagaaccugcgggaguucguguucaagaacaucgacggcuacuucaagaucuacagcaagcacaccccaaucaaccuggugcgggaucugccccagggcuucucagugcuggagccccugguggaccugcccaucggcaucaacaucacccgguuccagacccugcuggcccugcaccggagcuaccugaccccaggcgacagcagcagcggguggacagcaggcgcggcugcuuacuacgugggcuaccugcagccccggaccuuccugcugaaguacaacgagaacggcaccaucaccgacgccguggacugcgcccuggacccucugagcgagaccaagugcacccugaagagcuucaccguggagaagggcaucuaccagaccagcaacuuccgggugcagcccaccgagagcaucgugcgguuccccaacaucaccaaccugugccccuucggcgagguguucaacgccacccgguucgccagcguguacgccuggaaccggaagcggaucagcaacugcguggccgacuacagcgugcuguacaacagcgccagcuucagcaccuucaagugcuacggcgugagccccaccaagcugaacgaccugugcuucaccaacguguacgccgacagcuucgugauccguggcgacgaggugcggcagaucgcacccggccagacaggcaagaucgccgacuacaacuacaagcugcccgacgacuucaccggcugcgugaucgccuggaacagcaacaaccucgacagcaaggugggcggcaacuacaacuaccuguuccggcuguuccggaagagcaaccugaagcccuucgagcgggacaucagcaccgagaucuaccaagccggcaacaccccuugcaacggcguggagggcuucaacugcuacuucccucugcagagcuacggcuuccagcccaccaacggcgugggcuaccagcccuaccgggugguggugcugagcuucgagcugcugcacgccccagccaccguguguggccccaagaagagcaccaaccuggugaagaacaagugcgugaacuucaacuucaacggccuuaccggcaccggcgugcugaccgagagcaacaagaaauuccugcccuuucagcaguucggccgggacaucgccgacaccaccgacgcugugcgggauccccagacccuggagauccuggacaucaccccuugcagcuucggcggcgugagcgugaucaccccaggcaccaacaccagcaaccagguggccgugcuguaccagggcgugaacugcaccgaggugcccguggccauccacgccgaccagcugacacccaccuggcgggucuacagcaccggcagcaacguguuccagacccgggccgguugccugaucggcgccgagcacgugaacaacagcuacgagugcgacauccccaucggcgccggcaucugugccagcuaccagacccagaccaauucaccccggagggcaaggagcguggccagccagagcgugaucgccuacaccaugagccugggcgccgagaacagcguggccuacagcaacaacagcaucgccauccccaccaacuucaccaucagcgugaccaccgagauucugcccgugagcaugaccaagaccagcguggacugcaccauguacaucugcggcgacagcaccgagugcagcaaccugcugcugcaguacggcagcuucugcacccagcugaaccgggcccugaccggcaucgccguggagcaggacaagaacacccaggagguguucgcccaggugaagcagaucuacaagaccccucccaucaaggacuucggcggcuucaacuucagccagauccugcccgaccccagcaagcccagcaagcggagcuucaucgaggaccugcuguucaacaaggugacccuagccgacgccggcuucaucaagcaguacggcgacugccucggcgacauagccgcccgggaccugaucugcgcccagaaguucaacggccugaccgugcugccuccccugcugaccgacgagaugaucgcccaguacaccagcgcccuguuagccggaaccaucaccagcggcuggacuuucggcgcuggagccgcucugcagauccccuucgccaugcagauggccuaccgguucaacggcaucggcgugacccagaacgugcuguacgagaaccagaagcugaucgccaaccaguucaacagcgccaucggcaagauccaggacagccugagcagcaccgcuagcgcccugggcaagcugcaggacguggugaaccagaacgcccaggcccugaacacccuggugaagcagcugagcagcaacuucggcgccaucagcagcgugcugaacgacauccugagccggcuggacaaggucgaggccgaggugcagaucgaccggcugaucacuggccggcugcagagccugcagaccuacgugacccagcagcugauccgggccgccgagauucgggccagcgccaaccuggccgccaccaagaugagcgagugcgugcugggccagagcaagcggguggacuucugcggcaagggcuaccaccugaugagcuuuccccagagcgcaccccacggagugguguuccugcacgugaccuacgugcccgcccaggagaagaacuucaccaccgccccagccaucugccacgacggcaaggcccacuuuccccgggagggcguguucgugagcaacggcacccacugguucgugacccagcggaacuucuacgagccccagaucaucaccaccgacaacaccuucgugagcggcaacugcgacguggugaucggcaucgugaacaacaccguguacgauccccugcagcccgagcuggacagcuucaaggaggagcuggacaaguacuucaagaaucacaccagccccgacguggaccugggcgacaucagcggcaucaacgccagcguggugaacauccagaaggagaucgaucggcugaacgagguggccaagaaccugaacgagagccugaucgaccugcaggagcugggcaaguacgagcaguacaucaaguggcccugguacaucuggcugggcuucaucgccggccugaucgccaucgugauggugaccaucaugcugugcugcaugaccagcugcugcagcugccugaagggcuguugcagcugcggcagcugcugcaaguucgacgaggacgacagcgagcccgugcugaagggcgugaagcugcacuacaccugaggacuaguuauaagacugacuagcccgaugggccucccaacgggcccuccuccccuccuugcaccgagauuaauaaaaaaaaaaaaaaaaaaaaaaaaaaaaaaaaaaaaaaaaaaaaaaaaaaaaaaaaaaaaaaaaaaaaaaaaaaaaaaaaaaaaaaaaaaaaaaaaaaaa

SEQ ID NO: 25436 - RNA, 4005 nt, Artificial Sequence
  SARS-CoV-2/Wuhan/WIV05/2019__EPI_ISL_402128 spike protein mRNA gc (1-1273)(H69del_V70del_Y453F_D614G_I692V_M1229I)
aggagaaagcuuaccauguucguguuccuggugcugcugccccuggugagcagccagugcgugaaccugaccacccggacccagcugccaccagccuacaccaacagcuucacccggggcgucuacuaccccgacaagguguuccggagcagcguccugcacagcacccaggaccuguuccugcccuucuucagcaacgugaccugguuccacgccaucagcggcaccaacggcaccaagcgguucgacaaccccgugcugcccuucaacgacggcguguacuucgccagcaccgagaagagcaacaucauccggggcuggaucuucggcaccacccuggacagcaagacccagagccugcugaucgugaauaacgccaccaacguggugaucaaggugugcgaguuccaguucugcaacgaccccuuccugggcguguacuaccacaagaacaacaagagcuggauggagagcgaguuccggguguacagcagcgccaacaacugcaccuucgaguacgugagccagcccuuccugauggaccuggagggcaagcagggcaacuucaagaaccugcgggaguucguguucaagaacaucgacggcuacuucaagaucuacagcaagcacaccccaaucaaccuggugcgggaucugccccagggcuucucagcccuggagccccugguggaccugcccaucggcaucaacaucacccgguuccagacccugcuggcccugcaccggagcuaccugaccccaggcgacagcagcagcggguggacagcaggcgcggcugcuuacuacgugggcuaccugcagccccggaccuuccugcugaaguacaacgagaacggcaccaucaccgacgccguggacugcgcccuggacccucugagcgagaccaagugcacccugaagagcuucaccguggagaagggcaucuaccagaccagcaacuuccgggugcagcccaccgagagcaucgugcgguuccccaacaucaccaaccugugccccuucggcgagguguucaacgccacccgguucgccagcguguacgccuggaaccggaagcggaucagcaacugcguggccgacuacagcgugcuguacaacagcgccagcuucagcaccuucaagugcuacggcgugagccccaccaagcugaacgaccugugcuucaccaacguguacgccgacagcuucgugauccguggcgacgaggugcggcagaucgcacccggccagacaggcaagaucgccgacuacaacuacaagcugcccgacgacuucaccggcugcgugaucgccuggaacagcaacaaccucgacagcaaggugggcggcaacuacaacuaccuguuccggcuguuccggaagagcaaccugaagcccuucgagcgggacaucagcaccgagaucuaccaagccggcuccaccccuugcaacggcguggagggcuucaacugcuacuucccucugcagagcuacggcuuccagcccaccaacggcgugggcuaccagcccuaccgggugguggugcugagcuucgagcugcugcacgccccagccaccguguguggccccaagaagagcaccaaccuggugaagaacaagugcgugaacuucaacuucaacggccuuaccggcaccggcgugcugaccgagagcaacaagaaauuccugcccuuucagcaguucggccgggacaucgccgacaccaccgacgcugugcgggauccccagacccuggagauccuggacaucaccccuugcagcuucggcggcgugagcgugaucaccccaggcaccaacaccagcaaccagguggccgugcuguaccagggcgugaacugcaccgaggugcccguggccauccacgccgaccagcugacacccaccuggcgggucuacagcaccggcagcaacguguuccagacccgggccgguugccugaucggcgccgagcacgugaacaacagcuacgagugcgacauccccaucggcgccggcaucugugccagcuaccagacccagaccaauucaccccggagggcaaggagcguggccagccagagcgugaucgccuacaccaugagccugggcgccgagaacagcguggccuacagcaacaacagcaucgccauccccaccaacuucaccaucagcgugaccaccgagauucugcccgugagcaugaccaagaccagcguggacugcaccauguacaucugcggcgacagcaccgagugcagcaaccugcugcugcaguacggcagcuucugcacccagcugaaccgggcccugaccggcaucgccguggagcaggacaagaacacccaggagguguucgcccaggugaagcagaucuacaagaccccucccaucaaggacuucggcggcuucaacuucagccagauccugcccgaccccagcaagcccagcaagcggagcuucaucgaggaccugcuguucaacaaggugacccuagccgacgccggcuucaucaagcaguacggcgacugccucggcgacauagccgcccgggaccugaucugcgcccagaaguucaacggccugaccgugcugccuccccugcugaccgacgagaugaucgcccaguacaccagcgcccuguuagccggaaccaucaccagcggcuggacuuucggcgcuggagccgcucugcagauccccuucgccaugcagauggccuaccgguucaacggcaucggcgugacccagaacgugcuguacgagaaccagaagcugaucgccaaccaguucaacagcgccaucggcaagauccaggacagccugagcagcaccgcuagcgcccugggcaagcugcaggacguggugaaccagaacgcccaggcccugaacacccuggugaagcagcugagcagcaacuucggcgccaucagcagcgugcugaacgacauccugagccggcuggacaaggucgaggccgaggugcagaucgaccggcugaucacuggccggcugcagagccugcagaccuacgugacccagcagcugauccgggccgccgagauucgggccagcgccaaccuggccgccaccaagaugagcgagugcgugcugggccagagcaagcggguggacuucugcggcaagggcuaccaccugaugagcuuuccccagagcgcaccccacggagugguguuccugcacgugaccuacgugcccgcccaggagaagaacuucaccaccgccccagccaucugccacgacggcaaggcccacuuuccccgggagggcguguucgugagcaacggcacccacugguucgugacccagcggaacuucuacgagccccagaucaucaccaccgacaacaccuucgugagcggcaacugcgacguggugaucggcaucgugaacaacaccguguacgauccccugcagcccgagcuggacagcuucaaggaggagcuggacaaguacuucaagaaucacaccagccccgacguggaccugggcgacaucagcggcaucaacgccagcguggugaacauccagaaggagaucgaucggcugaacgagguggccaagaaccugaacgagagccugaucgaccugcaggagcugggcaaguacgagcaguacaucaaguggcccugguacaucuggcugggcuucaucgccggccugaucgccaucgugaucgugaccaucaugcugugcugcaugaccagcugcugcagcugccugaagggcuguugcagcugcggcagcugcugcaaguucgacgaggacgacagcgagcccgugcugaagggcgugaagcugcacuacaccugaggacuaguuauaagacugacuagcccgaugggccucccaacgggcccuccuccccuccuugcaccgagauuaauaaaaaaaaaaaaaaaaaaaaaaaaaaaaaaaaaaaaaaaaaaaaaaaaaaaaaaaaaaaaaaaaaaaaaaaaaaaaaaaaaaaaaaaaaaaaaaaaaaaa

SEQ ID NO: 25437 - RNA, 4002 nt, Artificial Sequence
  SARS-CoV-2/Wuhan/WIV05/2019__EPI_ISL_402128 spike protein mRNA gc (1-1273)(H69del_V70del_Y144del_N501Y_A570D_D614G_P681H_T716I_S982 A_D1118H)
aggagaaagcuuaccauguucguguuccuggugcugcugccccuggugagcagccagugcgugaaccugaccacccggacccagcugccaccagccuacaccaacagcuucacccggggcgucuacuaccccgacaagguguuccggagcagcguccugcacagcacccaggaccuguuccugcccuucuucagcaacgugaccugguuccacgccaucagcggcaccaacggcaccaagcgguucgacaaccccgugcugcccuucaacgacggcguguacuucgccagcaccgagaagagcaacaucauccggggcuggaucuucggcaccacccuggacagcaagacccagagccugcugaucgugaauaacgccaccaacguggugaucaaggugugcgaguuccaguucugcaacgaccccuuccugggcguguaccacaagaacaacaagagcuggauggagagcgaguuccggguguacagcagcgccaacaacugcaccuucgaguacgugagccagcccuuccugauggaccuggagggcaagcagggcaacuucaagaaccugcgggaguucguguucaagaacaucgacggcuacuucaagaucuacagcaagcacaccccaaucaaccuggugcgggaucugccccagggcuucucagcccuggagccccugguggaccugcccaucggcaucaacaucacccgguuccagacccugcuggcccugcaccggagcuaccugaccccaggcgacagcagcagcggguggacagcaggcgcggcugcuuacuacgugggcuaccugcagccccggaccuuccugcugaaguacaacgagaacggcaccaucaccgacgccguggacugcgcccuggacccucugagcgagaccaagugcacccugaagagcuucaccguggagaagggcaucuaccagaccagcaacuuccgggugcagcccaccgagagcaucgugcgguuccccaacaucaccaaccugugccccuucggcgagguguucaacgccacccgguucgccagcguguacgccuggaaccggaagcggaucagcaacugcguggccgacuacagcgugcuguacaacagcgccagcuucagcaccuucaagugcuacggcgugagccccaccaagcugaacgaccugugcuucaccaacguguacgccgacagcuucgugauccguggcgacgaggugcggcagaucgcacccggccagacaggcaagaucgccgacuacaacuacaagcugcccgacgacuucaccggcugcgugaucgccuggaacagcaacaaccucgacagcaaggugggcggcaacuacaacuaccuguaccggcuguuccggaagagcaaccugaagcccuucgagcgggacaucagcaccgagaucuaccaagccggcuccaccccuugcaacggcguggagggcuucaacugcuacuucccucugcagagcuacggcuuccagcccaccuacggcgugggcuaccagcccuaccgggugguggugcugagcuucgagcugcugcacgccccagccaccguguguggccccaagaagagcaccaaccuggugaagaacaagugcgugaacuucaacuucaacggccuuaccggcaccggcgugcugaccgagagcaacaagaaauuccugcccuuucagcaguucggccgggacaucgacgacaccaccgacgcugugcgggauccccagacccuggagauccuggacaucaccccuugcagcuucggcggcgugagcgugaucaccccaggcaccaacaccagcaaccagguggccgugcuguaccagggcgugaacugcaccgaggugcccguggccauccacgccgaccagcugacacccaccuggcgggucuacagcaccggcagcaacguguuccagacccgggccgguugccugaucggcgccgagcacgugaacaacagcuacgagugcgacauccccaucggcgccggcaucugugccagcuaccagacccagaccaauucacaccggagggcaaggagcguggccagccagagcaucaucgccuacaccaugagccugggcgccgagaacagcguggccuacagcaacaacagcaucgccauccccaucaacuucaccaucagcgugaccaccgagauucugcccgugagcaugaccaagaccagcguggacugcaccauguacaucugcggcgacagcaccgagugcagcaaccugcugcugcaguacggcagcuucugcacccagcugaaccgggcccugaccggcaucgccguggagcaggacaagaacacccaggagguguucgcccaggugaagcagaucuacaagaccccucccaucaaggacuucggcggcuucaacuucagccagauccugcccgaccccagcaagcccagcaagcggagcuucaucgaggaccugcuguucaacaaggugacccuagccgacgccggcuucaucaagcaguacggcgacugccucggcgacauagccgcccgggaccugaucugcgcccagaaguucaacggccugaccgugcugccuccccugcugaccgacgagaugaucgcccaguacaccagcgcccuguuagccggaaccaucaccagcggcuggacuuucggcgcuggagccgcucugcagauccccuucgccaugcagauggccuaccgguucaacggcaucggcgugacccagaacgugcuguacgagaaccagaagcugaucgccaaccaguucaacagcgccaucggcaagauccaggacagccugagcagcaccgcuagcgcccugggcaagcugcaggacguggugaaccagaacgcccaggcccugaacacccuggugaagcagcugagcagcaacuucggcgccaucagcagcgugcugaacgacauccuggcccggcuggacaaggucgaggccgaggugcagaucgaccggcugaucacuggccggcugcagagccugcagaccuacgugacccagcagcugauccgggccgccgagauucgggccagcgccaaccuggccgccaccaagaugagcgagugcgugcugggccagagcaagcggguggacuucugcggcaagggcuaccaccugaugagcuuuccccagagcgcaccccacggagugguguuccugcacgugaccuacgugcccgcccaggagaagaacuucaccaccgccccagccaucugccacgacggcaaggcccacuuuccccgggagggcguguucgugagcaacggcacccacugguucgugacccagcggaacuucuacgagccccagaucaucaccacccacaacaccuucgugagcggcaacugcgacguggugaucggcaucgugaacaacaccguguacgauccccugcagcccgagcuggacagcuucaaggaggagcuggacaaguacuucaagaaucacaccagccccgacguggaccugggcgacaucagcggcaucaacgccagcguggugaacauccagaaggagaucgaucggcugaacgagguggccaagaaccugaacgagagccugaucgaccugcaggagcugggcaaguacgagcaguacaucaaguggcccugguacaucuggcugggcuucaucgccggccugaucgccaucgugauggugaccaucaugcugugcugcaugaccagcugcugcagcugccugaagggcuguugcagcugcggcagcugcugcaaguucgacgaggacgacagcgagcccgugcugaagggcgugaagcugcacuacaccugaggacuaguuauaagacugacuagcccgaugggccucccaacgggcccuccuccccuccuugcaccgagauuaauaaaaaaaaaaaaaaaaaaaaaaaaaaaaaaaaaaaaaaaaaaaaaaaaaaaaaaaaaaaaaaaaaaaaaaaaaaaaaaaaaaaaaaaaaaaaaaaaaaaa

SEQ ID NO: 25438 - RNA, 4011 nt, Artificial Sequence
  SARS-CoV-2/Wuhan/WIV05/2019__EPI_ISL_402128 spike protein mRNA gc (1-1273)(K417N_E484K_N501Y_D614G)
aggagaaagcuuaccauguucguguuccuggugcugcugccccuggugagcagccagugcgugaaccugaccacccggacccagcugccaccagccuacaccaacagcuucacccggggcgucuacuaccccgacaagguguuccggagcagcguccugcacagcacccaggaccuguuccugcccuucuucagcaacgugaccugguuccacgccauccacgugagcggcaccaacggcaccaagcgguucgacaaccccgugcugcccuucaacgacggcguguacuucgccagcaccgagaagagcaacaucauccggggcuggaucuucggcaccacccuggacagcaagacccagagccugcugaucgugaauaacgccaccaacguggugaucaaggugugcgaguuccaguucugcaacgaccccuuccugggcguguacuaccacaagaacaacaagagcuggauggagagcgaguuccggguguacagcagcgccaacaacugcaccuucgaguacgugagccagcccuuccugauggaccuggagggcaagcagggcaacuucaagaaccugcgggaguucguguucaagaacaucgacggcuacuucaagaucuacagcaagcacaccccaaucaaccuggugcgggaucugccccagggcuucucagcccuggagccccugguggaccugcccaucggcaucaacaucacccgguuccagacccugcuggcccugcaccggagcuaccugaccccaggcgacagcagcagcggguggacagcaggcgcggcugcuuacuacgugggcuaccugcagccccggaccuuccugcugaaguacaacgagaacggcaccaucaccgacgccguggacugcgcccuggacccucugagcgagaccaagugcacccugaagagcuucaccguggagaagggcaucuaccagaccagcaacuuccgggugcagcccaccgagagcaucgugcgguuccccaacaucaccaaccugugccccuucggcgagguguucaacgccacccgguucgccagcguguacgccuggaaccggaagcggaucagcaacugcguggccgacuacagcgugcuguacaacagcgccagcuucagcaccuucaagugcuacggcgugagccccaccaagcugaacgaccugugcuucaccaacguguacgccgacagcuucgugauccguggcgacgaggugcggcagaucgcacccggccagacaggcaacaucgccgacuacaacuacaagcugcccgacgacuucaccggcugcgugaucgccuggaacagcaacaaccucgacagcaaggugggcggcaacuacaacuaccuguaccggcuguuccggaagagcaaccugaagcccuucgagcgggacaucagcaccgagaucuaccaagccggcuccaccccuugcaacggcgugaagggcuucaacugcuacuucccucugcagagcuacggcuuccagcccaccuacggcgugggcuaccagcccuaccgggugguggugcugagcuucgagcugcugcacgccccagccaccguguguggccccaagaagagcaccaaccuggugaagaacaagugcgugaacuucaacuucaacggccuuaccggcaccggcgugcugaccgagagcaacaagaaauuccugcccuuucagcaguucggccgggacaucgccgacaccaccgacgcugugcgggauccccagacccuggagauccuggacaucaccccuugcagcuucggcggcgugagcgugaucaccccaggcaccaacaccagcaaccagguggccgugcuguaccagggcgugaacugcaccgaggugcccguggccauccacgccgaccagcugacacccaccuggcgggucuacagcaccggcagcaacguguuccagacccgggccgguugccugaucggcgccgagcacgugaacaacagcuacgagugcgacauccccaucggcgccggcaucugugccagcuaccagacccagaccaauucaccccggagggcaaggagcguggccagccagagcaucaucgccuacaccaugagccugggcgccgagaacagcguggccuacagcaacaacagcaucgccauccccaccaacuucaccaucagcgugaccaccgagauucugcccgugagcaugaccaagaccagcguggacugcaccauguacaucugcggcgacagcaccgagugcagcaaccugcugcugcaguacggcagcuucugcacccagcugaaccgggcccugaccggcaucgccguggagcaggacaagaacacccaggagguguucgcccaggugaagcagaucuacaagaccccucccaucaaggacuucggcggcuucaacuucagccagauccugcccgaccccagcaagcccagcaagcggagcuucaucgaggaccugcuguucaacaaggugacccuagccgacgccggcuucaucaagcaguacggcgacugccucggcgacauagccgcccgggaccugaucugcgcccagaaguucaacggccugaccgugcugccuccccugcugaccgacgagaugaucgcccaguacaccagcgcccuguuagccggaaccaucaccagcggcuggacuuucggcgcuggagccgcucugcagauccccuucgccaugcagauggccuaccgguucaacggcaucggcgugacccagaacgugcuguacgagaaccagaagcugaucgccaaccaguucaacagcgccaucggcaagauccaggacagccugagcagcaccgcuagcgcccugggcaagcugcaggacguggugaaccagaacgcccaggcccugaacacccuggugaagcagcugagcagcaacuucggcgccaucagcagcgugcugaacgacauccugagccggcuggacaaggucgaggccgaggugcagaucgaccggcugaucacuggccggcugcagagccugcagaccuacgugacccagcagcugauccgggccgccgagauucgggccagcgccaaccuggccgccaccaagaugagcgagugcgugcugggccagagcaagcggguggacuucugcggcaagggcuaccaccugaugagcuuuccccagagcgcaccccacggagugguguuccugcacgugaccuacgugcccgcccaggagaagaacuucaccaccgccccagccaucugccacgacggcaaggcccacuuuccccgggagggcguguucgugagcaacggcacccacugguucgugacccagcggaacuucuacgagccccagaucaucaccaccgacaacaccuucgugagcggcaacugcgacguggugaucggcaucgugaacaacaccguguacgauccccugcagcccgagcuggacagcuucaaggaggagcuggacaaguacuucaagaaucacaccagccccgacguggaccugggcgacaucagcggcaucaacgccagcguggugaacauccagaaggagaucgaucggcugaacgagguggccaagaaccugaacgagagccugaucgaccugcaggagcugggcaaguacgagcaguacaucaaguggcccugguacaucuggcugggcuucaucgccggccugaucgccaucgugauggugaccaucaugcugugcugcaugaccagcugcugcagcugccugaagggcuguugcagcugcggcagcugcugcaaguucgacgaggacgacagcgagcccgugcugaagggcgugaagcugcacuacaccugaggacuaguuauaagacugacuagcccgaugggccucccaacgggcccuccuccccuccuugcaccgagauuaauaaaaaaaaaaaaaaaaaaaaaaaaaaaaaaaaaaaaaaaaaaaaaaaaaaaaaaaaaaaaaaaaaaaaaaaaaaaaaaaaaaaaaaaaaaaaaaaaaaaa

SEQ ID NO: 25439 - RNA, 4002 nt, Artificial Sequence
  SARS-CoV-2/Wuhan/WIV05/2019__EPI_ISL_402128 spike protein mRNA gc (1-1273)(L18F_D80A_D215G_L242del_A243del_L244del_R246I_K417N_E484 K_N501Y_D614G_A701V)
aggagaaagcuuaccauguucguguuccuggugcugcugccccuggugagcagccagugcgugaacuucaccacccggacccagcugccaccagccuacaccaacagcuucacccggggcgucuacuaccccgacaagguguuccggagcagcguccugcacagcacccaggaccuguuccugcccuucuucagcaacgugaccugguuccacgccauccacgugagcggcaccaacggcaccaagcgguucgccaaccccgugcugcccuucaacgacggcguguacuucgccagcaccgagaagagcaacaucauccggggcuggaucuucggcaccacccuggacagcaagacccagagccugcugaucgugaauaacgccaccaacguggugaucaaggugugcgaguuccaguucugcaacgaccccuuccugggcguguacuaccacaagaacaacaagagcuggauggagagcgaguuccggguguacagcagcgccaacaacugcaccuucgaguacgugagccagcccuuccugauggaccuggagggcaagcagggcaacuucaagaaccugcgggaguucguguucaagaacaucgacggcuacuucaagaucuacagcaagcacaccccaaucaaccuggugcggggccugccccagggcuucucagcccuggagccccugguggaccugcccaucggcaucaacaucacccgguuccagacccugcacaucagcuaccugaccccaggcgacagcagcagcggguggacagcaggcgcggcugcuuacuacgugggcuaccugcagccccggaccuuccugcugaaguacaacgagaacggcaccaucaccgacgccguggacugcgcccuggacccucugagcgagaccaagugcacccugaagagcuucaccguggagaagggcaucuaccagaccagcaacuuccgggugcagcccaccgagagcaucgugcgguuccccaacaucaccaaccugugccccuucggcgagguguucaacgccacccgguucgccagcguguacgccuggaaccggaagcggaucagcaacugcguggccgacuacagcgugcuguacaacagcgccagcuucagcaccuucaagugcuacggcgugagccccaccaagcugaacgaccugugcuucaccaacguguacgccgacagcuucgugauccguggcgacgaggugcggcagaucgcacccggccagacaggcaacaucgccgacuacaacuacaagcugcccgacgacuucaccggcugcgugaucgccuggaacagcaacaaccucgacagcaaggugggcggcaacuacaacuaccuguaccggcuguuccggaagagcaaccugaagcccuucgagcgggacaucagcaccgagaucuaccaagccggcuccaccccuugcaacggcgugaagggcuucaacugcuacuucccucugcagagcuacggcuuccagcccaccuacggcgugggcuaccagcccuaccgggugguggugcugagcuucgagcugcugcacgccccagccaccguguguggccccaagaagagcaccaaccuggugaagaacaagugcgugaacuucaacuucaacggccuuaccggcaccggcgugcugaccgagagcaacaagaaauuccugcccuuucagcaguucggccgggacaucgccgacaccaccgacgcugugcgggauccccagacccuggagauccuggacaucaccccuugcagcuucggcggcgugagcgugaucaccccaggcaccaacaccagcaaccagguggccgugcuguaccagggcgugaacugcaccgaggugcccguggccauccacgccgaccagcugacacccaccuggcgggucuacagcaccggcagcaacguguuccagacccgggccgguugccugaucggcgccgagcacgugaacaacagcuacgagugcgacauccccaucggcgccggcaucugugccagcuaccagacccagaccaauucaccccggagggcaaggagcguggccagccagagcaucaucgccuacaccaugagccugggcguggagaacagcguggccuacagcaacaacagcaucgccauccccaccaacuucaccaucagcgugaccaccgagauucugcccgugagcaugaccaagaccagcguggacugcaccauguacaucugcggcgacagcaccgagugcagcaaccugcugcugcaguacggcagcuucugcacccagcugaaccgggcccugaccggcaucgccguggagcaggacaagaacacccaggagguguucgcccaggugaagcagaucuacaagaccccucccaucaaggacuucggcggcuucaacuucagccagauccugcccgaccccagcaagcccagcaagcggagcuucaucgaggaccugcuguucaacaaggugacccuagccgacgccggcuucaucaagcaguacggcgacugccucggcgacauagccgcccgggaccugaucugcgcccagaaguucaacggccugaccgugcugccuccccugcugaccgacgagaugaucgcccaguacaccagcgcccuguuagccggaaccaucaccagcggcuggacuuucggcgcuggagccgcucugcagauccccuucgccaugcagauggccuaccgguucaacggcaucggcgugacccagaacgugcuguacgagaaccagaagcugaucgccaaccaguucaacagcgccaucggcaagauccaggacagccugagcagcaccgcuagcgcccugggcaagcugcaggacguggugaaccagaacgcccaggcccugaacacccuggugaagcagcugagcagcaacuucggcgccaucagcagcgugcugaacgacauccugagccggcuggacaaggucgaggccgaggugcagaucgaccggcugaucacuggccggcugcagagccugcagaccuacgugacccagcagcugauccgggccgccgagauucgggccagcgccaaccuggccgccaccaagaugagcgagugcgugcugggccagagcaagcggguggacuucugcggcaagggcuaccaccugaugagcuuuccccagagcgcaccccacggagugguguuccugcacgugaccuacgugcccgcccaggagaagaacuucaccaccgccccagccaucugccacgacggcaaggcccacuuuccccgggagggcguguucgugagcaacggcacccacugguucgugacccagcggaacuucuacgagccccagaucaucaccaccgacaacaccuucgugagcggcaacugcgacguggugaucggcaucgugaacaacaccguguacgauccccugcagcccgagcuggacagcuucaaggaggagcuggacaaguacuucaagaaucacaccagccccgacguggaccugggcgacaucagcggcaucaacgccagcguggugaacauccagaaggagaucgaucggcugaacgagguggccaagaaccugaacgagagccugaucgaccugcaggagcugggcaaguacgagcaguacaucaaguggcccugguacaucuggcugggcuucaucgccggccugaucgccaucgugauggugaccaucaugcugugcugcaugaccagcugcugcagcugccugaagggcuguugcagcugcggcagcugcugcaaguucgacgaggacgacagcgagcccgugcugaagggcgugaagcugcacuacaccugaggacuaguuauaagacugacuagcccgaugggccucccaacgggcccuccuccccuccuugcaccgagauuaauaaaaaaaaaaaaaaaaaaaaaaaaaaaaaaaaaaaaaaaaaaaaaaaaaaaaaaaaaaaaaaaaaaaaaaaaaaaaaaaaaaaaaaaaaaaaaaaaaaaa

SEQ ID NO: 25440 - RNA, 4011 nt, Artificial Sequence
  SARS-CoV-2/Wuhan/WIV05/2019__EPI_ISL_402128 spike protein mRNA gc (1-1273)(E484K_D614G)
aggagaaagcuuaccauguucguguuccuggugcugcugccccuggugagcagccagugcgugaaccugaccacccggacccagcugccaccagccuacaccaacagcuucacccggggcgucuacuaccccgacaagguguuccggagcagcguccugcacagcacccaggaccuguuccugcccuucuucagcaacgugaccugguuccacgccauccacgugagcggcaccaacggcaccaagcgguucgacaaccccgugcugcccuucaacgacggcguguacuucgccagcaccgagaagagcaacaucauccggggcuggaucuucggcaccacccuggacagcaagacccagagccugcugaucgugaauaacgccaccaacguggugaucaaggugugcgaguuccaguucugcaacgaccccuuccugggcguguacuaccacaagaacaacaagagcuggauggagagcgaguuccggguguacagcagcgccaacaacugcaccuucgaguacgugagccagcccuuccugauggaccuggagggcaagcagggcaacuucaagaaccugcgggaguucguguucaagaacaucgacggcuacuucaagaucuacagcaagcacaccccaaucaaccuggugcgggaucugccccagggcuucucagcccuggagccccugguggaccugcccaucggcaucaacaucacccgguuccagacccugcuggcccugcaccggagcuaccugaccccaggcgacagcagcagcggguggacagcaggcgcggcugcuuacuacgugggcuaccugcagccccggaccuuccugcugaaguacaacgagaacggcaccaucaccgacgccguggacugcgcccuggacccucugagcgagaccaagugcacccugaagagcuucaccguggagaagggcaucuaccagaccagcaacuuccgggugcagcccaccgagagcaucgugcgguuccccaacaucaccaaccugugccccuucggcgagguguucaacgccacccgguucgccagcguguacgccuggaaccggaagcggaucagcaacugcguggccgacuacagcgugcuguacaacagcgccagcuucagcaccuucaagugcuacggcgugagccccaccaagcugaacgaccugugcuucaccaacguguacgccgacagcuucgugauccguggcgacgaggugcggcagaucgcacccggccagacaggcaagaucgccgacuacaacuacaagcugcccgacgacuucaccggcugcgugaucgccuggaacagcaacaaccucgacagcaaggugggcggcaacuacaacuaccuguaccggcuguuccggaagagcaaccugaagcccuucgagcgggacaucagcaccgagaucuaccaagccggcuccaccccuugcaacggcgugaagggcuucaacugcuacuucccucugcagagcuacggcuuccagcccaccaacggcgugggcuaccagcccuaccgggugguggugcugagcuucgagcugcugcacgccccagccaccguguguggccccaagaagagcaccaaccuggugaagaacaagugcgugaacuucaacuucaacggccuuaccggcaccggcgugcugaccgagagcaacaagaaauuccugcccuuucagcaguucggccgggacaucgccgacaccaccgacgcugugcgggauccccagacccuggagauccuggacaucaccccuugcagcuucggcggcgugagcgugaucaccccaggcaccaacaccagcaaccagguggccgugcuguaccagggcgugaacugcaccgaggugcccguggccauccacgccgaccagcugacacccaccuggcgggucuacagcaccggcagcaacguguuccagacccgggccgguugccugaucggcgccgagcacgugaacaacagcuacgagugcgacauccccaucggcgccggcaucugugccagcuaccagacccagaccaauucaccccggagggcaaggagcguggccagccagagcaucaucgccuacaccaugagccugggcgccgagaacagcguggccuacagcaacaacagcaucgccauccccaccaacuucaccaucagcgugaccaccgagauucugcccgugagcaugaccaagaccagcguggacugcaccauguacaucugcggcgacagcaccgagugcagcaaccugcugcugcaguacggcagcuucugcacccagcugaaccgggcccugaccggcaucgccguggagcaggacaagaacacccaggagguguucgcccaggugaagcagaucuacaagaccccucccaucaaggacuucggcggcuucaacuucagccagauccugcccgaccccagcaagcccagcaagcggagcuucaucgaggaccugcuguucaacaaggugacccuagccgacgccggcuucaucaagcaguacggcgacugccucggcgacauagccgcccgggaccugaucugcgcccagaaguucaacggccugaccgugcugccuccccugcugaccgacgagaugaucgcccaguacaccagcgcccuguuagccggaaccaucaccagcggcuggacuuucggcgcuggagccgcucugcagauccccuucgccaugcagauggccuaccgguucaacggcaucggcgugacccagaacgugcuguacgagaaccagaagcugaucgccaaccaguucaacagcgccaucggcaagauccaggacagccugagcagcaccgcuagcgcccugggcaagcugcaggacguggugaaccagaacgcccaggcccugaacacccuggugaagcagcugagcagcaacuucggcgccaucagcagcgugcugaacgacauccugagccggcuggacaaggucgaggccgaggugcagaucgaccggcugaucacuggccggcugcagagccugcagaccuacgugacccagcagcugauccgggccgccgagauucgggccagcgccaaccuggccgccaccaagaugagcgagugcgugcugggccagagcaagcggguggacuucugcggcaagggcuaccaccugaugagcuuuccccagagcgcaccccacggagugguguuccugcacgugaccuacgugcccgcccaggagaagaacuucaccaccgccccagccaucugccacgacggcaaggcccacuuuccccgggagggcguguucgugagcaacggcacccacugguucgugacccagcggaacuucuacgagccccagaucaucaccaccgacaacaccuucgugagcggcaacugcgacguggugaucggcaucgugaacaacaccguguacgauccccugcagcccgagcuggacagcuucaaggaggagcuggacaaguacuucaagaaucacaccagccccgacguggaccugggcgacaucagcggcaucaacgccagcguggugaacauccagaaggagaucgaucggcugaacgagguggccaagaaccugaacgagagccugaucgaccugcaggagcugggcaaguacgagcaguacaucaaguggcccugguacaucuggcugggcuucaucgccggccugaucgccaucgugauggugaccaucaugcugugcugcaugaccagcugcugcagcugccugaagggcuguugcagcugcggcagcugcugcaaguucgacgaggacgacagcgagcccgugcugaagggcgugaagcugcacuacaccugaggacuaguuauaagacugacuagcccgaugggccucccaacgggcccuccuccccuccuugcaccgagauuaauaaaaaaaaaaaaaaaaaaaaaaaaaaaaaaaaaaaaaaaaaaaaaaaaaaaaaaaaaaaaaaaaaaaaaaaaaaaaaaaaaaaaaaaaaaaaaaaaaaaa

SEQ ID NO: 25441 - RNA, 4011 nt, Artificial Sequence
  SARS-CoV-2/Wuhan/WIV05/2019__EPI_ISL_402128 spike protein mRNA gc (1-1273)(L18F_T20N_P26S_D138Y_R190S_K417T_E484K_N501Y_D614G_H655Y _T1027I)
aggagaaagcuuaccauguucguguuccuggugcugcugccccuggugagcagccagugcgugaacuucaccaaccggacccagcugccaagcgccuacaccaacagcuucacccggggcgucuacuaccccgacaagguguuccggagcagcguccugcacagcacccaggaccuguuccugcccuucuucagcaacgugaccugguuccacgccauccacgugagcggcaccaacggcaccaagcgguucgacaaccccgugcugcccuucaacgacggcguguacuucgccagcaccgagaagagcaacaucauccggggcuggaucuucggcaccacccuggacagcaagacccagagccugcugaucgugaauaacgccaccaacguggugaucaaggugugcgaguuccaguucugcaacuaccccuuccugggcguguacuaccacaagaacaacaagagcuggauggagagcgaguuccggguguacagcagcgccaacaacugcaccuucgaguacgugagccagcccuuccugauggaccuggagggcaagcagggcaacuucaagaaccugagcgaguucguguucaagaacaucgacggcuacuucaagaucuacagcaagcacaccccaaucaaccuggugcgggaucugccccagggcuucucagcccuggagccccugguggaccugcccaucggcaucaacaucacccgguuccagacccugcuggcccugcaccggagcuaccugaccccaggcgacagcagcagcggguggacagcaggcgcggcugcuuacuacgugggcuaccugcagccccggaccuuccugcugaaguacaacgagaacggcaccaucaccgacgccguggacugcgcccuggacccucugagcgagaccaagugcacccugaagagcuucaccguggagaagggcaucuaccagaccagcaacuuccgggugcagcccaccgagagcaucgugcgguuccccaacaucaccaaccugugccccuucggcgagguguucaacgccacccgguucgccagcguguacgccuggaaccggaagcggaucagcaacugcguggccgacuacagcgugcuguacaacagcgccagcuucagcaccuucaagugcuacggcgugagccccaccaagcugaacgaccugugcuucaccaacguguacgccgacagcuucgugauccguggcgacgaggugcggcagaucgcacccggccagacaggcaccaucgccgacuacaacuacaagcugcccgacgacuucaccggcugcgugaucgccuggaacagcaacaaccucgacagcaaggugggcggcaacuacaacuaccuguaccggcuguuccggaagagcaaccugaagcccuucgagcgggacaucagcaccgagaucuaccaagccggcuccaccccuugcaacggcgugaagggcuucaacugcuacuucccucugcagagcuacggcuuccagcccaccuacggcgugggcuaccagcccuaccgggugguggugcugagcuucgagcugcugcacgccccagccaccguguguggccccaagaagagcaccaaccuggugaagaacaagugcgugaacuucaacuucaacggccuuaccggcaccggcgugcugaccgagagcaacaagaaauuccugcccuuucagcaguucggccgggacaucgccgacaccaccgacgcugugcgggauccccagacccuggagauccuggacaucaccccuugcagcuucggcggcgugagcgugaucaccccaggcaccaacaccagcaaccagguggccgugcuguaccagggcgugaacugcaccgaggugcccguggccauccacgccgaccagcugacacccaccuggcgggucuacagcaccggcagcaacguguuccagacccgggccgguugccugaucggcgccgaguacgugaacaacagcuacgagugcgacauccccaucggcgccggcaucugugccagcuaccagacccagaccaauucaccccggagggcaaggagcguggccagccagagcaucaucgccuacaccaugagccugggcgccgagaacagcguggccuacagcaacaacagcaucgccauccccaccaacuucaccaucagcgugaccaccgagauucugcccgugagcaugaccaagaccagcguggacugcaccauguacaucugcggcgacagcaccgagugcagcaaccugcugcugcaguacggcagcuucugcacccagcugaaccgggcccugaccggcaucgccguggagcaggacaagaacacccaggagguguucgcccaggugaagcagaucuacaagaccccucccaucaaggacuucggcggcuucaacuucagccagauccugcccgaccccagcaagcccagcaagcggagcuucaucgaggaccugcuguucaacaaggugacccuagccgacgccggcuucaucaagcaguacggcgacugccucggcgacauagccgcccgggaccugaucugcgcccagaaguucaacggccugaccgugcugccuccccugcugaccgacgagaugaucgcccaguacaccagcgcccuguuagccggaaccaucaccagcggcuggacuuucggcgcuggagccgcucugcagauccccuucgccaugcagauggccuaccgguucaacggcaucggcgugacccagaacgugcuguacgagaaccagaagcugaucgccaaccaguucaacagcgccaucggcaagauccaggacagccugagcagcaccgcuagcgcccugggcaagcugcaggacguggugaaccagaacgcccaggcccugaacacccuggugaagcagcugagcagcaacuucggcgccaucagcagcgugcugaacgacauccugagccggcuggacaaggucgaggccgaggugcagaucgaccggcugaucacuggccggcugcagagccugcagaccuacgugacccagcagcugauccgggccgccgagauucgggccagcgccaaccuggccgccaucaagaugagcgagugcgugcugggccagagcaagcggguggacuucugcggcaagggcuaccaccugaugagcuuuccccagagcgcaccccacggagugguguuccugcacgugaccuacgugcccgcccaggagaagaacuucaccaccgccccagccaucugccacgacggcaaggcccacuuuccccgggagggcguguucgugagcaacggcacccacugguucgugacccagcggaacuucuacgagccccagaucaucaccaccgacaacaccuucgugagcggcaacugcgacguggugaucggcaucgugaacaacaccguguacgauccccugcagcccgagcuggacagcuucaaggaggagcuggacaaguacuucaagaaucacaccagccccgacguggaccugggcgacaucagcggcaucaacgccagcguggugaacauccagaaggagaucgaucggcugaacgagguggccaagaaccugaacgagagccugaucgaccugcaggagcugggcaaguacgagcaguacaucaaguggcccugguacaucuggcugggcuucaucgccggccugaucgccaucgugauggugaccaucaugcugugcugcaugaccagcugcugcagcugccugaagggcuguugcagcugcggcagcugcugcaaguucgacgaggacgacagcgagcccgugcugaagggcgugaagcugcacuacaccugaggacuaguuauaagacugacuagcccgaugggccucccaacgggcccuccuccccuccuugcaccgagauuaauaaaaaaaaaaaaaaaaaaaaaaaaaaaaaaaaaaaaaaaaaaaaaaaaaaaaaaaaaaaaaaaaaaaaaaaaaaaaaaaaaaaaaaaaaaaaaaaaaaaa

SEQ ID NO: 25442 - RNA, 4011 nt, Artificial Sequence
  SARS-CoV-2/Wuhan/WIV05/2019__EPI_ISL_402128 spike protein mRNA gc (1-1273)(S13I_W152C_L452R_D614G)
aggagaaagcuuaccauguucguguuccuggugcugcugccccuggugagcauccagugcgugaaccugaccacccggacccagcugccaccagccuacaccaacagcuucacccggggcgucuacuaccccgacaagguguuccggagcagcguccugcacagcacccaggaccuguuccugcccuucuucagcaacgugaccugguuccacgccauccacgugagcggcaccaacggcaccaagcgguucgacaaccccgugcugcccuucaacgacggcguguacuucgccagcaccgagaagagcaacaucauccggggcuggaucuucggcaccacccuggacagcaagacccagagccugcugaucgugaauaacgccaccaacguggugaucaaggugugcgaguuccaguucugcaacgaccccuuccugggcguguacuaccacaagaacaacaagagcugcauggagagcgaguuccggguguacagcagcgccaacaacugcaccuucgaguacgugagccagcccuuccugauggaccuggagggcaagcagggcaacuucaagaaccugcgggaguucguguucaagaacaucgacggcuacuucaagaucuacagcaagcacaccccaaucaaccuggugcgggaucugccccagggcuucucagcccuggagccccugguggaccugcccaucggcaucaacaucacccgguuccagacccugcuggcccugcaccggagcuaccugaccccaggcgacagcagcagcggguggacagcaggcgcggcugcuuacuacgugggcuaccugcagccccggaccuuccugcugaaguacaacgagaacggcaccaucaccgacgccguggacugcgcccuggacccucugagcgagaccaagugcacccugaagagcuucaccguggagaagggcaucuaccagaccagcaacuuccgggugcagcccaccgagagcaucgugcgguuccccaacaucaccaaccugugccccuucggcgagguguucaacgccacccgguucgccagcguguacgccuggaaccggaagcggaucagcaacugcguggccgacuacagcgugcuguacaacagcgccagcuucagcaccuucaagugcuacggcgugagccccaccaagcugaacgaccugugcuucaccaacguguacgccgacagcuucgugauccguggcgacgaggugcggcagaucgcacccggccagacaggcaagaucgccgacuacaacuacaagcugcccgacgacuucaccggcugcgugaucgccuggaacagcaacaaccucgacagcaaggugggcggcaacuacaacuaccgcuaccggcuguuccggaagagcaaccugaagcccuucgagcgggacaucagcaccgagaucuaccaagccggcuccaccccuugcaacggcguggagggcuucaacugcuacuucccucugcagagcuacggcuuccagcccaccaacggcgugggcuaccagcccuaccgggugguggugcugagcuucgagcugcugcacgccccagccaccguguguggccccaagaagagcaccaaccuggugaagaacaagugcgugaacuucaacuucaacggccuuaccggcaccggcgugcugaccgagagcaacaagaaauuccugcccuuucagcaguucggccgggacaucgccgacaccaccgacgcugugcgggauccccagacccuggagauccuggacaucaccccuugcagcuucggcggcgugagcgugaucaccccaggcaccaacaccagcaaccagguggccgugcuguaccagggcgugaacugcaccgaggugcccguggccauccacgccgaccagcugacacccaccuggcgggucuacagcaccggcagcaacguguuccagacccgggccgguugccugaucggcgccgagcacgugaacaacagcuacgagugcgacauccccaucggcgccggcaucugugccagcuaccagacccagaccaauucaccccggagggcaaggagcguggccagccagagcaucaucgccuacaccaugagccugggcgccgagaacagcguggccuacagcaacaacagcaucgccauccccaccaacuucaccaucagcgugaccaccgagauucugcccgugagcaugaccaagaccagcguggacugcaccauguacaucugcggcgacagcaccgagugcagcaaccugcugcugcaguacggcagcuucugcacccagcugaaccgggcccugaccggcaucgccguggagcaggacaagaacacccaggagguguucgcccaggugaagcagaucuacaagaccccucccaucaaggacuucggcggcuucaacuucagccagauccugcccgaccccagcaagcccagcaagcggagcuucaucgaggaccugcuguucaacaaggugacccuagccgacgccggcuucaucaagcaguacggcgacugccucggcgacauagccgcccgggaccugaucugcgcccagaaguucaacggccugaccgugcugccuccccugcugaccgacgagaugaucgcccaguacaccagcgcccuguuagccggaaccaucaccagcggcuggacuuucggcgcuggagccgcucugcagauccccuucgccaugcagauggccuaccgguucaacggcaucggcgugacccagaacgugcuguacgagaaccagaagcugaucgccaaccaguucaacagcgccaucggcaagauccaggacagccugagcagcaccgcuagcgcccugggcaagcugcaggacguggugaaccagaacgcccaggcccugaacacccuggugaagcagcugagcagcaacuucggcgccaucagcagcgugcugaacgacauccugagccggcuggacaaggucgaggccgaggugcagaucgaccggcugaucacuggccggcugcagagccugcagaccuacgugacccagcagcugauccgggccgccgagauucgggccagcgccaaccuggccgccaccaagaugagcgagugcgugcugggccagagcaagcggguggacuucugcggcaagggcuaccaccugaugagcuuuccccagagcgcaccccacggagugguguuccugcacgugaccuacgugcccgcccaggagaagaacuucaccaccgccccagccaucugccacgacggcaaggcccacuuuccccgggagggcguguucgugagcaacggcacccacugguucgugacccagcggaacuucuacgagccccagaucaucaccaccgacaacaccuucgugagcggcaacugcgacguggugaucggcaucgugaacaacaccguguacgauccccugcagcccgagcuggacagcuucaaggaggagcuggacaaguacuucaagaaucacaccagccccgacguggaccugggcgacaucagcggcaucaacgccagcguggugaacauccagaaggagaucgaucggcugaacgagguggccaagaaccugaacgagagccugaucgaccugcaggagcugggcaaguacgagcaguacaucaaguggcccugguacaucuggcugggcuucaucgccggccugaucgccaucgugauggugaccaucaugcugugcugcaugaccagcugcugcagcugccugaagggcuguugcagcugcggcagcugcugcaaguucgacgaggacgacagcgagcccgugcugaagggcgugaagcugcacuacaccugaggacuaguuauaagacugacuagcccgaugggccucccaacgggcccuccuccccuccuugcaccgagauuaauaaaaaaaaaaaaaaaaaaaaaaaaaaaaaaaaaaaaaaaaaaaaaaaaaaaaaaaaaaaaaaaaaaaaaaaaaaaaaaaaaaaaaaaaaaaaaaaaaaaa

SEQ ID NO: 25443 - RNA, 4011 nt, Artificial Sequence
  SARS-CoV-2/Wuhan/WIV05/2019__EPI_ISL_402128 spike protein mRNA gc (1-1273)
aggagaaagcuuaccauguucguguuccuggugcugcugccccuggugagcagccagugcgugaaccugaccacccggacccagcugcccccugccuacaccaacagcuucacccggggcguguacuaccccgacaagguguuccggagcagcgugcugcacagcacccaggaccuguuccugcccuucuucagcaacgugaccugguuccacgccauccacgugagcggcaccaacggcaccaagcgguucgacaacccagugcugcccuucaacgacggcguguacuucgccagcaccgagaagucaaacaucauccggggcuggaucuucggcaccacccuggacagcaagacacagagccugcugaucgugaacaacgccaccaacguggugaucaaggugugcgaguuucaguucugcaacgaccccuuccugggcguguacuaccacaagaacaacaagagcuggauggagagcgaguuccgggucuacagcagcgcuaacaauugcaccuucgaguacgugagccagcccuuccugauggaccucgagggcaagcagggcaacuucaagaaccugcgggaguucguguucaagaacaucgauggcuacuucaagaucuacagcaagcacacccccaucaaccuggugcgggaccugccccagggauucagcgcccuggagccucugguggaccugcccaucggcaucaacaucaccagguuccagacccugcuggcccugcaccggagcuaccugacccccggcgacagcagcagcggcuggaccgccggcgccgccgcauacuacgugggcuaccugcagccacggaccuuccugcugaaguacaacgagaacggcaccaucaccgacgccguggacugcgcccuggacccccugagcgagaccaagugcacccuaaagagcuucaccguggagaagggcaucuaccagaccagcaacuuccgggugcagcccacugagagcaucgugcgguuccccaacauuaccaaccugugucccuucggcgagguguucaacgccacccgguucgccagcguguacgccuggaaccggaagcggaucagcaacugcguggccgacuacagcgugcuguacaacagcgccagcuucagcaccuucaagugcuacggcgugagcccuaccaagcugaacgaccugugcuucaccaacguguacgcugacagcuucgugauccggggcgacgaggugcggcagaucgcccccggccagaccggcaagaucgccgacuacaacuacaagcugcccgacgacuucaccggcugcgugaucgccuggaacagcaacaaccuggacagcaaggugggcggcaacuacaacuaccuguaccggcuguuccguaagagcaaccugaagccauucgagcgggacaucagcaccgagaucuaccaggccggcagcacccccugcaacgguguggagggcuuuaacugcuacuucccccugcagagcuacggcuuccagcccaccaacggcgugggcuaccagcccuaccgggugguggugcugagcuucgagcugcugcacgcccccgccaccgugugcggcccuaaaaagagcaccaaccuggugaagaacaagugcgugaacuucaauuucaacggccugaccggcaccggcgugcugaccgagagcaacaagaaguuccugcccuuccagcaguucggccgggauaucgccgacaccaccgacgcagugcgggacccccagacccuggagauccuggacaucaccccaugcagcuucggcggcgugagcgucaucacccccggcacaaacaccagcaaccagguggccgugcuguaccaggacgugaacugcaccgaggugcccguggccauccacgccgaccagcugacccccaccuggcggguguacagcaccggaagcaacguguuccagacccgggccggcugccugaucggcgccgagcacgugaacaacuccuacgagugcgacauccccaucggcgcuggcaucugcgccagcuaccagacccagaccaacagcccccggcgggcccggagcguggccagccagagcaucaucgccuacaccaugagcuuaggcgccgagaacagcguggccuacagcaacaacagcaucgcgaucccuaccaacuucaccaucagcgugaccaccgagauacugcccgugagcaugaccaagaccagcguggacuguaccauguacaucugcggcgacagcaccgagugcagcaaccugcugcugcaguacggcagcuucugcacccagcugaaccgggcccugaccggcaucgccguggagcaggacaagaacacccaagagguguucgcccaggugaagcagaucuacaagacucccccaaucaaggacuucggcggcuucaacuucagccagauccugcccgaccccagcaagcccagcaagcggagcuucaucgaggaccugcuguucaacaaggugacccuggccgacgccggcuucaucaagcaguacggcgauugccugggcgacaucgccgcucgggaccugaucugcgcccagaaguucaacgggcugaccgugcugcccccucugcugaccgacgagaugaucgcccaguacaccagcgcccugcuugccggcaccaucaccagcggcuggaccuucggcgccggcgcagcccugcagauccccuucgccaugcagauggccuaccgguucaacggcaucggcgugacccagaacgugcuguacgagaaccagaagcugaucgccaaccaguucaacagcgccaucggcaagauccaggacagccugagcagcaccgccagcgcccugggcaagcugcaggacguggugaaccagaacgcucaggcccugaacacccuggugaagcagcugagcagcaacuucggcgccaucagcucagugcugaaugacauccugagcaggcuggacaagguggaggccgaggugcagaucgaccggcugaucaccggccggcugcagagccugcagaccuacgugacccagcagcugauccgggccgccgagauccgggccagcgccaaccuggcagccaccaagaugagcgagugcgugcugggccagagcaagcggguggacuuuugcggcaagggcuaccaccugaugagcuucccccagagcgccccacacggcgugguguuccuccacgucacauacgugcccgcccaggagaagaacuucaccaccgcccccgccauuugccacgacggcaaggcucacuucccccgggagggcguguucgugagcaacggaacccacugguucgugacccagcggaacuucuacgagccccagaucaucaccaccgacaacaccuucgugagcggcaacugcgacguggugaucggcaucgugaacaacaccguguacgacccccugcagccugagcuggacagcuucaaggaggagcuggacaaguacuucaagaaccacaccagccccgauguggaccugggcgacaucagcggcaucaacgccagcguggugaacauccagaaggagaucgaccggcugaacgagguggccaagaaccugaacgagagccugaucgaccugcaggagcugggcaaguacgagcaguacaucaaguggcccugguacaucuggcugggcuucaucgccggccugaucgccaucgugauggugaccaucaugcugugcugcaugaccagcugcuguagcugccugaagggcugcugcagcugcggcagcugcugcaaguucgacgaggacgacagcgagccagugcugaagggcgugaagcugcacuacaccugaggacuaguuauaagacugacuagcccgaugggccucccaacgggcccuccuccccuccuugcaccgagauuaauaaaaaaaaaaaaaaaaaaaaaaaaaaaaaaaaaaaaaaaaaaaaaaaaaaaaaaaaaaaaaaaaaaaaaaaaaaaaaaaaaaaaaaaaaaaaaaaaaaaa

SEQ ID NO: 25444 - RNA, 4011 nt, Artificial Sequence
  SARS-CoV-2/Wuhan/WIV05/2019__EPI_ISL_402128 spike protein mRNA gc (1-1273)(D614G)
aggagaaagcuuaccauguucguguuccuggugcugcugccccuggugagcagccagugcgugaaccugaccacccggacccagcugcccccugccuacaccaacagcuucacccggggcguguacuaccccgacaagguguuccggagcagcgugcugcacagcacccaggaccuguuccugcccuucuucagcaacgugaccugguuccacgccauccacgugagcggcaccaacggcaccaagcgguucgacaacccagugcugcccuucaacgacggcguguacuucgccagcaccgagaagucaaacaucauccggggcuggaucuucggcaccacccuggacagcaagacacagagccugcugaucgugaacaacgccaccaacguggugaucaaggugugcgaguuucaguucugcaacgaccccuuccugggcguguacuaccacaagaacaacaagagcuggauggagagcgaguuccgggucuacagcagcgcuaacaauugcaccuucgaguacgugagccagcccuuccugauggaccucgagggcaagcagggcaacuucaagaaccugcgggaguucguguucaagaacaucgauggcuacuucaagaucuacagcaagcacacccccaucaaccuggugcgggaccugccccagggauucagcgcccuggagccucugguggaccugcccaucggcaucaacaucaccagguuccagacccugcuggcccugcaccggagcuaccugacccccggcgacagcagcagcggcuggaccgccggcgccgccgcauacuacgugggcuaccugcagccacggaccuuccugcugaaguacaacgagaacggcaccaucaccgacgccguggacugcgcccuggacccccugagcgagaccaagugcacccuaaagagcuucaccguggagaagggcaucuaccagaccagcaacuuccgggugcagcccacugagagcaucgugcgguuccccaacauuaccaaccugugucccuucggcgagguguucaacgccacccgguucgccagcguguacgccuggaaccggaagcggaucagcaacugcguggccgacuacagcgugcuguacaacagcgccagcuucagcaccuucaagugcuacggcgugagcccuaccaagcugaacgaccugugcuucaccaacguguacgcugacagcuucgugauccggggcgacgaggugcggcagaucgcccccggccagaccggcaagaucgccgacuacaacuacaagcugcccgacgacuucaccggcugcgugaucgccuggaacagcaacaaccuggacagcaaggugggcggcaacuacaacuaccuguaccggcuguuccguaagagcaaccugaagccauucgagcgggacaucagcaccgagaucuaccaggccggcagcacccccugcaacgguguggagggcuuuaacugcuacuucccccugcagagcuacggcuuccagcccaccaacggcgugggcuaccagcccuaccgggugguggugcugagcuucgagcugcugcacgcccccgccaccgugugcggcccuaaaaagagcaccaaccuggugaagaacaagugcgugaacuucaauuucaacggccugaccggcaccggcgugcugaccgagagcaacaagaaguuccugcccuuccagcaguucggccgggauaucgccgacaccaccgacgcagugcgggacccccagacccuggagauccuggacaucaccccaugcagcuucggcggcgugagcgucaucacccccggcacaaacaccagcaaccagguggccgugcuguaccagggagugaacugcaccgaggugcccguggccauccacgccgaccagcugacccccaccuggcggguguacagcaccggcagcaacguguuccagacccgggccggcugccugaucggcgccgagcacgugaacaacuccuacgagugcgacauccccaucggcgcuggcaucugcgccagcuaccagacccagaccaacagcccccggcgggcccggagcguggccagccagagcaucaucgccuacaccaugagcuuaggcgccgagaacagcguggccuacagcaacaacagcaucgcgaucccuaccaacuucaccaucagcgugaccaccgagauacugcccgugagcaugaccaagaccagcguggacuguaccauguacaucugcggcgacagcaccgagugcagcaaccugcugcugcaguacggcagcuucugcacccagcugaaccgggcccugaccggcaucgccguggagcaggacaagaacacccaagagguguucgcccaggugaagcagaucuacaagacucccccaaucaaggacuucggcggcuucaacuucagccagauccugcccgaccccagcaagcccagcaagcggagcuucaucgaggaccugcuguucaacaaggugacccuggccgacgccggcuucaucaagcaguacggcgacugccugggggauaucgccgcucgggaccugaucugcgcccagaaguucaacggccugaccgugcugcccccucugcugaccgacgagaugaucgcccaguacaccagcgcccugcuugccggcaccaucaccagcggcuggaccuucggcgccggcgcagcccugcagauccccuucgccaugcagauggccuaccgguucaacggcaucggcgugacccagaacgugcuguacgagaaccagaagcugaucgccaaccaguucaacagcgccaucggcaagauccaggacagccugagcagcaccgccagcgcccugggcaagcugcaggacguggugaaccagaacgcucaggcccugaacacccuggugaagcagcugagcagcaacuucggcgccaucagcucagugcugaaugacauccugagcaggcuggacaagguggaggccgaggugcagaucgaccggcugaucaccggccggcugcagagccugcagaccuacgugacccagcagcugauccgggccgccgagauccgggccagcgccaaccuggcagccaccaagaugagcgagugcgugcugggccagagcaagcggguggacuuuugcggcaagggcuaccaccugaugagcuucccccagagcgccccacacggcgugguguuccuccacgucacauacgugcccgcccaggagaagaacuucaccaccgcccccgccauuugccacgacggcaaggcucacuucccccgggagggaguguucgugagcaacggcacccacugguucgugacccagcggaacuucuacgagccccagaucaucaccaccgacaacaccuucgugagcggcaacugcgacguggugaucggcaucgugaacaacaccguguacgacccccugcagccugagcuggacagcuucaaggaggagcuggacaaguacuucaagaaccacaccagccccgacguggaucugggcgacaucagcggcaucaacgccagcguggugaacauccagaaggagaucgaccggcugaacgagguggccaagaaccugaacgagagccugaucgaccugcaggagcugggcaaguacgagcaguacaucaaguggcccugguacaucuggcugggcuucaucgccggccugaucgccaucgugauggugaccaucaugcugugcugcaugaccagcugcuguagcugccugaagggcugcugcagcugcggcagcugcugcaaguucgacgaggacgacagcgagccagugcugaagggcgugaagcugcacuacaccugaggacuaguuauaagacugacuagcccgaugggccucccaacgggcccuccuccccuccuugcaccgagauuaauaaaaaaaaaaaaaaaaaaaaaaaaaaaaaaaaaaaaaaaaaaaaaaaaaaaaaaaaaaaaaaaaaaaaaaaaaaaaaaaaaaaaaaaaaaaaaaaaaaaa

SEQ ID NO: 25445 - RNA, 4011 nt, Artificial Sequence
  SARS-CoV-2/Wuhan/WIV05/2019__EPI_ISL_402128 spike protein mRNA gc (1-1273)(A222V_D614G)
aggagaaagcuuaccauguucguguuccuggugcugcugccccuggugagcagccagugcgugaaccugaccacccggacccagcugcccccugccuacaccaacagcuucacccggggcguguacuaccccgacaagguguuccggagcagcgugcugcacagcacccaggaccuguuccugcccuucuucagcaacgugaccugguuccacgccauccacgugagcggcaccaacggcaccaagcgguucgacaacccagugcugcccuucaacgacggcguguacuucgccagcaccgagaagucaaacaucauccggggcuggaucuucggcaccacccuggacagcaagacacagagccugcugaucgugaacaacgccaccaacguggugaucaaggugugcgaguuucaguucugcaacgaccccuuccugggcguguacuaccacaagaacaacaagagcuggauggagagcgaguuccgggucuacagcagcgcuaacaauugcaccuucgaguacgugagccagcccuuccugauggaccucgagggcaagcagggcaacuucaagaaccugcgggaguucguguucaagaacaucgauggcuacuucaagaucuacagcaagcacacccccaucaaccuggugcgggaccugccccagggauucagcgugcuggagccucugguggaccugcccaucggcaucaacaucaccagguuccagacccugcuggcccugcaccggagcuaccugacccccggcgacagcagcagcggcuggaccgccggcgccgccgccuacuacgugggcuaccugcagccacggaccuuccugcugaaguacaacgagaacggcaccaucaccgacgcaguggacugcgcccuggacccccugagcgagaccaagugcacccuaaagagcuucaccguggagaagggcaucuaccagaccagcaacuuccgggugcagcccacugagagcaucgugcgguuccccaacauuaccaaccugugucccuucggcgagguguucaacgccacccgguucgccagcguguacgccuggaaccggaagcggaucagcaacugcguggccgacuacagcgugcuguacaacagcgccagcuucagcaccuucaagugcuacggcgugagcccuaccaagcugaacgaccugugcuucaccaacguguacgccgacagcuucgugauccggggcgacgaggugcggcagaucgcucccggccagaccggcaagaucgccgacuacaacuacaagcugcccgacgacuucaccggcugcgugaucgccuggaacagcaacaaccuggacagcaaggugggcggcaacuacaacuaccuguaccggcuguuccguaagagcaaccugaagccauucgagcgggacaucagcaccgagaucuaccaggccggcagcacccccugcaacgguguggagggcuuuaacugcuacuucccccugcagagcuacggcuuccagcccaccaacggcgugggcuaccagcccuaccgggugguggugcugagcuucgagcugcugcacgcccccgccaccgugugcggcccuaaaaagagcaccaaccuggugaagaacaagugcgugaacuucaauuucaacggccugaccggcaccggcgugcugaccgagagcaacaagaaguuccugcccuuccagcaguucggccgggauaucgccgacaccaccgacgccgugcgggacccccagacccuggagauccuggacaucaccccaugcagcuucggcggcgucagcgugaucacccccggcacaaacaccagcaaccagguggcagugcuguaccagggagugaacugcaccgaggugcccguggccauccacgccgaccagcugacccccaccuggcggguguacagcaccggcagcaacguguuccagacccgggccggcugccugaucggcgccgagcacgugaacaacuccuacgagugcgacauccccaucggcgccggcaucugcgcuagcuaccagacccagaccaacagcccccggcgggcccggagcguggccagccagagcaucaucgccuacaccaugagcuuaggcgccgagaacagcguggccuacagcaacaacagcaucgccaucccuaccaacuucaccaucagcgugaccaccgagauacugcccgugagcaugaccaagaccagcguggacuguaccauguacaucugcggcgacagcaccgagugcagcaaccugcugcugcaguacggcagcuucugcacccagcugaaccgggcgcugaccggcaucgccguggagcaggacaagaacacccaagagguguucgcccaggugaagcagaucuacaagacucccccaaucaaggacuucggcggcuucaacuucagccagauccugcccgaccccagcaagcccagcaagcggagcuucaucgaggaccugcuguucaacaaggugacccuggccgacgccggcuucaucaagcaguacggcgacugccugggggauaucgccgcccgggaccugaucugcgcucagaaguucaacggccugaccgugcugcccccucugcugaccgacgagaugaucgcccaguacaccagcgcccugcuugccggcaccaucaccagcggcuggaccuucggcgccggcgccgcacugcagauccccuucgccaugcagauggccuaccgguucaacggcaucggcgugacccagaacgugcuguacgagaaccagaagcugaucgccaaccaguucaacagcgccaucggcaagauccaggacagccugagcagcaccgccagcgcccugggcaagcugcaggacguggugaaccagaacgcccaggcucugaacacccuggugaagcagcugagcagcaacuucggcgccaucagcucagugcugaaugacauccugagcaggcuggacaagguggaggccgaggugcagaucgaccggcugaucaccggccggcugcagagccugcagaccuacgugacccagcagcugauccgggccgccgagauccgggccagcgccaaccuggccgcaaccaagaugagcgagugcgugcugggccagagcaagcggguggacuuuugcggcaagggcuaccaccugaugagcuucccccagagcgccccacacggcguggucuuccuccacgugacauacgugcccgcccaggagaagaacuucaccaccgcccccgccauuugccacgacggcaaggcccacuucccccgggagggaguguucgugagcaacggcacccacugguucgugacccagcggaacuucuacgagccccagaucaucaccaccgacaacaccuucgugagcggcaacugcgacguggugaucggcaucgugaacaacaccguguacgacccccugcagccugagcuggacagcuucaaggaggagcuggacaaguacuucaagaaccacaccagccccgacguggaucugggcgacaucagcggcaucaacgcuagcguggugaacauccagaaggagaucgaccggcugaacgagguggccaagaaccugaacgagagccugaucgaccugcaggagcugggcaaguacgagcaguacaucaaguggcccugguacaucuggcugggcuucaucgccggccugaucgccaucgugauggugaccaucaugcugugcugcaugaccagcugcuguagcugccugaagggcugcugcagcugcggcagcugcugcaaguucgacgaggacgacagcgagccagugcugaagggcgugaagcugcacuacaccugaggacuaguuauaagacugacuagcccgaugggccucccaacgggcccuccuccccuccuugcaccgagauuaauaaaaaaaaaaaaaaaaaaaaaaaaaaaaaaaaaaaaaaaaaaaaaaaaaaaaaaaaaaaaaaaaaaaaaaaaaaaaaaaaaaaaaaaaaaaaaaaaaaaa

SEQ ID NO: 25446 - RNA, 4011 nt, Artificial Sequence
  SARS-CoV-2/Wuhan/WIV05/2019__EPI_ISL_402128 spike protein mRNA gc (1-1273)(N439K_D614G)
aggagaaagcuuaccauguucguguuccuggugcugcugccccuggugagcagccagugcgugaaccugaccacccggacccagcugcccccugccuacaccaacagcuucacccggggcguguacuaccccgacaagguguuccggagcagcgugcugcacagcacccaggaccuguuccugcccuucuucagcaacgugaccugguuccacgccauccacgugagcggcaccaacggcaccaagcgguucgacaacccagugcugcccuucaacgacggcguguacuucgccagcaccgagaagucaaacaucauccggggcuggaucuucggcaccacccuggacagcaagacacagagccugcugaucgugaacaacgccaccaacguggugaucaaggugugcgaguuucaguucugcaacgaccccuuccugggcguguacuaccacaagaacaacaagagcuggauggagagcgaguuccgggucuacagcagcgcuaacaauugcaccuucgaguacgugagccagcccuuccugauggaccucgagggcaagcagggcaacuucaagaaccugcgggaguucguguucaagaacaucgauggcuacuucaagaucuacagcaagcacacccccaucaaccuggugcgggaccugccccagggauucagcgcccuggagccucugguggaccugcccaucggcaucaacaucaccagguuccagacccugcuggcccugcaccggagcuaccugacccccggcgacagcagcagcggcuggaccgccggcgccgccgcauacuacgugggcuaccugcagccacggaccuuccugcugaaguacaacgagaacggcaccaucaccgacgccguggacugcgcccuggacccccugagcgagaccaagugcacccuaaagagcuucaccguggagaagggcaucuaccagaccagcaacuuccgggugcagcccacugagagcaucgugcgguuccccaacauuaccaaccugugucccuucggcgagguguucaacgccacccgguucgccagcguguacgccuggaaccggaagcggaucagcaacugcguggccgacuacagcgugcuguacaacagcgccagcuucagcaccuucaagugcuacggcgugagcccuaccaagcugaacgaccugugcuucaccaacguguacgcugacagcuucgugauccggggcgacgaggugcggcagaucgcccccggccagaccggcaagaucgccgacuacaacuacaagcugcccgacgacuucaccggcugcgugaucgccuggaacagcaagaaccuggacagcaaggugggcggcaacuacaacuaccuguaccggcuguuccguaagagcaaccugaagccauucgagcgggacaucagcaccgagaucuaccaggccggcagcacccccugcaacgguguggagggcuuuaacugcuacuucccccugcagagcuacggcuuccagcccaccaacggcgugggcuaccagcccuaccgggugguggugcugagcuucgagcugcugcacgcccccgccaccgugugcggcccuaaaaagagcaccaaccuggugaagaacaagugcgugaacuucaacuucaauggccugaccggcaccggcgugcugaccgagagcaacaagaaguuccugcccuuccagcaguucggccgggauaucgccgacaccaccgacgcagugcgggacccccagacccuggagauccuggacaucaccccaugcagcuucggcggcgugagcgucaucacccccggcacaaacaccagcaaccagguggccgugcuguaccagggagugaacugcaccgaggugcccguggccauccacgccgaccagcugacccccaccuggcggguguacagcaccggcagcaacguguuccagacccgggccggcugccugaucggcgccgagcacgugaacaacuccuacgagugcgacauccccaucggcgcuggcaucugcgccagcuaccagacccagaccaacagcccccggcgggcccggagcguggccagccagagcaucaucgccuacaccaugagcuuaggcgccgagaacagcguggccuacagcaacaacagcaucgcgaucccuaccaacuucaccaucagcgugaccaccgagauacugcccgugagcaugaccaagaccagcguggacuguaccauguacaucugcggcgacagcaccgagugcagcaaccugcugcugcaguacggcagcuucugcacccagcugaaccgggcccugaccggcaucgccguggagcaggacaagaacacccaagagguguucgcccaggugaagcagaucuacaagacucccccaaucaaggacuucggcggcuucaacuucagccagauccugcccgaccccagcaagcccagcaagcggagcuucaucgaggaccugcuguucaacaaggugacccuggccgacgccggcuucaucaagcaguacggcgacugccugggggauaucgccgcucgggaccugaucugcgcccagaaguucaacggccugaccgugcugcccccucugcugaccgacgagaugaucgcccaguacaccagcgcccugcuugccggcaccaucaccagcggcuggaccuucggcgccggcgcagcccugcagauccccuucgccaugcagauggccuaccgguucaacggcaucggcgugacccagaacgugcuguacgagaaccagaagcugaucgccaaccaguucaacagcgccaucggcaagauccaggacagccugagcagcaccgccagcgcccugggcaagcugcaggacguggugaaccagaacgcucaggcccugaacacccuggugaagcagcugagcagcaacuucggcgccaucagcucagugcugaacgacauccugagcaggcuggacaagguggaggccgaggugcagaucgaccggcugaucaccggccggcugcagagccugcagaccuacgugacccagcagcugauccgggccgccgagauccgggccagcgccaaucuggcagccaccaagaugagcgagugcgugcugggccagagcaagcggguggacuuuugcggcaagggcuaccaccugaugagcuucccccagagcgccccacacggcgugguguuccuccacgucacauacgugcccgcccaggagaagaacuucaccaccgcccccgccauuugccacgacggcaaggcucacuucccccgggagggaguguucgugagcaacggcacccacugguucgugacccagcggaacuucuacgagccccagaucaucaccaccgacaacaccuucgugagcggcaacugcgacguggugaucggcaucgugaacaacaccguguacgacccccugcagccugagcuggacagcuucaaggaggagcuggacaaguacuucaagaaccacaccagccccgacguggaucugggcgacaucagcggcaucaacgccagcguggugaacauccagaaggagaucgaccggcugaacgagguggccaagaaccugaacgagagccugaucgaccugcaggagcugggcaaguacgagcaguacaucaaguggcccugguacaucuggcugggcuucaucgccggccugaucgccaucgugauggugaccaucaugcugugcugcaugaccagcugcuguagcugccugaagggcugcugcagcugcggcagcugcugcaaguucgacgaggacgacagcgagccagugcugaagggcgugaagcugcacuacaccugaggacuaguuauaagacugacuagcccgaugggccucccaacgggcccuccuccccuccuugcaccgagauuaauaaaaaaaaaaaaaaaaaaaaaaaaaaaaaaaaaaaaaaaaaaaaaaaaaaaaaaaaaaaaaaaaaaaaaaaaaaaaaaaaaaaaaaaaaaaaaaaaaaaa

SEQ ID NO: 25447 - RNA, 4011 nt, Artificial Sequence
  SARS-CoV-2/Wuhan/WIV05/2019__EPI_ISL_402128 spike protein mRNA gc (1-1273)(S477N_D614G)
aggagaaagcuuaccauguucguguuccuggugcugcugccccuggugagcagccagugcgugaaccugaccacccggacccagcugcccccugccuacaccaacagcuucacccggggcguguacuaccccgacaagguguuccggagcagcgugcugcacagcacccaggaccuguuccugcccuucuucagcaacgugaccugguuccacgccauccacgugagcggcaccaacggcaccaagcgguucgacaacccagugcugcccuucaacgacggcguguacuucgccagcaccgagaagucaaacaucauccggggcuggaucuucggcaccacccuggacagcaagacacagagccugcugaucgugaacaacgccaccaacguggugaucaaggugugcgaguuucaguucugcaacgaccccuuccugggcguguacuaccacaagaacaacaagagcuggauggagagcgaguuccgggucuacagcagcgcuaacaauugcaccuucgaguacgugagccagcccuuccugauggaccucgagggcaagcagggcaacuucaagaaccugcgggaguucguguucaagaacaucgauggcuacuucaagaucuacagcaagcacacccccaucaaccuggugcgggaccugccccagggauucagcgcccuggagccucugguggaccugcccaucggcaucaacaucaccagguuccagacccugcuggcccugcaccggagcuaccugacccccggcgacagcagcagcggcuggaccgccggcgccgccgcauacuacgugggcuaccugcagccacggaccuuccugcugaaguacaacgagaacggcaccaucaccgacgccguggacugcgcccuggacccccugagcgagaccaagugcacccuaaagagcuucaccguggagaagggcaucuaccagaccagcaacuuccgggugcagcccacugagagcaucgugcgguuccccaacauuaccaaccugugucccuucggcgagguguucaacgccacccgguucgccagcguguacgccuggaaccggaagcggaucagcaacugcguggccgacuacagcgugcuguacaacagcgccagcuucagcaccuucaagugcuacggcgugagcccuaccaagcugaacgaccugugcuucaccaacguguacgcugacagcuucgugauccggggcgacgaggugcggcagaucgcccccggccagaccggcaagaucgccgacuacaacuacaagcugcccgacgacuucaccggcugcgugaucgccuggaacagcaacaaccuggacagcaaggugggcggcaacuacaacuaccuguaccggcuguuccguaagagcaaccugaagccauucgagcgggacaucagcaccgagaucuaccaggccggcaacacccccugcaacgguguggagggcuuuaacugcuacuucccccugcagagcuacggcuuccagcccaccaacggcgugggcuaccagcccuaccgggugguggugcugagcuucgagcugcugcacgcccccgccaccgugugcggcccuaaaaagagcaccaaccuggugaagaacaagugcgugaauuucaacuucaacggccugaccggcaccggcgugcugaccgagagcaacaagaaguuccugcccuuccagcaguucggccgggauaucgccgacaccaccgacgcagugcgggacccccagacccuggagauccuggacaucaccccaugcagcuucggcggcgugagcgucaucacccccggcacaaacaccagcaaccagguggccgugcuguaccagggagugaacugcaccgaggugcccguggccauccacgccgaccagcugacccccaccuggcggguguacagcaccggcagcaacguguuccagacccgggccggcugccugaucggcgccgagcacgugaacaacagcuacgagugcgacauccccaucggcgcuggcaucugcgccuccuaccagacccagaccaacagcccccggcgggcccggagcguggccagccagagcaucaucgccuacaccaugagcuuaggcgccgagaacagcguggccuacagcaacaacagcaucgcgaucccuaccaacuucaccaucagcgugaccaccgagauacugcccgugagcaugaccaagaccagcguggacuguaccauguacaucugcggcgacagcaccgagugcagcaaccugcugcugcaguacggcagcuucugcacccagcugaaccgggcccugaccggcaucgccguggagcaggacaagaacacccaagagguguucgcccaggugaagcagaucuacaagacucccccaaucaaggacuucggcggcuucaacuucagccagauccugcccgaccccagcaagcccagcaagcggagcuucaucgaggaccugcuguucaacaaggugacccuggccgacgccggcuucaucaagcaguacggcgacugccugggggauaucgccgcucgggaccugaucugcgcccagaaguucaacggccugaccgugcugcccccucugcugaccgacgagaugaucgcccaguacaccagcgcccugcuugccggcaccaucaccagcggcuggaccuucggcgccggcgcagcccugcagauccccuucgccaugcagauggccuaccgguucaacggcaucggcgugacccagaacgugcuguacgagaaccagaagcugaucgccaaccaguucaacagcgccaucggcaagauccaggacagccugagcagcaccgccagcgcccugggcaagcugcaggacguggugaaccagaacgcucaggcccugaacacccuggugaagcagcugagcagcaauuucggcgccaucagcagcgugcugaacgacauccugucaaggcuggacaagguggaggccgaggugcagaucgaccggcugaucaccggccggcugcagagccugcagaccuacgugacccagcagcugauccgggccgccgagauccgggccagcgccaaccuggcagccaccaagaugagcgagugcgugcugggccagagcaagcggguggacuuuugcggcaagggcuaccaccugaugagcuucccccagagcgccccacacggcgugguguuccuccacgucacauacgugcccgcccaggagaagaacuucaccaccgcccccgccauuugccacgacggcaaggcucacuucccccgggagggaguguucgugagcaacggcacccacugguucgugacccagcggaacuucuacgagccccagaucaucaccaccgacaacaccuucgugagcggcaacugcgacguggugaucggcaucgugaacaacaccguguacgacccccugcagccugagcuggacagcuucaaggaggagcuggacaaguacuucaagaaccacaccagccccgacguggaucugggcgacaucagcggcaucaacgccagcguggugaacauccagaaggagaucgaccggcugaacgagguggccaagaaccugaacgagagccugaucgaccugcaggagcugggcaaguacgagcaguacaucaaguggcccugguacaucuggcugggcuucaucgccggccugaucgccaucgugauggugaccaucaugcugugcugcaugaccagcugcuguagcugccugaagggcugcugcagcugcggcagcugcugcaaguucgacgaggacgacagcgagccagugcugaagggcgugaagcugcacuacaccugaggacuaguuauaagacugacuagcccgaugggccucccaacgggcccuccuccccuccuugcaccgagauuaauaaaaaaaaaaaaaaaaaaaaaaaaaaaaaaaaaaaaaaaaaaaaaaaaaaaaaaaaaaaaaaaaaaaaaaaaaaaaaaaaaaaaaaaaaaaaaaaaaaaa

SEQ ID NO: 25448 - RNA, 4011 nt, Artificial Sequence
  SARS-CoV-2/Wuhan/WIV05/2019__EPI_ISL_402128 spike protein mRNA gc (1-1273)(N501Y_D614G)
aggagaaagcuuaccauguucguguuccuggugcugcugccccuggugagcagccagugcgugaaccugaccacccggacccagcugcccccugccuacaccaacagcuucacccggggcguguacuaccccgacaagguguuccggagcagcgugcugcacagcacccaggaccuguuccugcccuucuucagcaacgugaccugguuccacgccauccacgugagcggcaccaacggcaccaagcgguucgacaacccagugcugcccuucaacgacggcguguacuucgccagcaccgagaagucaaacaucauccggggcuggaucuucggcaccacccuggacagcaagacacagagccugcugaucgugaacaacgccaccaacguggugaucaaggugugcgaguuucaguucugcaacgaccccuuccugggcguguacuaccacaagaacaacaagagcuggauggagagcgaguuccgggucuacagcagcgcuaacaauugcaccuucgaguacgugagccagcccuuccugauggaccucgagggcaagcagggcaacuucaagaaccugcgggaguucguguucaagaacaucgauggcuacuucaagaucuacagcaagcacacccccaucaaccuggugcgggaccugccccagggauucagcgcccuggagccucugguggaccugcccaucggcaucaacaucaccagguuccagacccugcuggcccugcaccggagcuaccugacccccggcgacagcagcagcggcuggaccgccggcgccgccgcauacuacgugggcuaccugcagccacggaccuuccugcugaaguacaacgagaacggcaccaucaccgacgccguggacugcgcccuggacccccugagcgagaccaagugcacccuaaagagcuucaccguggagaagggcaucuaccagaccagcaacuuccgggugcagcccacugagagcaucgugcgguuccccaacauuaccaaccugugucccuucggcgagguguucaacgccacccgguucgccagcguguacgccuggaaccggaagcggaucagcaacugcguggccgacuacagcgugcuguacaacagcgccagcuucagcaccuucaagugcuacggcgugagcccuaccaagcugaacgaccugugcuucaccaacguguacgcugacagcuucgugauccggggcgacgaggugcggcagaucgcccccggccagaccggcaagaucgccgacuacaacuacaagcugcccgacgacuucaccggcugcgugaucgccuggaacagcaacaaccuggacagcaaggugggcggcaacuacaacuaccuguaccggcuguuccguaagagcaaccugaagccauucgagcgggacaucagcaccgagaucuaccaggccggcagcacccccugcaacgguguggagggcuuuaacugcuacuucccccugcagagcuacggcuuccagcccaccuacggcgugggcuaccagcccuaccgggugguggugcugagcuucgagcugcugcacgcccccgccaccgugugcggcccuaaaaagagcaccaaccuggugaagaacaagugcgugaacuucaacuucaauggccugaccggcaccggcgugcugaccgagagcaacaagaaguuccugcccuuccagcaguucggccgggauaucgccgacaccaccgacgcagugcgggacccccagacccuggagauccuggacaucaccccaugcagcuucggcggcgugagcgucaucacccccggcacaaacaccagcaaccagguggccgugcuguaccagggagugaacugcaccgaggugcccguggccauccacgccgaccagcugacccccaccuggcggguguacagcaccggcagcaacguguuccagacccgggccggcugccugaucggcgccgagcacgugaacaacuccuacgagugcgacauccccaucggcgcuggcaucugcgccagcuaccagacccagaccaacagcccccggcgggcccggagcguggccagccagagcaucaucgccuacaccaugagcuuaggcgccgagaacagcguggccuacagcaacaacagcaucgcgaucccuaccaacuucaccaucagcgugaccaccgagauacugcccgugagcaugaccaagaccagcguggacuguaccauguacaucugcggcgacagcaccgagugcagcaaccugcugcugcaguacggcagcuucugcacccagcugaaccgggcccugaccggcaucgccguggagcaggacaagaacacccaagagguguucgcccaggugaagcagaucuacaagacucccccaaucaaggacuucggcggcuucaacuucagccagauccugcccgaccccagcaagcccagcaagcggagcuucaucgaggaccugcuguucaacaaggugacccuggccgacgccggcuucaucaagcaguacggcgacugccugggggauaucgccgcucgggaccugaucugcgcccagaaguucaacggccugaccgugcugcccccucugcugaccgacgagaugaucgcccaguacaccagcgcccugcuugccggcaccaucaccagcggcuggaccuucggcgccggcgcagcccugcagauccccuucgccaugcagauggccuaccgguucaacggcaucggcgugacccagaacgugcuguacgagaaccagaagcugaucgccaaccaguucaacagcgccaucggcaagauccaggacagccugagcagcaccgccagcgcccugggcaagcugcaggacguggugaaccagaacgcucaggcccugaacacccuggugaagcagcugagcagcaacuucggcgccaucagcucagugcugaacgacauccugagcaggcuggacaagguggaggccgaggugcagaucgaccggcugaucaccggccggcugcagagccugcagaccuacgugacccagcagcugauccgggccgccgagauccgggccagcgccaaucuggcagccaccaagaugagcgagugcgugcugggccagagcaagcggguggacuuuugcggcaagggcuaccaccugaugagcuucccccagagcgccccacacggcgugguguuccuccacgucacauacgugcccgcccaggagaagaacuucaccaccgcccccgccauuugccacgacggcaaggcucacuucccccgggagggaguguucgugagcaacggcacccacugguucgugacccagcggaacuucuacgagccccagaucaucaccaccgacaacaccuucgugagcggcaacugcgacguggugaucggcaucgugaacaacaccguguacgacccccugcagccugagcuggacagcuucaaggaggagcuggacaaguacuucaagaaccacaccagccccgacguggaucugggcgacaucagcggcaucaacgccagcguggugaacauccagaaggagaucgaccggcugaacgagguggccaagaaccugaacgagagccugaucgaccugcaggagcugggcaaguacgagcaguacaucaaguggcccugguacaucuggcugggcuucaucgccggccugaucgccaucgugauggugaccaucaugcugugcugcaugaccagcugcuguagcugccugaagggcugcugcagcugcggcagcugcugcaaguucgacgaggacgacagcgagccagugcugaagggcgugaagcugcacuacaccugaggacuaguuauaagacugacuagcccgaugggccucccaacgggcccuccuccccuccuugcaccgagauuaauaaaaaaaaaaaaaaaaaaaaaaaaaaaaaaaaaaaaaaaaaaaaaaaaaaaaaaaaaaaaaaaaaaaaaaaaaaaaaaaaaaaaaaaaaaaaaaaaaaaa

SEQ ID NO: 25449 - RNA, 4005 nt, Artificial Sequence
  SARS-CoV-2/Wuhan/WIV05/2019__EPI_ISL_402128 spike protein mRNA gc (1-1273)(H69del_V70del_D614G)
aggagaaagcuuaccauguucguguuccuggugcugcugccccuggugagcagccagugcgugaaccugaccacccggacccagcugcccccugccuacaccaacagcuucacccggggcguguacuaccccgacaagguguuccggagcagcgugcugcacagcacccaggaccuguuccugcccuucuucagcaacgugaccugguuccacgccaucagcggcaccaacggcaccaagcgguucgacaacccagugcugcccuucaacgacggcguguacuucgccagcaccgagaagucaaacaucauccggggcuggaucuucggcaccacccuggacagcaagacacagagccugcugaucgugaacaacgccaccaacguggugaucaaggugugcgaguuucaguucugcaacgaccccuuccugggcguguacuaccacaagaacaacaagagcuggauggagagcgaguuccggguguacagcagcgcuaacaauugcaccuucgaguacgucagccagcccuuccugauggaccucgagggcaagcagggcaacuucaagaaccugcgggaguucguguucaagaacaucgauggcuacuucaagaucuacagcaagcacacccccaucaaccuggugcgggaccugccccagggauucagcgcccuggagccucugguggaccugcccaucggcaucaacaucaccagguuccagacccugcuggcccugcaccggagcuaccugacccccggcgacagcagcagcggcuggaccgccggcgccgccgcauacuacgugggcuaccugcagccacggaccuuccugcugaaguacaacgagaacggcaccaucaccgacgccguggacugcgcccuggacccccugagcgagaccaagugcacccuaaagagcuucaccguggagaagggcaucuaccagaccagcaacuuccgggugcagcccacugagagcaucgugcgguuccccaacauuaccaaccugugucccuucggcgagguguucaacgccacccgguucgccagcguguacgccuggaaccggaagcggaucagcaacugcguggccgacuacagcgugcuguacaacagcgccagcuucagcaccuucaagugcuacggcgugagcccuaccaagcugaacgaccugugcuucaccaacguguacgcugacagcuucgugauccggggcgacgaggugcggcagaucgcccccggccagaccggcaagaucgccgacuacaacuacaagcugcccgacgacuucaccggcugcgugaucgccuggaacagcaacaaccuggacagcaaggugggcggcaacuacaacuaccuguaccggcuguuccguaagagcaaccugaagccauucgagcgggacaucagcaccgagaucuaccaggccggcagcacccccugcaacgguguggagggcuuuaacugcuacuucccccugcagagcuacggcuuccagcccaccaacggcgugggcuaccagcccuaccgggugguggugcugagcuucgagcugcugcacgcccccgccaccgugugcggcccuaaaaagagcaccaaccuggugaagaacaagugcgugaacuucaauuucaacggccugaccggcaccggcgugcugaccgagagcaacaagaaguuccugcccuuccagcaguucggccgggauaucgccgacaccaccgacgcagugcgggacccccagacccuggagauccuggacaucaccccaugcagcuucggcggcgugagcgugaucacccccggcacaaacaccagcaaccaggucgccgugcuguaccagggagugaacugcaccgaggugcccguggccauccacgccgaccagcugacccccaccuggcggguguacagcaccggcagcaacguguuccagacccgggccggcugccugaucggcgccgagcacgugaacaacuccuacgagugcgacauccccaucggcgcuggcaucugcgccagcuaccagacccagaccaacagcccccggcgggcccggagcguggccagccagagcaucaucgccuacaccaugagcuuaggcgccgagaacagcguggccuacagcaacaacagcaucgcgaucccuaccaacuucaccaucagcgugaccaccgagauacugcccgugagcaugaccaagaccagcguggacuguaccauguacaucugcggcgacagcaccgagugcagcaaccugcugcugcaguacggcagcuucugcacccagcugaaccgggcccugaccggcaucgccguggagcaggacaagaacacccaagagguguucgcccaggugaagcagaucuacaagacucccccaaucaaggacuucggcggcuucaacuucagccagauccugcccgaccccagcaagcccagcaagcggagcuucaucgaggaccugcuguucaacaaggugacccuggccgacgccggcuucaucaagcaguacggcgacugccugggggauaucgccgcucgggaccugaucugcgcccagaaguucaacggccugaccgugcugcccccucugcugaccgacgagaugaucgcccaguacaccagcgcccugcuugccggcaccaucaccagcggcuggaccuucggcgccggcgcagcccugcagauccccuucgccaugcagauggccuaccgguucaacggcaucggcgugacccagaacgugcuguacgagaaccagaagcugaucgccaaccaguucaacagcgccaucggcaagauccaggacagccugagcagcaccgccagcgcccugggcaagcugcaggacguggugaaccagaacgcucaggcccugaacacccuggugaagcagcugagcagcaacuucggcgccaucagcucagugcugaaugacauccugagcaggcuggacaagguggaggccgaggugcagaucgaccggcugaucaccggccggcugcagagccugcagaccuacgugacccagcagcugauccgggccgccgagauccgggccagcgccaaccuggcagccaccaagaugagcgagugcgugcugggccagagcaagcggguggacuuuugcggcaagggcuaccaccugaugagcuucccccagagcgccccacacggcgugguguuccuccacgugacauacguccccgcccaggagaagaacuucaccaccgcccccgccauuugccacgacggcaaggcucacuucccccgggagggaguguucgugagcaacggcacccacugguucgugacccagcggaacuucuacgagccccagaucaucaccaccgacaacaccuucgugagcggcaacugcgacguggugaucggcaucgugaacaacaccguguacgacccccugcagccugagcuggacagcuucaaggaggagcuggacaaguacuucaagaaccacaccagccccgacguggaucugggcgacaucagcggcaucaacgccagcguggugaacauccagaaggagaucgaccggcugaacgagguggccaagaaccugaacgagagccugaucgaccugcaggagcugggcaaguacgagcaguacaucaaguggcccugguacaucuggcugggcuucaucgccggccugaucgccaucgugauggugaccaucaugcugugcugcaugaccagcugcuguagcugccugaagggcugcugcagcugcggcagcugcugcaaguucgacgaggacgacagcgagccagugcugaagggcgugaagcugcacuacaccugaggacuaguuauaagacugacuagcccgaugggccucccaacgggcccuccuccccuccuugcaccgagauuaauaaaaaaaaaaaaaaaaaaaaaaaaaaaaaaaaaaaaaaaaaaaaaaaaaaaaaaaaaaaaaaaaaaaaaaaaaaaaaaaaaaaaaaaaaaaaaaaaaaaa

SEQ ID NO: 25450 - RNA, 4011 nt, Artificial Sequence
  SARS-CoV-2/Wuhan/WIV05/2019__EPI_ISL_402128 spike protein mRNA gc (1-1273)(Y453F_D614G)
aggagaaagcuuaccauguucguguuccuggugcugcugccccuggugagcagccagugcgugaaccugaccacccggacccagcugcccccugccuacaccaacagcuucacccggggcguguacuaccccgacaagguguuccggagcagcgugcugcacagcacccaggaccuguuccugcccuucuucagcaacgugaccugguuccacgccauccacgugagcggcaccaacggcaccaagcgguucgacaacccagugcugcccuucaacgacggcguguacuucgccagcaccgagaagucaaacaucauccggggcuggaucuucggcaccacccuggacagcaagacacagagccugcugaucgugaacaacgccaccaacguggugaucaaggugugcgaguuucaguucugcaacgaccccuuccugggcguguacuaccacaagaacaacaagagcuggauggagagcgaguuccgggucuacagcagcgcuaacaauugcaccuucgaguacgugagccagcccuuccugauggaccucgagggcaagcagggcaacuucaagaaccugcgggaguucguguucaagaacaucgauggcuacuucaagaucuacagcaagcacacccccaucaaccuggugcgggaccugccccagggauucagcgcccuggagccucugguggaccugcccaucggcaucaacaucaccagguuccagacccugcuggcccugcaccggagcuaccugacccccggcgacagcagcagcggcuggaccgccggcgccgccgcauacuacgugggcuaccugcagccacggaccuuccugcugaaguacaacgagaacggcaccaucaccgacgccguggacugcgcccuggacccccugagcgagaccaagugcacccuaaagagcuucaccguggagaagggcaucuaccagaccagcaacuuccgggugcagcccacugagagcaucgugcgguuccccaacauuaccaaccugugucccuucggcgagguguucaacgccacccgguucgccagcguguacgccuggaaccggaagcggaucagcaacugcguggccgacuacagcgugcuguacaacagcgccagcuucagcaccuucaagugcuacggcgugagcccuaccaagcugaacgaccugugcuucaccaacguguacgcugacagcuucgugauccggggcgacgaggugcggcagaucgcccccggccagaccggcaagaucgccgacuacaacuacaagcugcccgacgacuucaccggcugcgugaucgccuggaacagcaacaaccuggacagcaaggugggcggcaacuacaacuaccuguuccggcuguuccguaagagcaaccugaagccauuugagcgggacaucagcaccgagaucuaccaggccggcagcacccccugcaacgguguggagggcuucaacugcuacuucccccugcagagcuacggcuuccagcccaccaacggcgugggcuaccagcccuaccgggugguggugcugagcuucgagcugcugcacgcccccgccaccgugugcggcccuaaaaagagcaccaaccuggugaagaacaagugcgugaacuucaauuucaacggccugaccggcaccggcgugcugaccgagagcaacaagaaguuccugcccuuccagcaguucggccgggauaucgccgacaccaccgacgcagugcgggacccccagacccuggagauccuggacaucaccccaugcagcuucggcggcgugagcgucaucacccccggcacaaacaccagcaaccagguggccgugcuguaccagggagugaacugcaccgaggugcccguggccauccacgccgaccagcugacccccaccuggcggguguacagcaccggcagcaacguguuccagacccgggccggcugccugaucggcgccgagcacgugaacaacuccuacgagugcgacauccccaucggcgcuggcaucugcgccagcuaccagacccagaccaacagcccccggcgggcccggagcguggccagccagagcaucaucgccuacaccaugagcuuaggcgccgagaacagcguggccuacagcaacaacagcaucgcgaucccuaccaacuucaccaucagcgugaccaccgagauacugcccgugagcaugaccaagaccagcguggacuguaccauguacaucugcggcgacagcaccgagugcagcaaccugcugcugcaguacggcagcuucugcacccagcugaaccgggcccugaccggcaucgccguggagcaggacaagaacacccaagagguguucgcccaggugaagcagaucuacaagacucccccaaucaaggacuucggcggcuucaacuucagccagauccugcccgaccccagcaagcccagcaagcggagcuucaucgaggaccugcuguucaacaaggugacccuggccgacgccggcuucaucaagcaguacggcgacugccugggggauaucgccgcucgggaccugaucugcgcccagaaguucaacggccugaccgugcugcccccucugcugaccgacgagaugaucgcccaguacaccagcgcccugcuugccggcaccaucaccagcggcuggaccuucggcgccggcgcagcccugcagauccccuucgccaugcagauggccuaccgguucaacggcaucggcgugacccagaacgugcuguacgagaaccagaagcugaucgccaaccaguucaacagcgccaucggcaagauccaggacagccugagcagcaccgccagcgcccugggcaagcugcaggacguggugaaccagaacgcucaggcccugaacacccuggugaagcagcugagcagcaacuuuggcgccaucagcucagugcugaaugacauccugagcaggcuggacaagguggaggccgaggugcagaucgaccggcugaucaccggccggcugcagagccugcagaccuacgugacccagcagcugauccgggccgccgagauccgggccagcgccaaccuggcagccaccaagaugagcgagugcgugcugggccagagcaagcggguggacuucugcggcaagggcuaccaccugaugagcuucccccagagcgccccacacggcgugguguuccuccacgucacauacgugcccgcccaggagaagaacuucaccaccgcccccgccauuugccacgacggcaaggcucacuucccccgggagggaguguucgugagcaacggcacccacugguucgugacccagcggaacuucuacgagccccagaucaucaccaccgacaacaccuucgugagcggcaacugcgacguggugaucggcaucgugaacaacaccguguacgacccccugcagccugagcuggacagcuucaaggaggagcuggacaaguacuucaagaaccacaccagccccgacguggaucugggcgacaucagcggcaucaacgccagcguggugaacauccagaaggagaucgaccggcugaacgagguggccaagaaccugaacgagagccugaucgaccugcaggagcugggcaaguacgagcaguacaucaaguggcccugguacaucuggcugggcuucaucgccggccugaucgccaucgugauggugaccaucaugcugugcugcaugaccagcugcuguagcugccugaagggcugcugcagcugcggcagcugcugcaaguucgacgaggacgacagcgagccagugcugaagggcgugaagcugcacuacaccugaggacuaguuauaagacugacuagcccgaugggccucccaacgggcccuccuccccuccuugcaccgagauuaauaaaaaaaaaaaaaaaaaaaaaaaaaaaaaaaaaaaaaaaaaaaaaaaaaaaaaaaaaaaaaaaaaaaaaaaaaaaaaaaaaaaaaaaaaaaaaaaaaaaa

SEQ ID NO: 25451 - RNA, 4011 nt, Artificial Sequence
  SARS-CoV-2/Wuhan/WIV05/2019__EPI_ISL_402128 spike protein mRNA gc (1-1273)(D614G_I692V)
aggagaaagcuuaccauguucguguuccuggugcugcugccccuggugagcagccagugcgugaaccugaccacccggacccagcugcccccugccuacaccaacagcuucacccggggcguguacuaccccgacaagguguuccggagcagcgugcugcacagcacccaggaccuguuccugcccuucuucagcaacgugaccugguuccacgccauccacgugagcggcaccaacggcaccaagcgguucgacaacccagugcugcccuucaacgacggcguguacuucgccagcaccgagaagucaaacaucauccggggcuggaucuucggcaccacccuggacagcaagacacagagccugcugaucgugaacaacgccaccaacguggugaucaaggugugcgaguuucaguucugcaacgaccccuuccugggcguguacuaccacaagaacaacaagagcuggauggagagcgaguuccgggucuacagcagcgcuaacaauugcaccuucgaguacgugagccagcccuuccugauggaccucgagggcaagcagggcaacuucaagaaccugcgggaguucguguucaagaacaucgauggcuacuucaagaucuacagcaagcacacccccaucaaccuggugcgggaccugccccagggauucagcgcccuggagccucugguggaccugcccaucggcaucaacaucaccagguuccagacccugcuggcccugcaccggagcuaccugacccccggcgacagcagcagcggcuggaccgccggcgccgccgcauacuacgugggcuaccugcagccacggaccuuccugcugaaguacaacgagaacggcaccaucaccgacgccguggacugcgcccuggacccccugagcgagaccaagugcacccuaaagagcuucaccguggagaagggcaucuaccagaccagcaacuuccgggugcagcccacugagagcaucgugcgguuccccaacauuaccaaccugugucccuucggcgagguguucaacgccacccgguucgccagcguguacgccuggaaccggaagcggaucagcaacugcguggccgacuacagcgugcuguacaacagcgccagcuucagcaccuucaagugcuacggcgugagcccuaccaagcugaacgaccugugcuucaccaacguguacgcugacagcuucgugauccggggcgacgaggugcggcagaucgcccccggccagaccggcaagaucgccgacuacaacuacaagcugcccgacgacuucaccggcugcgugaucgccuggaacagcaacaaccuggacagcaaggugggcggcaacuacaacuaccuguaccggcuguuccguaagagcaaccugaagccauucgagcgggacaucagcaccgagaucuaccaggccggcagcacccccugcaacgguguggagggcuuuaacugcuacuucccccugcagagcuacggcuuccagcccaccaacggcgugggcuaccagcccuaccgggugguggugcugagcuucgagcugcugcacgcccccgccaccgugugcggcccuaaaaagagcaccaaccuggugaagaacaagugcgugaacuucaauuucaacggccugaccggcaccggcgugcugaccgagagcaacaagaaguuccugcccuuccagcaguucggccgggauaucgccgacaccaccgacgcagugcgggacccccagacccuggagauccuggacaucaccccaugcagcuucggcggcgugagcgucaucacccccggcacaaacaccagcaaccagguggccgugcuguaccagggagugaacugcaccgaggugcccguggccauccacgccgaccagcugacccccaccuggcggguguacagcaccggcagcaacguguuccagacccgggccggcugccugaucggcgccgagcacgugaacaacuccuacgagugcgacauccccaucggcgcuggcaucugcgccagcuaccagacccagaccaacagcccccggcgggcccggagcguggccagccagagcgugaucgccuacaccaugagcuuaggcgccgagaacagcguggccuacagcaacaacagcaucgcgaucccuaccaacuucaccaucagcgugaccaccgagauccugcccgugagcaugaccaagaccagcguggacuguaccauguacauaugcggcgacagcaccgagugcagcaaccugcugcugcaguacggcagcuucugcacccagcugaaccgggcccugaccggcaucgccguggagcaggacaagaacacccaagagguguucgcccaggugaagcagaucuacaagacucccccaaucaaggacuucggcggcuucaacuucagccagauccugcccgaccccagcaagcccagcaagcggagcuucaucgaggaccugcuguucaacaaggugacccuggccgacgccggcuucaucaagcaguacggcgacugccugggggauaucgccgcucgggaccugaucugcgcccagaaguucaacggccugaccgugcugcccccucugcugaccgacgagaugaucgcccaguacaccagcgcccugcuugccggcaccaucaccagcggcuggaccuucggcgccggcgcagcccugcagauccccuucgccaugcagauggccuaccgguucaacggcaucggcgugacccagaacgugcuguacgagaaccagaagcugaucgccaaccaguucaacagcgccaucggcaagauccaggacagccugagcagcaccgccagcgcccugggcaagcugcaggacguggugaaccagaacgcucaggcccugaacacccuggugaagcagcugagcagcaacuucggcgccaucagcucagugcugaaugacauccugagcaggcuggacaagguggaggccgaggugcagaucgaccggcugaucaccggccggcugcagagccugcagaccuacgugacccagcagcugauccgggccgccgagauccgggccagcgccaaccuggcagccaccaagaugagcgagugcgugcugggccagagcaagcggguggacuuuugcggcaagggcuaccaccugaugagcuucccccagagcgccccacacggcguggucuuccuccacgugacauacgugcccgcccaggagaagaacuucaccaccgcccccgccaucugccacgacggcaaggcucacuucccccgggagggaguguucgugagcaacggcacccacugguucgugacccagcggaacuucuacgagccccagauuaucaccaccgacaacaccuucgugagcggcaacugcgacguggugaucggcaucgugaacaacaccguguacgacccccugcagccugagcuggacagcuucaaggaggagcuggacaaguacuucaagaaccacaccagccccgacguggaucugggcgacaucagcggcaucaacgccagcguggugaacauccagaaggagaucgaccggcugaacgagguggccaagaaccugaacgagagccugaucgaccugcaggagcugggcaaguacgagcaguacaucaaguggcccugguacaucuggcugggcuucaucgccggccugaucgccaucgugauggugaccaucaugcugugcugcaugaccagcugcuguagcugccugaagggcugcugcagcugcggcagcugcugcaaguucgacgaggacgacagcgagccagugcugaagggcgugaagcugcacuacaccugaggacuaguuauaagacugacuagcccgaugggccucccaacgggcccuccuccccuccuugcaccgagauuaauaaaaaaaaaaaaaaaaaaaaaaaaaaaaaaaaaaaaaaaaaaaaaaaaaaaaaaaaaaaaaaaaaaaaaaaaaaaaaaaaaaaaaaaaaaaaaaaaaaaa

SEQ ID NO: 25452 - RNA, 4011 nt, Artificial Sequence
  SARS-CoV-2/Wuhan/WIV05/2019__EPI_ISL_402128 spike protein mRNA gc (1-1273)(D614G_M1229I)
aggagaaagcuuaccauguucguguuccuggugcugcugccccuggugagcagccagugcgugaaccugaccacccggacccagcugcccccugccuacaccaacagcuucacccggggcguguacuaccccgacaagguguuccggagcagcgugcugcacagcacccaggaccuguuccugcccuucuucagcaacgugaccugguuccacgccauccacgugagcggcaccaacggcaccaagcgguucgacaacccagugcugcccuucaacgacggcguguacuucgccagcaccgagaagucaaacaucauccggggcuggaucuucggcaccacccuggacagcaagacacagagccugcugaucgugaacaacgccaccaacguggugaucaaggugugcgaguuucaguucugcaacgaccccuuccugggcguguacuaccacaagaacaacaagagcuggauggagagcgaguuccgggucuacagcagcgcuaacaauugcaccuucgaguacgugagccagcccuuccugauggaccucgagggcaagcagggcaacuucaagaaccugcgggaguucguguucaagaacaucgauggcuacuucaagaucuacagcaagcacacccccaucaaccuggugcgggaccugccccagggauucagcgcccuggagccucugguggaccugcccaucggcaucaacaucaccagguuccagacccugcuggcccugcaccggagcuaccugacccccggcgacagcagcagcggcuggaccgccggcgccgccgcauacuacgugggcuaccugcagccacggaccuuccugcugaaguacaacgagaacggcaccaucaccgacgccguggacugcgcccuggacccccugagcgagaccaagugcacccuaaagagcuucaccguggagaagggcaucuaccagaccagcaacuuccgggugcagcccacugagagcaucgugcgguuccccaacauuaccaaccugugucccuucggcgagguguucaacgccacccgguucgccagcguguacgccuggaaccggaagcggaucagcaacugcguggccgacuacagcgugcuguacaacagcgccagcuucagcaccuucaagugcuacggcgugagcccuaccaagcugaacgaccugugcuucaccaacguguacgcugacagcuucgugauccggggcgacgaggugcggcagaucgcccccggccagaccggcaagaucgccgacuacaacuacaagcugcccgacgacuucaccggcugcgugaucgccuggaacagcaacaaccuggacagcaaggugggcggcaacuacaacuaccuguaccggcuguuccguaagagcaaccugaagccauucgagcgggacaucagcaccgagaucuaccaggccggcagcacccccugcaacgguguggagggcuuuaacugcuacuucccccugcagagcuacggcuuccagcccaccaacggcgugggcuaccagcccuaccgggugguggugcugagcuucgagcugcugcacgcccccgccaccgugugcggcccuaaaaagagcaccaaccuggugaagaacaagugcgugaacuucaauuucaacggccugaccggcaccggcgugcugaccgagagcaacaagaaguuccugcccuuccagcaguucggccgggauaucgccgacaccaccgacgcagugcgggacccccagacccuggagauccuggacaucaccccaugcagcuucggcggcgugagcgucaucacccccggcacaaacaccagcaaccagguggccgugcuguaccagggagugaacugcaccgaggugcccguggccauccacgccgaccagcugacccccaccuggcggguguacagcaccggcagcaacguguuccagacccgggccggcugccugaucggcgccgagcacgugaacaacuccuacgagugcgacauccccaucggcgcuggcaucugcgccagcuaccagacccagaccaacagcccccggcgggcccggagcguggccagccagagcaucaucgccuacaccaugagcuuaggcgccgagaacagcguggccuacagcaacaacagcaucgcgaucccuaccaacuucaccaucagcgugaccaccgagauacugcccgugagcaugaccaagaccagcguggacuguaccauguacaucugcggcgacagcaccgagugcagcaaccugcugcugcaguacggcagcuucugcacccagcugaaccgggcccugaccggcaucgccguggagcaggacaagaacacccaagagguguucgcccaggugaagcagaucuacaagacucccccaaucaaggacuucggcggcuucaacuucagccagauccugcccgaccccagcaagcccagcaagcggagcuucaucgaggaccugcuguucaacaaggugacccuggccgacgccggcuucaucaagcaguacggcgacugccugggggauaucgccgcucgggaccugaucugcgcccagaaguucaacggccugaccgugcugcccccucugcugaccgacgagaugaucgcccaguacaccagcgcccugcuugccggcaccaucaccagcggcuggaccuucggcgccggcgcagcccugcagauccccuucgccaugcagauggccuaccgguucaacggcaucggcgugacccagaacgugcuguacgagaaccagaagcugaucgccaaccaguucaacagcgccaucggcaagauccaggacagccugagcagcaccgccagcgcccugggcaagcugcaggacguggugaaccagaacgcucaggcccugaacacccuggugaagcagcugagcagcaacuucggcgccaucagcucagugcugaaugacauccugagcaggcuggacaagguggaggccgaggugcagaucgaccggcugaucaccggccggcugcagagccugcagaccuacgugacccagcagcugauccgggccgccgagauccgggccagcgccaaccuggcagccaccaagaugagcgagugcgugcugggccagagcaagcggguggacuuuugcggcaagggcuaccaccugaugagcuucccccagagcgccccacacggcgugguguuccuccacgucacauacgugcccgcccaggagaagaacuucaccaccgcccccgccauuugccacgacggcaaggcucacuucccccgggagggaguguucgugagcaacggcacccacugguucgugacccagcggaacuucuacgagccccagaucaucaccaccgacaacaccuucgugagcggcaacugcgacguggugaucggcaucgugaacaacaccguguacgacccccugcagccugagcuggacagcuucaaggaggagcuggacaaguacuucaagaaccacaccagccccgacguggaucugggcgacaucagcggcaucaacgccagcguggugaacauccagaaggagaucgaccggcugaacgagguggccaagaaccugaacgagagccugaucgaccugcaggagcugggcaaguacgagcaguacaucaaguggcccugguacaucuggcugggcuucaucgccggccugaucgccaucgugaucgugaccaucaugcugugcugcaugaccagcugcuguagcugccugaagggcugcugcagcugcggcagcugcugcaaguucgacgaggacgacagcgagccagugcugaagggcgugaagcugcacuacaccugaggacuaguuauaagacugacuagcccgaugggccucccaacgggcccuccuccccuccuugcaccgagauuaauaaaaaaaaaaaaaaaaaaaaaaaaaaaaaaaaaaaaaaaaaaaaaaaaaaaaaaaaaaaaaaaaaaaaaaaaaaaaaaaaaaaaaaaaaaaaaaaaaaaa

SEQ ID NO: 25453 - RNA, 4005 nt, Artificial Sequence
  SARS-CoV-2/Wuhan/WIV05/2019__EPI_ISL_402128 spike protein mRNA gc (1-1273)(H69del_V70del_A222V_Y453F_S477N_D614G_I692V)
aggagaaagcuuaccauguucguguuccuggugcugcugccccuggugagcagccagugcgugaaccugaccacccggacccagcugcccccugccuacaccaacagcuucacccggggcguguacuaccccgacaagguguuccggagcagcgugcugcacagcacccaggaccuguuccugcccuucuucagcaacgugaccugguuccacgccaucagcggcaccaacggcaccaagcgguucgacaacccagugcugcccuucaacgacggcguguacuucgccagcaccgagaagucaaacaucauccggggcuggaucuucggcaccacccuggacagcaagacacagagccugcugaucgugaacaacgccaccaacguggugaucaaggugugcgaguuucaguucugcaacgaccccuuccugggcguguacuaccacaagaacaacaagagcuggauggagagcgaguuccggguguacagcagcgcuaacaauugcaccuucgaguacgucagccagcccuuccugauggaccucgagggcaagcagggcaacuucaagaaccugcgggaguucguguucaagaacaucgauggcuacuucaagaucuacagcaagcacacccccaucaaccuggugcgggaccugccccagggauucagcgugcuggagccucugguggaccugcccaucggcaucaacaucaccagguuccagacccugcuggcccugcaccggagcuaccugacccccggcgacagcagcagcggcuggaccgccggcgccgccgccuacuacgugggcuaccugcagccacggaccuuccugcugaaguacaacgagaacggcaccaucaccgacgcaguggacugcgcccuggacccccugagcgagaccaagugcacccuaaagagcuucaccguggagaagggcaucuaccagaccagcaacuuccgggugcagcccacugagagcaucgugcgguuccccaacauuaccaaccugugucccuucggcgagguguucaacgccacccgguucgccagcguguacgccuggaaccggaagcggaucagcaacugcguggccgacuacagcgugcuguacaacagcgccagcuucagcaccuucaagugcuacggcgugagcccuaccaagcugaacgaccugugcuucaccaacguguacgccgacagcuucgugauccggggcgacgaggugcggcagaucgcucccggccagaccggcaagaucgccgacuacaacuacaagcugcccgacgacuucaccggcugcgugaucgccuggaacagcaacaaccuggacagcaaggugggcggcaacuacaacuaccuguuccggcuguuccguaagagcaaccugaagccauuugagcgggacaucagcaccgagaucuaccaggccggcaacacccccugcaacgguguggagggcuucaacugcuacuucccccugcagagcuacggcuuccagcccaccaacggcgugggcuaccagcccuaccgggugguggugcugagcuucgagcugcugcacgcccccgccaccgugugcggcccuaaaaagagcaccaaccuggugaagaacaagugcgugaauuucaacuucaacggccugaccggcaccggcgugcugaccgagagcaacaagaaguuccugcccuuccagcaguucggccgggauaucgccgacaccaccgacgccgugcgggacccccagacccuggagauccuggacaucaccccaugcagcuucggcggcgugagcgucaucacccccggcacaaacaccagcaaccagguggcagugcuguaccagggagugaacugcaccgaggugcccguggccauccacgccgaccagcugacccccaccuggcggguguacagcaccggcagcaacguguuccagacccgggccggcugccugaucggcgccgagcacgugaacaacagcuacgagugcgacauccccaucggcgccggcaucugcgcuuccuaccagacccagaccaacagcccccggcgggcccggagcguggccagccagagcgugaucgccuacaccaugagcuuaggcgccgagaacagcguggccuacagcaacaacagcaucgccaucccuaccaacuucaccaucagcgugaccaccgagauccugcccgugagcaugaccaagaccagcguggacuguaccauguacauaugcggcgacagcaccgagugcagcaaccugcugcugcaguacggcagcuucugcacccagcugaaccgggcgcugaccggcaucgccguggagcaggacaagaacacccaagagguguucgcccaggugaagcagaucuacaagacucccccaaucaaggacuucggcggcuucaacuucagccagauccugcccgaccccagcaagcccagcaagcggagcuucaucgaggaccugcuguucaacaaggugacccuggccgacgccggcuucaucaagcaguacggcgacugccugggggauaucgccgcccgggaccugaucugcgcucagaaguucaacggccugaccgugcugcccccucugcugaccgacgagaugaucgcccaguacaccagcgcccugcuugccggcaccaucaccagcggcuggaccuucggcgccggcgccgcacugcagauccccuucgccaugcagauggccuaccgguucaacggcaucggcgugacccagaacgugcuguacgagaaccagaagcugaucgccaaccaguucaacagcgccaucggcaagauccaggacagccugagcagcaccgccagcgcccugggcaagcugcaggacguggugaaccagaacgcccaggcucugaacacccuggugaagcagcugagcagcaauuuuggcgccaucagcagcgugcugaacgacauccugucaaggcuggacaagguggaggccgaggugcagaucgaccggcugaucaccggccggcugcagagccugcagaccuacgugacccagcagcugauccgggccgccgagauccgggccagcgccaaccuggccgcaaccaagaugagcgagugcgugcugggccagagcaagcggguggacuucugcggcaagggcuaccaccugaugagcuucccccagagcgccccacacggcguggucuuccuccacgugacauacgugcccgcccaggagaagaacuucaccaccgcccccgccaucugccacgacggcaaggcccacuucccccgggagggaguguucgugagcaacggcacccacugguucgugacccagcggaacuucuacgagccccagauuaucaccaccgacaacaccuucgugagcggcaacugcgacguggugaucggcaucgugaacaacaccguguacgacccccugcagccugagcuggacagcuucaaggaggagcuggacaaguacuucaagaaccacaccagccccgacguggaucugggcgacaucagcggcaucaacgcuagcguggugaacauccagaaggagaucgaccggcugaacgagguggccaagaaccugaacgagagccugaucgaccugcaggagcugggcaaguacgagcaguacaucaaguggcccugguacaucuggcugggcuucaucgccggccugaucgccaucgugauggugaccaucaugcugugcugcaugaccagcugcuguagcugccugaagggcugcugcagcugcggcagcugcugcaaguucgacgaggacgacagcgagccagugcugaagggcgugaagcugcacuacaccugaggacuaguuauaagacugacuagcccgaugggccucccaacgggcccuccuccccuccuugcaccgagauuaauaaaaaaaaaaaaaaaaaaaaaaaaaaaaaaaaaaaaaaaaaaaaaaaaaaaaaaaaaaaaaaaaaaaaaaaaaaaaaaaaaaaaaaaaaaaaaaaaaaaa

SEQ ID NO: 25454 - RNA, 4005 nt, Artificial Sequence
  SARS-CoV-2/Wuhan/WIV05/2019__EPI_ISL_402128 spike protein mRNA gc (1-1273)(H69del_V70del_Y453F_D614G_I692V_M1229I)
aggagaaagcuuaccauguucguguuccuggugcugcugccccuggugagcagccagugcgugaaccugaccacccggacccagcugcccccugccuacaccaacagcuucacccggggcguguacuaccccgacaagguguuccggagcagcgugcugcacagcacccaggaccuguuccugcccuucuucagcaacgugaccugguuccacgccaucagcggcaccaacggcaccaagcgguucgacaacccagugcugcccuucaacgacggcguguacuucgccagcaccgagaagucaaacaucauccggggcuggaucuucggcaccacccuggacagcaagacacagagccugcugaucgugaacaacgccaccaacguggugaucaaggugugcgaguuucaguucugcaacgaccccuuccugggcguguacuaccacaagaacaacaagagcuggauggagagcgaguuccggguguacagcagcgcuaacaauugcaccuucgaguacgucagccagcccuuccugauggaccucgagggcaagcagggcaacuucaagaaccugcgggaguucguguucaagaacaucgauggcuacuucaagaucuacagcaagcacacccccaucaaccuggugcgggaccugccccagggauucagcgcccuggagccucugguggaccugcccaucggcaucaacaucaccagguuccagacccugcuggcccugcaccggagcuaccugacccccggcgacagcagcagcggcuggaccgccggcgccgccgcauacuacgugggcuaccugcagccacggaccuuccugcugaaguacaacgagaacggcaccaucaccgacgccguggacugcgcccuggacccccugagcgagaccaagugcacccuaaagagcuucaccguggagaagggcaucuaccagaccagcaacuuccgggugcagcccacugagagcaucgugcgguuccccaacauuaccaaccugugucccuucggcgagguguucaacgccacccgguucgccagcguguacgccuggaaccggaagcggaucagcaacugcguggccgacuacagcgugcuguacaacagcgccagcuucagcaccuucaagugcuacggcgugagcccuaccaagcugaacgaccugugcuucaccaacguguacgcugacagcuucgugauccggggcgacgaggugcggcagaucgcccccggccagaccggcaagaucgccgacuacaacuacaagcugcccgacgacuucaccggcugcgugaucgccuggaacagcaacaaccuggacagcaaggugggcggcaacuacaacuaccuguuccggcuguuccguaagagcaaccugaagccauuugagcgggacaucagcaccgagaucuaccaggccggcagcacccccugcaacgguguggagggcuucaacugcuacuucccccugcagagcuacggcuuccagcccaccaacggcgugggcuaccagcccuaccgggugguggugcugagcuucgagcugcugcacgcccccgccaccgugugcggcccuaaaaagagcaccaaccuggugaagaacaagugcgugaacuucaauuucaacggccugaccggcaccggcgugcugaccgagagcaacaagaaguuccugcccuuccagcaguucggccgggauaucgccgacaccaccgacgcagugcgggacccccagacccuggagauccuggacaucaccccaugcagcuucggcggcgugagcgugaucacccccggcacaaacaccagcaaccaggucgccgugcuguaccagggagugaacugcaccgaggugcccguggccauccacgccgaccagcugacccccaccuggcggguguacagcaccggcagcaacguguuccagacccgggccggcugccugaucggcgccgagcacgugaacaacuccuacgagugcgacauccccaucggcgcuggcaucugcgccagcuaccagacccagaccaacagcccccggcgggcccggagcguggccagccagagcgugaucgccuacaccaugagcuuaggcgccgagaacagcguggccuacagcaacaacagcaucgcgaucccuaccaacuucaccaucagcgugaccaccgagauccugcccgugagcaugaccaagaccagcguggacuguaccauguacauaugcggcgacagcaccgagugcagcaaccugcugcugcaguacggcagcuucugcacccagcugaaccgggcccugaccggcaucgccguggagcaggacaagaacacccaagagguguucgcccaggugaagcagaucuacaagacucccccaaucaaggacuucggcggcuucaacuucagccagauccugcccgaccccagcaagcccagcaagcggagcuucaucgaggaccugcuguucaacaaggugacccuggccgacgccggcuucaucaagcaguacggcgacugccugggggauaucgccgcucgggaccugaucugcgcccagaaguucaacggccugaccgugcugcccccucugcugaccgacgagaugaucgcccaguacaccagcgcccugcuugccggcaccaucaccagcggcuggaccuucggcgccggcgcagcccugcagauccccuucgccaugcagauggccuaccgguucaacggcaucggcgugacccagaacgugcuguacgagaaccagaagcugaucgccaaccaguucaacagcgccaucggcaagauccaggacagccugagcagcaccgccagcgcccugggcaagcugcaggacguggugaaccagaacgcucaggcccugaacacccuggugaagcagcugagcagcaacuuuggcgccaucagcucagugcugaaugacauccugagcaggcuggacaagguggaggccgaggugcagaucgaccggcugaucaccggccggcugcagagccugcagaccuacgugacccagcagcugauccgggccgccgagauccgggccagcgccaaccuggcagccaccaagaugagcgagugcgugcugggccagagcaagcggguggacuucugcggcaagggcuaccaccugaugagcuucccccagagcgccccacacggcgugguguuccuccacgucacauacgugcccgcccaggagaagaacuucaccaccgcccccgccaucugccacgacggcaaggcucacuucccccgggagggaguguucgugagcaacggcacccacugguucgugacccagcggaacuucuacgagccccagauuaucaccaccgacaacaccuucgugagcggcaacugcgacguggugaucggcaucgugaacaacaccguguacgacccccugcagccugagcuggacagcuucaaggaggagcuggacaaguacuucaagaaccacaccagccccgacguggaucugggcgacaucagcggcaucaacgccagcguggugaacauccagaaggagaucgaccggcugaacgagguggccaagaaccugaacgagagccugaucgaccugcaggagcugggcaaguacgagcaguacaucaaguggcccugguacaucuggcugggcuucaucgccggccugaucgccaucgugaucgugaccaucaugcugugcugcaugaccagcugcuguagcugccugaagggcugcugcagcugcggcagcugcugcaaguucgacgaggacgacagcgagccagugcugaagggcgugaagcugcacuacaccugaggacuaguuauaagacugacuagcccgaugggccucccaacgggcccuccuccccuccuugcaccgagauuaauaaaaaaaaaaaaaaaaaaaaaaaaaaaaaaaaaaaaaaaaaaaaaaaaaaaaaaaaaaaaaaaaaaaaaaaaaaaaaaaaaaaaaaaaaaaaaaaaaaaa

SEQ ID NO: 25455 - RNA, 4002 nt, Artificial Sequence
  SARS-CoV-2/Wuhan/WIV05/2019__EPI_ISL_402128 spike protein mRNA gc (1-1273)(H69del_V70del_Y144del_N501Y_A570D_D614G_P681H_T716I_S982 A_D1118H)
aggagaaagcuuaccauguucguguuccuggugcugcugccccuggugagcagccagugcgugaaccugaccacccggacccagcugcccccugccuacaccaacagcuucacccggggcguguacuaccccgacaagguguuccggagcagcgugcugcacagcacccaggaccuguuccugcccuucuucagcaacgugaccugguuccacgccaucagcggcaccaacggcaccaagcgguucgacaacccagugcugcccuucaacgacggcguguacuucgccagcaccgagaagucaaacaucauccggggcuggaucuucggcaccacccuggacagcaagacacagagccugcugaucgugaacaacgccaccaacguggugaucaaggugugcgaguuucaguucugcaacgaccccuuccugggcguguaccacaagaacaacaagagcuggauggagagcgaguuccggguguacagcagcgcuaacaauugcaccuucgaguacgucagccagcccuuccugauggaccucgagggcaagcagggcaacuucaagaaccugcgggaguucguguucaagaacaucgauggcuacuucaagaucuacagcaagcacacccccaucaaccuggugcgggaccugccccagggauucagcgcccuggagccucugguggaccugcccaucggcaucaacaucaccagguuccagacccugcuggcccugcaccggagcuaccugacccccggcgacagcagcagcggcuggaccgccggcgccgccgcauacuacgugggcuaccugcagccacggaccuuccugcugaaguacaacgagaacggcaccaucaccgacgccguggacugcgcccuggacccccugagcgagaccaagugcacccuaaagagcuucaccguggagaagggcaucuaccagaccagcaacuuccgggugcagcccacugagagcaucgugcgguuccccaacauuaccaaccugugucccuucggcgagguguucaacgccacccgguucgccagcguguacgccuggaaccggaagcggaucagcaacugcguggccgacuacagcgugcuguacaacagcgccagcuucagcaccuucaagugcuacggcgugagcccuaccaagcugaacgaccugugcuucaccaacguguacgcugacagcuucgugauccggggcgacgaggugcggcagaucgcccccggccagaccggcaagaucgccgacuacaacuacaagcugcccgacgacuucaccggcugcgugaucgccuggaacagcaacaaccuggacagcaaggugggcggcaacuacaacuaccuguaccggcuguuccguaagagcaaccugaagccauucgagcgggacaucagcaccgagaucuaccaggccggcagcacccccugcaacgguguggagggcuuuaacugcuacuucccccugcagagcuacggcuuccagcccaccuacggcgugggcuaccagcccuaccgggugguggugcugagcuucgagcugcugcacgcccccgccaccgugugcggcccuaaaaagagcaccaaccuggugaagaacaagugcgugaacuucaacuucaauggccugaccggcaccggcgugcugaccgagagcaacaagaaguuccugcccuuccagcaguucggccgggauaucgacgacaccaccgacgccgugcgggacccccagacccuggagauccuggacaucaccccaugcagcuucggcggcgugagcgugaucacccccggcacaaacaccagcaaccaggucgcagugcuguaccagggagugaacugcaccgaggugcccguggccauccacgccgaccagcugacccccaccuggcggguguacagcaccggcagcaacguguuccagacccgggccggcugccugaucggcgccgagcacgugaacaacuccuacgagugcgacauccccaucggcgccggcaucugcgcuagcuaccagacccagaccaacagccaccggcgggcccggagcguggccagccagagcaucaucgccuacaccaugagcuuaggcgccgagaacagcguggccuacagcaacaacagcaucgccauccccaucaacuucaccauaagcgugaccaccgagauccugccugugagcaugaccaagaccagcguggacuguaccauguacaucugcggcgacagcaccgagugcagcaaccugcugcugcaguacggcagcuucugcacccagcugaaccgggcgcugaccggcaucgccguggagcaggacaagaacacccaagagguguucgcccaggugaagcagaucuacaagaccccacccaucaaggacuucggcggcuucaacuucagccagauccugcccgaccccagcaagcccagcaagcggagcuucaucgaggaccugcuguucaacaaggugacucuggccgacgccggcuucaucaagcaguacggcgauugccugggggacaucgccgcccgggaccugaucugcgcucagaaguucaacggccugaccgugcugccuccccugcugaccgacgagaugaucgcccaguacaccagcgcccugcuugccggcaccaucaccagcggcuggaccuucggcgccggcgccgcacugcagauccccuucgccaugcagauggccuaccgguucaacggcaucggcgugacccagaacgugcuguacgagaaccagaagcugaucgccaaccaguucaacagcgccaucggcaagauccaggacagccugagcagcaccgccagcgcccugggcaagcugcaggacguggugaaccagaacgcccaggcucugaacacccuggugaagcagcugagcagcaacuucggcgccaucagcucagugcugaacgacauccuggccaggcuggacaagguggaggccgaggugcagaucgaccggcugaucaccggccggcugcagagccugcagaccuacgugacccagcagcugauccgggccgccgagauucgggccagcgccaaucuggcagccaccaagaugagcgagugcgugcugggccagagcaagcggguggacuuuugcggcaagggcuaccaccugaugagcuucccccagagcgcuccccacggcgugguguuccuccacgugaccuacgucccagcccaggagaagaacuucacaaccgcccccgccaucugccacgacggcaaggcccacuucccccgggagggaguguucgugagcaacggcacccacugguucgugacccagcggaacuucuacgagccccagaucaucaccacccacaacaccuucgugagcggcaacugcgacguggugaucggcaucgugaacaacaccguguacgacccccugcagcccgagcuggacagcuucaaggaggagcuggacaaguacuucaagaaccacaccagcccugacguggaucugggcgacaucagcggcaucaacgccagcguggugaacauccagaaggagaucgaccggcugaacgagguggccaagaaccugaacgagagccugaucgaccugcaggagcugggcaaguacgagcaguacaucaaguggcccugguacaucuggcugggcuucaucgccggccugaucgccaucgugauggugaccaucaugcugugcugcaugaccagcugcuguagcugccugaagggcugcugcagcugcggcagcugcugcaaguucgacgaggacgacagcgagcccgugcugaagggcgugaagcugcacuacaccugaggacuaguuauaagacugacuagcccgaugggccucccaacgggcccuccuccccuccuugcaccgagauuaauaaaaaaaaaaaaaaaaaaaaaaaaaaaaaaaaaaaaaaaaaaaaaaaaaaaaaaaaaaaaaaaaaaaaaaaaaaaaaaaaaaaaaaaaaaaaaaaaaaaa

SEQ ID NO: 25456 - RNA, 4011 nt, Artificial Sequence
  SARS-CoV-2/Wuhan/WIV05/2019__EPI_ISL_402128 spike protein mRNA gc (1-1273)(K417N_E484K_N501Y_D614G)
aggagaaagcuuaccauguucguguuccuggugcugcugccccuggugagcagccagugcgugaaccugaccacccggacccagcugcccccugccuacaccaacagcuucacccggggcguguacuaccccgacaagguguuccggagcagcgugcugcacagcacccaggaccuguuccugcccuucuucagcaacgugaccugguuccacgccauccacgugagcggcaccaacggcaccaagcgguucgacaacccagugcugcccuucaacgacggcguguacuucgccagcaccgagaagucaaacaucauccggggcuggaucuucggcaccacccuggacagcaagacacagagccugcugaucgugaacaacgccaccaacguggugaucaaggugugcgaguuucaguucugcaacgaccccuuccugggcguguacuaccacaagaacaacaagagcuggauggagagcgaguuccgggucuacagcagcgcuaacaauugcaccuucgaguacgugagccagcccuuccugauggaccucgagggcaagcagggcaacuucaagaaccugcgggaguucguguucaagaacaucgauggcuacuucaagaucuacagcaagcacacccccaucaaccuggugcgggaccugccccagggauucagcgcccuggagccucugguggaccugcccaucggcaucaacaucaccagguuccagacccugcuggcccugcaccggagcuaccugacccccggcgacagcagcagcggcuggaccgccggcgccgccgcauacuacgugggcuaccugcagccacggaccuuccugcugaaguacaacgagaacggcaccaucaccgacgccguggacugcgcccuggacccccugagcgagaccaagugcacccuaaagagcuucaccguggagaagggcaucuaccagaccagcaacuuccgggugcagcccacugagagcaucgugcgguuccccaacauuaccaaccugugucccuucggcgagguguucaacgccacccgguucgccagcguguacgccuggaaccggaagcggaucagcaacugcguggccgacuacagcgugcuguacaacagcgccagcuucagcaccuucaagugcuacggcgugagcccuaccaagcugaacgaccugugcuucaccaacguguacgcugacagcuucgugauccggggcgacgaggugcggcagaucgcccccggccagaccggcaacaucgccgacuacaacuacaagcugcccgacgacuucaccggcugcgugaucgccuggaacagcaacaaccuggacagcaaggugggcggcaacuacaacuaccuguaccggcuguuccguaagagcaaccugaagccauucgagcgggacaucagcaccgagaucuaccaggccggcagcacccccugcaacggugugaagggcuuuaacugcuacuucccccugcagagcuacggcuuccagcccaccuacggcgugggcuaccagcccuaccgggugguggugcugagcuucgagcugcugcacgcccccgccaccgugugcggcccuaaaaagagcaccaaccuggugaagaacaagugcgugaacuucaauuucaacggccugaccggcaccggcgugcugaccgagagcaacaagaaguuccugcccuuccagcaguucggccgggauaucgccgacaccaccgacgcagugcgggacccccagacccuggagauccuggacaucaccccaugcagcuucggcggcgugagcgucaucacccccggcacaaacaccagcaaccagguggccgugcuguaccagggagugaacugcaccgaggugcccguggccauccacgccgaccagcugacccccaccuggcggguguacagcaccggcagcaacguguuccagacccgggccggcugccugaucggcgccgagcacgugaacaacuccuacgagugcgacauccccaucggcgcuggcaucugcgccagcuaccagacccagaccaacagcccccggcgggcccggagcguggccagccagagcaucaucgccuacaccaugagcuuaggcgccgagaacagcguggccuacagcaacaacagcaucgcgaucccuaccaacuucaccaucagcgugaccaccgagauacugcccgugagcaugaccaagaccagcguggacuguaccauguacaucugcggcgacagcaccgagugcagcaaccugcugcugcaguacggcagcuucugcacccagcugaaccgggcccugaccggcaucgccguggagcaggacaagaacacccaagagguguucgcccaggugaagcagaucuacaagacucccccaaucaaggacuucggcggcuucaacuucagccagauccugcccgaccccagcaagcccagcaagcggagcuucaucgaggaccugcuguucaacaaggugacccuggccgacgccggcuucaucaagcaguacggcgacugccugggggauaucgccgcucgggaccugaucugcgcccagaaguucaacggccugaccgugcugcccccucugcugaccgacgagaugaucgcccaguacaccagcgcccugcuugccggcaccaucaccagcggcuggaccuucggcgccggcgcagcccugcagauccccuucgccaugcagauggccuaccgguucaacggcaucggcgugacccagaacgugcuguacgagaaccagaagcugaucgccaaccaguucaacagcgccaucggcaagauccaggacagccugagcagcaccgccagcgcccugggcaagcugcaggacguggugaaccagaacgcucaggcccugaacacccuggugaagcagcugagcagcaacuucggcgccaucagcucagugcugaaugacauccugagcaggcuggacaagguggaggccgaggugcagaucgaccggcugaucaccggccggcugcagagccugcagaccuacgugacccagcagcugauccgggccgccgagauccgggccagcgccaaccuggcagccaccaagaugagcgagugcgugcugggccagagcaagcggguggacuuuugcggcaagggcuaccaccugaugagcuucccccagagcgccccacacggcgugguguuccuccacgucacauacgugcccgcccaggagaagaacuucaccaccgcccccgccauuugccacgacggcaaggcucacuucccccgggagggaguguucgugagcaacggcacccacugguucgugacccagcggaacuucuacgagccccagaucaucaccaccgacaacaccuucgugagcggcaacugcgacguggugaucggcaucgugaacaacaccguguacgacccccugcagccugagcuggacagcuucaaggaggagcuggacaaguacuucaagaaccacaccagccccgacguggaucugggcgacaucagcggcaucaacgccagcguggugaacauccagaaggagaucgaccggcugaacgagguggccaagaaccugaacgagagccugaucgaccugcaggagcugggcaaguacgagcaguacaucaaguggcccugguacaucuggcugggcuucaucgccggccugaucgccaucgugauggugaccaucaugcugugcugcaugaccagcugcuguagcugccugaagggcugcugcagcugcggcagcugcugcaaguucgacgaggacgacagcgagccagugcugaagggcgugaagcugcacuacaccugaggacuaguuauaagacugacuagcccgaugggccucccaacgggcccuccuccccuccuugcaccgagauuaauaaaaaaaaaaaaaaaaaaaaaaaaaaaaaaaaaaaaaaaaaaaaaaaaaaaaaaaaaaaaaaaaaaaaaaaaaaaaaaaaaaaaaaaaaaaaaaaaaaaa

SEQ ID NO: 25457 - RNA, 4002 nt, Artificial Sequence
  SARS-CoV-2/Wuhan/WIV05/2019__EPI_ISL_402128 spike protein mRNA gc (1-1273)(L18F_D80A_D215G_L242del_A243del_L244del_R246I_K417N_E484 K_N501Y_D614G_A701V)
aggagaaagcuuaccauguucguguuccuggugcugcugccccuggugagcagccagugcgugaacuucaccacccggacccagcugcccccugccuacaccaacagcuucacccggggcguguacuaccccgacaagguguuccggagcagcgugcugcacagcacccaggaccuguuccugcccuucuucagcaacgugaccugguuccacgccauccacgugagcggcaccaacggcaccaagcgguucgccaacccagugcugcccuucaacgacggcguguacuucgccagcaccgagaagucaaacaucauccggggcuggaucuuuggcaccacccuggacagcaagacacagagccugcugaucgugaacaacgcuaccaacguggugaucaaggugugcgaguuccaguucugcaacgaccccuuccugggcguguacuaccacaagaacaacaagagcuggauggagagcgaguuccgggucuacagcagcgccaacaauugcaccuucgaguacgugagccagcccuuccugauggaccuggagggcaagcagggcaacuucaagaaccuccgggaguucguguucaagaacaucgacggcuacuucaagaucuacagcaagcacacccccaucaaccuggugcggggacugccccagggcuucagcgcccuggagccucugguggaucugcccaucggcaucaacaucaccagguuccagacccugcacaucagcuaccugacccccggcgacagcagcagcggcuggaccgccggcgccgccgcauacuacgugggcuaccugcagccacggaccuuccugcugaaguacaacgagaacggcaccaucaccgacgccguggacugcgcccuggacccccugagcgagaccaagugcacccuuaagagcuucaccguggagaagggcaucuaccagaccagcaacuuccgggugcagcccacugagagcauugugcgguuccccaacaucaccaaccugugucccuucggcgagguguucaacgccacccgguucgccagcguguacgccuggaaccggaagcggaucagcaacugcguggccgacuacagcgugcuguacaacagcgccagcuucagcaccuucaagugcuacggcgugagcccuaccaagcugaacgaccugugcuucaccaacguguacgcugacagcuucgugauccggggcgacgaggugcggcagaucgcccccggccagaccggcaacaucgccgacuacaacuacaagcugcccgacgacuucaccggcugcgugaucgccuggaacagcaacaaccuggacagcaaggugggcggcaacuacaacuaccuguaccggcuauuccguaagagcaaccugaagccauuugagcgggacaucagcaccgagaucuaccaggccgguagcacccccugcaacggcgugaagggcuucaacugcuacuucccccugcagagcuacggcuuccagcccaccuacggcgugggcuaccagcccuaccgggugguggugcugagcuucgagcugcugcacgcccccgccaccgugugcggcccuaaaaagagcaccaaccuggugaagaacaagugcgugaacuucaauuucaacggccugaccggcaccggcgugcugaccgagagcaacaagaaguuccugcccuuccagcaguucggccgggacaucgccgacaccaccgaugcagugcgggacccccagacccuggagauccuggacaucaccccaugcagcuucggcggcgugagcgucaucacccccggaacaaacaccagcaaccagguggccgugcuguaccagggcgugaacugcaccgaggugcccguggccauccacgccgaccagcugacccccaccuggcggguguacagcaccggcagcaacguguuccagacccgggccggcugccugaucggcgccgagcacgugaacaacuccuacgagugcgacauccccaucggcgcuggcaucugcgccagcuaccagacccagaccaacagcccccggcgggcccggagcguggccagccagagcaucaucgccuacaccaugagccugggcguggagaacagcguggccuacagcaacaacagcaucgccaucccuaccaacuucaccauaagcgugaccaccgagauccugcccgugagcaugaccaagaccagcguggacuguaccauguacaucugcggcgacagcaccgagugcagcaaccuguuacugcaguacggcagcuucugcacccagcugaaccgggcgcugaccggcaucgccguggagcaggacaagaacacccaagagguguucgcccaggugaagcagaucuacaagacucccccaaucaaggacuucggcggcuucaacuucagccagauccugcccgaccccagcaagcccagcaagcggagcuucaucgaggaccugcuguucaacaaggugacccuggccgacgccggcuucaucaagcaguacggggacugccugggcgacaucgccgcccgggaccugaucugcgcucagaaguucaacggccugaccgugcugcccccucugcugaccgaugagaugaucgcccaguacaccagcgcccugcuggccggcaccaucaccagcggcuggaccuucggcgccggcgccgcacugcagauccccuucgccaugcagauggccuaccgguucaacggcaucggcgugacccagaacgugcuguacgagaaccagaagcugaucgccaaccaguucaacagcgccaucggcaagauccaggacagccugagcagcaccgccagcgcccugggcaagcugcaggacguggugaaccagaacgcccaggcucugaacacccuggugaagcagcugagcagcaacuuuggcgccaucagcucagugcugaaugacauccugagccggcuggacaagguggaggccgaggugcagaucgacaggcugaucaccggccggcugcagagccugcagaccuacgugacccagcagcugauccgggccgccgagauucgggccagcgccaaccuggccgcaaccaagaugagcgagugcgugcugggccagagcaagcggguggacuucugcggcaagggcuaccaccugaugagcuucccccagagcgccccacacggcguggucuuccugcacgugacauacgugcccgcccaggagaagaacuucaccaccgcccccgccaucugccacgacggaaaggcccacuucccccgggagggcguguucgugagcaacggcacccacugguucgugacccagcggaacuucuacgagccccagaucaucaccaccgacaacaccuucgugagcggcaacugcgacguggugaucggcaucgugaacaacaccguguacgacccccugcagccugagcuggacagcuucaaggaggagcucgacaaguacuucaagaaccacaccagccccgacguggaccugggcgacaucagcggcaucaacgcuagcguggugaacauccagaaggagaucgaucggcugaacgagguggccaagaaccugaacgagagccugaucgaccugcaggagcugggcaaguacgagcaguacaucaaguggcccugguacaucuggcugggcuucaucgccggccugaucgccaucgugauggugaccaucaugcugugcugcaugaccagcugcuguagcugccugaagggcugcugcagcugcggcagcugcugcaaguucgacgaggacgacagcgagccagugcugaagggcgugaagcugcacuacaccugaggacuaguuauaagacugacuagcccgaugggccucccaacgggcccuccuccccuccuugcaccgagauuaauaaaaaaaaaaaaaaaaaaaaaaaaaaaaaaaaaaaaaaaaaaaaaaaaaaaaaaaaaaaaaaaaaaaaaaaaaaaaaaaaaaaaaaaaaaaaaaaaaaaa

SEQ ID NO: 25458 - RNA, 4011 nt, Artificial Sequence
  SARS-CoV-2/Wuhan/WIV05/2019__EPI_ISL_402128 spike protein mRNA gc (1-1273)(E484K_D614G)
aggagaaagcuuaccauguucguguuccuggugcugcugccccuggugagcagccagugcgugaaccugaccacccggacccagcugcccccugccuacaccaacagcuucacccggggcguguacuaccccgacaagguguuccggagcagcgugcugcacagcacccaggaccuguuccugcccuucuucagcaacgugaccugguuccacgccauccacgugagcggcaccaacggcaccaagcgguucgacaacccagugcugcccuucaacgacggcguguacuucgccagcaccgagaagucaaacaucauccggggcuggaucuucggcaccacccuggacagcaagacacagagccugcugaucgugaacaacgccaccaacguggugaucaaggugugcgaguuucaguucugcaacgaccccuuccugggcguguacuaccacaagaacaacaagagcuggauggagagcgaguuccgggucuacagcagcgcuaacaauugcaccuucgaguacgugagccagcccuuccugauggaccucgagggcaagcagggcaacuucaagaaccugcgggaguucguguucaagaacaucgauggcuacuucaagaucuacagcaagcacacccccaucaaccuggugcgggaccugccccagggauucagcgcccuggagccucugguggaccugcccaucggcaucaacaucaccagguuccagacccugcuggcccugcaccggagcuaccugacccccggcgacagcagcagcggcuggaccgccggcgccgccgcauacuacgugggcuaccugcagccacggaccuuccugcugaaguacaacgagaacggcaccaucaccgacgccguggacugcgcccuggacccccugagcgagaccaagugcacccuaaagagcuucaccguggagaagggcaucuaccagaccagcaacuuccgggugcagcccacugagagcaucgugcgguuccccaacauuaccaaccugugucccuucggcgagguguucaacgccacccgguucgccagcguguacgccuggaaccggaagcggaucagcaacugcguggccgacuacagcgugcuguacaacagcgccagcuucagcaccuucaagugcuacggcgugagcccuaccaagcugaacgaccugugcuucaccaacguguacgcugacagcuucgugauccggggcgacgaggugcggcagaucgcccccggccagaccggcaagaucgccgacuacaacuacaagcugcccgacgacuucaccggcugcgugaucgccuggaacagcaacaaccuggacagcaaggugggcggcaacuacaacuaccuguaccggcuguuccguaagagcaaccugaagccauucgagcgggacaucagcaccgagaucuaccaggccggcagcacccccugcaacggugugaagggcuuuaacugcuacuucccccugcagagcuacggcuuccagcccaccaacggcgugggcuaccagcccuaccgggugguggugcugagcuucgagcugcugcacgcccccgccaccgugugcggcccuaaaaagagcaccaaccuggugaagaacaagugcgugaacuucaauuucaacggccugaccggcaccggcgugcugaccgagagcaacaagaaguuccugcccuuccagcaguucggccgggauaucgccgacaccaccgacgcagugcgggacccccagacccuggagauccuggacaucaccccaugcagcuucggcggcgugagcgucaucacccccggcacaaacaccagcaaccagguggccgugcuguaccagggagugaacugcaccgaggugcccguggccauccacgccgaccagcugacccccaccuggcggguguacagcaccggcagcaacguguuccagacccgggccggcugccugaucggcgccgagcacgugaacaacuccuacgagugcgacauccccaucggcgcuggcaucugcgccagcuaccagacccagaccaacagcccccggcgggcccggagcguggccagccagagcaucaucgccuacaccaugagcuuaggcgccgagaacagcguggccuacagcaacaacagcaucgcgaucccuaccaacuucaccaucagcgugaccaccgagauacugcccgugagcaugaccaagaccagcguggacuguaccauguacaucugcggcgacagcaccgagugcagcaaccugcugcugcaguacggcagcuucugcacccagcugaaccgggcccugaccggcaucgccguggagcaggacaagaacacccaagagguguucgcccaggugaagcagaucuacaagacucccccaaucaaggacuucggcggcuucaacuucagccagauccugcccgaccccagcaagcccagcaagcggagcuucaucgaggaccugcuguucaacaaggugacccuggccgacgccggcuucaucaagcaguacggcgacugccugggggauaucgccgcucgggaccugaucugcgcccagaaguucaacggccugaccgugcugcccccucugcugaccgacgagaugaucgcccaguacaccagcgcccugcuugccggcaccaucaccagcggcuggaccuucggcgccggcgcagcccugcagauccccuucgccaugcagauggccuaccgguucaacggcaucggcgugacccagaacgugcuguacgagaaccagaagcugaucgccaaccaguucaacagcgccaucggcaagauccaggacagccugagcagcaccgccagcgcccugggcaagcugcaggacguggugaaccagaacgcucaggcccugaacacccuggugaagcagcugagcagcaacuucggcgccaucagcucagugcugaaugacauccugagcaggcuggacaagguggaggccgaggugcagaucgaccggcugaucaccggccggcugcagagccugcagaccuacgugacccagcagcugauccgggccgccgagauccgggccagcgccaaccuggcagccaccaagaugagcgagugcgugcugggccagagcaagcggguggacuuuugcggcaagggcuaccaccugaugagcuucccccagagcgccccacacggcgugguguuccuccacgucacauacgugcccgcccaggagaagaacuucaccaccgcccccgccauuugccacgacggcaaggcucacuucccccgggagggaguguucgugagcaacggcacccacugguucgugacccagcggaacuucuacgagccccagaucaucaccaccgacaacaccuucgugagcggcaacugcgacguggugaucggcaucgugaacaacaccguguacgacccccugcagccugagcuggacagcuucaaggaggagcuggacaaguacuucaagaaccacaccagccccgacguggaucugggcgacaucagcggcaucaacgccagcguggugaacauccagaaggagaucgaccggcugaacgagguggccaagaaccugaacgagagccugaucgaccugcaggagcugggcaaguacgagcaguacaucaaguggcccugguacaucuggcugggcuucaucgccggccugaucgccaucgugauggugaccaucaugcugugcugcaugaccagcugcuguagcugccugaagggcugcugcagcugcggcagcugcugcaaguucgacgaggacgacagcgagccagugcugaagggcgugaagcugcacuacaccugaggacuaguuauaagacugacuagcccgaugggccucccaacgggcccuccuccccuccuugcaccgagauuaauaaaaaaaaaaaaaaaaaaaaaaaaaaaaaaaaaaaaaaaaaaaaaaaaaaaaaaaaaaaaaaaaaaaaaaaaaaaaaaaaaaaaaaaaaaaaaaaaaaaa

SEQ ID NO: 25459 - RNA, 4011 nt, Artificial Sequence
  SARS-CoV-2/Wuhan/WIV05/2019__EPI_ISL_402128 spike protein mRNA gc (1-1273)(L18F_T20N_P26S_D138Y_R190S_K417T_E484K_N501Y_D614G_H655Y _T1027I)
aggagaaagcuuaccauguucguguuccuggugcugcugccccuggugagcagccagugcgugaacuucaccaaccggacccagcugcccagcgccuacaccaacagcuucacccggggcguguacuacccugacaagguguuccggagcagcgugcugcacagcacccaggaccuguuccugcccuucuucagcaacgugaccugguuccacgccauccacgugagcggcaccaacggcaccaagcgguucgacaaccccgugcugccauucaacgacggcguguacuucgccagcaccgagaagucaaacaucauccggggcuggaucuuuggcaccacccuggacagcaagacccagagccugcugaucgugaacaacgccacaaacguggugaucaaggugugcgaguuccaguucugcaacuaccccuuccugggcguguacuaccacaagaacaacaagagcuggauggagagcgaguuccgggucuacagcagcgcuaauaacugcaccuucgaguacgugagccagcccuuccugauggaccuggagggcaagcagggcaacuucaagaaccucagcgaguucguguucaagaacaucgacggcuacuucaagaucuacagcaagcacacccccaucaaccuggugcgggaucugccccagggauucagcgcccuggagccccugguggaccugccuaucggcaucaacaucacccgguuccagacccugcuggcccugcacaggagcuaccugacccccggcgacagcagcagcggcuggaccgccggcgccgccgcauacuacgugggcuaccugcagccccggaccuuccugcugaaguacaacgagaacggcaccaucaccgacgccguggacugcgcccuggacccacugagcgagaccaagugcacccuaaagagcuucaccguggagaagggcaucuaccagaccagcaacuuccgggugcagcccaccgagagcaucgugcgguuccccaacauuacuaaccugugucccuucggcgagguguucaacgccacccgguucgccagcguguacgccuggaaccggaagcggaucagcaacugcguggccgacuacagcgugcuguacaacagcgccagcuucagcaccuucaagugcuacggcgugagccccaccaagcugaacgaccugugcuucaccaacguguacgcugacagcuucgugauccggggcgacgaggugcggcagaucgccccuggccagaccggcaccaucgccgacuacaacuacaagcugcccgacgacuucaccggcugcgugaucgccuggaacagcaacaaccuggacagcaaggugggcggcaacuacaacuaccuguaccggcuguuccguaagagcaaccugaagcccuuugagcgggacaucagcaccgagaucuaccaggccggcagcaccccaugcaacggugugaagggcuucaacugcuacuucccccugcagagcuacggcuuccagcccaccuacggcgugggcuaccagcccuaccgggugguggugcugagcuucgagcugcugcacgcccccgccaccgugugcggccccaaaaagagcaccaaccuggugaagaacaagugcgugaacuucaauuucaacggccugaccggcaccggcgugcugaccgagagcaacaagaaguuccugccuuuccagcaguucggccgggacaucgccgauaccaccgacgcagugcgggacccccagacccuggagauccuggacaucacccccugcagcuucggcggcgugagcgucaucaccccaggcacaaacaccagcaaccagguggccgugcuguaccagggagugaacugcaccgaggugcccguggccauccacgccgaccagcugacccccaccuggcggguguacuccaccggcagcaacguguuccagacccgggccggcugccugaucggcgccgaguacgugaacaacagcuacgagugcgacauccccaucggcgcuggcaucugcgccagcuaccagacccagaccaacagcccccggcgggcccggagcguggccagccagagcaucaucgccuacaccaugagccugggcgccgagaacagcguggccuacagcaacaacagcaucgcgauccccaccaacuucaccaucagcgugaccaccgagauauuaccugugagcaugaccaagaccagcguggacuguaccauguacaucugcggcgacagcaccgagugcagcaaccugcugcugcaguacggcagcuucugcacccagcugaaccgggcccugaccggcaucgccguggagcaggacaagaacacccaagagguguucgcccaggugaagcagaucuacaagacuccacccaucaaggacuucggcggcuucaacuucagccagauccugcccgaccccagcaagcccagcaagcggagcuucaucgaggaccugcuguucaacaaggugacccuggccgacgccggcuucaucaagcaguacggcgacugccugggggacaucgccgcucgggaucugaucugcgcccagaaguucaacggccugaccgugcugccuccccugcugaccgacgagaugaucgcccaguacaccagcgcccugcuggccggcaccaucaccagcggcuggaccuucggcgccggcgcagcccuucagauccccuucgccaugcagauggccuaccgguucaacggcaucggcgugacccagaacgugcuguacgagaaccagaagcugaucgccaaccaguucaacagcgccaucggcaagauccaggacagccugagcagcaccgccagcgcccugggcaagcugcaggacguggugaaccagaacgcucaggcccugaacacccuggugaagcagcugagcucaaacuuuggcgccaucagcagcgugcugaaugacauccugagccggcuggacaagguggaggccgaggugcagaucgacaggcugaucaccggccggcugcagagccugcagaccuacgugacccagcagcugauccgggccgccgagauccgggccagcgccaaccuggcagccauuaagaugagcgagugcgugcugggccagagcaagcggguggacuucugcggcaagggcuaccaccugaugagcuucccccagagcgcuccccacggcgugguguuccugcacgucaccuacgugccagcccaggagaagaacuucacaaccgcccccgccaucugccacgacggcaaggcccacuucccccgggagggaguguucgugagcaacggcacccacugguucgugacccagcggaacuucuacgagccccagaucaucaccaccgacaacaccuucgugagcggcaacugcgacguggugaucggcaucgugaacaacaccguguacgacccccuccagcccgagcuggacagcuucaaggaggagcuggacaaguacuucaagaaccacaccagcccugacguggaccugggcgauaucagcggcaucaacgccagcguggugaacauccagaaggagaucgaccggcugaacgagguggccaagaaccugaacgagagccugaucgaccugcaggagcugggcaaguacgagcaguacaucaaguggcccugguacaucuggcugggcuucaucgccggccugaucgccaucgugauggugaccaucaugcugugcugcaugaccagcugcuguagcugccugaagggcugcugcagcugcggcagcugcugcaaguucgacgaggacgacagcgagcccgugcugaagggcgugaagcugcacuacaccugaggacuaguuauaagacugacuagcccgaugggccucccaacgggcccuccuccccuccuugcaccgagauuaauaaaaaaaaaaaaaaaaaaaaaaaaaaaaaaaaaaaaaaaaaaaaaaaaaaaaaaaaaaaaaaaaaaaaaaaaaaaaaaaaaaaaaaaaaaaaaaaaaaaa

SEQ ID NO: 25460 - RNA, 4011 nt, Artificial Sequence
  SARS-CoV-2/Wuhan/WIV05/2019__EPI_ISL_402128 spike protein mRNA gc (1-1273)(S13I_W152C_L452R_D614G)
aggagaaagcuuaccauguucguguuccuggugcugcugccccuggugagcauccagugcgugaaccugaccacccggacccagcugcccccugccuacaccaacagcuucacccggggcguguacuaccccgacaagguguuccggagcagcgugcugcacagcacccaggaccuguuccugcccuucuucagcaacgugaccugguuccacgccauccacgugagcggcaccaacggcaccaagcgguucgacaacccagugcugcccuucaacgacggcguguacuucgccagcaccgagaagucaaacaucauccggggcuggaucuucggcaccacccuggacagcaagacacagagccugcugaucgugaacaacgccaccaacguggugaucaaggugugcgaguuucaguucugcaacgaccccuuccugggcguguacuaccacaagaacaacaagagcugcauggagagcgaguuccgggucuacagcagcgcuaacaauugcaccuucgaguacgugagccagcccuuccugauggaccucgagggcaagcagggcaacuucaagaaccugcgggaguucguguucaagaacaucgauggcuacuucaagaucuacagcaagcacacccccaucaaccuggugcgggaccugccccagggauucagcgcccuggagccucugguggaccugcccaucggcaucaacaucaccagguuccagacccugcuggcccugcaccggagcuaccugacccccggcgacagcagcagcggcuggaccgccggcgccgccgcauacuacgugggcuaccugcagccacggaccuuccugcugaaguacaacgagaacggcaccaucaccgacgccguggacugcgcccuggacccccugagcgagaccaaguguacccuaaagagcuucaccguggagaagggcaucuaccagaccagcaacuuccgggugcagcccacugagagcauugugcgguuccccaacaucaccaaccugugccccuucggcgagguguucaacgccacccgguucgccagcguguacgccuggaaccggaagcggaucagcaacugcguggccgacuacagcgugcuguacaacagcgccagcuucagcaccuucaagugcuacggcgugagcccuaccaagcugaacgaccugugcuucaccaacguguacgcugacagcuucgugauccggggcgacgaggugcggcagaucgcccccggccagaccggcaagaucgccgacuacaacuacaagcugcccgacgacuucaccggcugcgugaucgccuggaacagcaacaaccuggacagcaaggugggcggcaacuacaacuaccgguaccggcuguuccguaagagcaaccugaagccauucgagcgggacaucagcaccgagaucuaccaggccggcagcacccccugcaacgguguggagggcuuuaacugcuacuucccccugcagagcuacggcuuccagcccaccaacggcgugggcuaccagcccuaccgggugguggugcugagcuucgagcugcugcacgcccccgccaccgugugcggcccuaaaaagagcaccaaccuggugaagaacaagugcgugaacuucaauuucaacggccugaccggcaccggcgugcugaccgagagcaacaagaaguuccugcccuuccagcaguucggccgggauaucgccgacaccaccgacgcagugcgggacccccagacccuggagauccuggacaucaccccaugcagcuucggcggcgugagcgucaucacccccggcacaaacaccagcaaccagguggccgugcuguaccagggagugaacugcaccgaggugcccguggccauccacgccgaccagcugacccccaccuggcggguguacagcaccggcagcaacguguuccagacccgggccggcugccugaucggcgccgagcacgugaacaacagcuacgagugcgacauccccaucggcgcuggcaucugugccuccuaccagacccagaccaacagcccccggcgggcccggagcguggccagccagagcaucaucgccuacaccaugagccugggcgccgagaacagcguggccuacagcaacaacagcaucgcgaucccuaccaacuucaccauaagcgugaccaccgagaucuuacccgugagcaugaccaagaccagcguggacugcaccauguacaucugcggcgacagcaccgagugcagcaaccugcugcugcaguacggcagcuucugcacccagcugaaccgggcccugaccggcaucgccguggagcaggacaagaacacccaagagguguucgcccaggugaagcagaucuacaagacucccccaaucaaggacuucggcggcuucaacuucagccagauccugcccgaccccagcaagcccagcaagcggagcuucaucgaggaccugcuguucaacaaggugacccuggccgacgccggcuucaucaagcaguacggcgacugccugggggauaucgccgcucgggaccugaucugcgcccagaaguucaacggccugaccgugcugcccccucugcugaccgacgagaugaucgcccaguacaccagcgcccugcuggccggcaccaucaccagcggcuggaccuucggcgccggcgcagcccuucagauccccuucgccaugcagauggccuacagguucaacggcaucggcgugacccagaacgugcuguacgagaaccagaagcugaucgccaaccaguucaacagcgccaucggcaagauccaggacagccugagcagcaccgccagcgcccugggcaagcugcaggacguggugaaccagaacgcucaggcccugaacacccuggugaagcagcugagcagcaacuucggcgccaucagcagcgugcugaaugacauccugucacggcuggacaagguggaggccgaggugcagaucgaccggcugaucaccggccggcugcagagccugcagaccuacgugacccagcagcugauccgggccgccgagauucgggccagcgccaaccuggcagccaccaagaugagcgagugcgugcugggccagagcaagcggguggacuuuugcggcaagggcuaccaccugaugagcuucccccagagcgccccacacggcgugguguuccugcacgucacauacgugcccgcccaggagaagaacuucaccaccgcccccgccaucugccacgacggcaaggcucacuucccccgggagggaguguucgugagcaacggcacccacugguucgugacccagcggaacuucuacgagccccagaucaucaccaccgacaacaccuucgugagcggcaacugcgacguggugaucggcaucgugaacaacaccguguacgacccccuccagccugagcuggacagcuucaaggaggagcuggacaaguacuucaagaaccacaccagccccgacguggaucugggcgacaucagcggcaucaacgccagcguggugaacauccagaaggagaucgaccggcugaacgagguggccaagaaccugaacgagagccugaucgaccugcaggagcugggcaaguacgagcaguacaucaaguggcccugguacaucuggcugggcuucaucgccggccugaucgccaucgugauggugaccaucaugcugugcugcaugaccagcuguugcagcugccugaagggcugcugcagcugcggcagcugcugcaaguucgacgaggacgacagcgagccagugcugaagggcgugaagcugcacuacaccugaggacuaguuauaagacugacuagcccgaugggccucccaacgggcccuccuccccuccuugcaccgagauuaauaaaaaaaaaaaaaaaaaaaaaaaaaaaaaaaaaaaaaaaaaaaaaaaaaaaaaaaaaaaaaaaaaaaaaaaaaaaaaaaaaaaaaaaaaaaaaaaaaaaa

SEQ ID NO: 25461 - RNA, 4011 nt, Artificial Sequence
  SARS-CoV-2/Wuhan/WIV05/2019__EPI_ISL_402128 spike protein mRNA gc mod (1-1273)
aggagaaagcuuaccauguucguguuucuggugcugcugccccugguguccagccagugugugaaccugaccaccagaacacagcugccuccagccuacaccaacagcuucaccagaggcguguacuaccccgacaagguguucagauccagcgugcugcacucuacccaggaccuguuccugccuuucuucagcaacgugaccugguuccacgccauccacguguccggcaccaauggcaccaagagauucgacaaccccgugcugcccuucaacgacgggguguacuuugccagcaccgagaaguccaacaucaucagaggcuggaucuucggcaccacacuggacagcaagacccagagccugcugaucgugaacaacgccaccaacguggucaucaaagugugcgaguuccaguucugcaacgaccccuuccugggcgucuacuaccacaagaacaacaagagcuggauggaaagcgaguuccggguguacagcagcgccaacaacugcaccuucgaguacgugucccagccuuuccugauggaccuggaaggcaagcagggcaacuucaagaaccugcgcgaguucguguucaagaacaucgacggcuacuucaaaaucuacagcaagcacaccccuaucaaccucgugcgggaucugccucagggcuucucugcucuggaaccccugguggaucugcccaucggcaucaacaucacccgguuucagacacugcuggcccugcacagaagcuaccugacaccuggcgauagcagcagcggauggacagcuggugccgccgcuuacuaugugggcuaccugcagccuagaaccuuccugcugaaguacaacgagaacggcaccaucaccgacgccguggauugugcucuggauccucugagcgagacaaagugcacccugaaguccuucaccguggaaaagggcaucuaccagaccagcaacuuccgggugcagcccaccgaauccaucgugcgguuccccaauaucaccaaucugugccccuucggcgagguguucaaugccaccagauucgccucuguguacgccuggaaccggaagcggaucagcaauugcguggccgacuacuccgugcuguacaacuccgccagcuucagcaccuucaagugcuacggcguguccccuaccaagcugaacgaccugugcuucacaaacguguacgccgacagcuucgugauccggggagaugaagugcggcagauugccccuggacagacaggcaagaucgccgacuacaacuacaagcugcccgacgacuucaccggcugugugauugccuggaacagcaacaaccuggacuccaaagucggcggcaacuacaauuaccuguaccggcuguuccggaaguccaaucugaagcccuucgagcgggacaucagcaccgaaaucuaucaggccggcagcaccccuugcaacggcguggaaggcuucaacugcuacuucccacugcaguccuacggcuuucagcccacaaauggcgugggcuaucagcccuacagagugguggugcugagcuucgaacugcugcaugcuccugccacagugugcggcccuaagaaaagcaccaaucucgugaagaacaaaugcgugaacuucaacuucaacggccugaccggcaccggcgugcugacagagagcaacaagaaguuccugccauuccagcaguuuggccgggauaucgccgauaccacagacgccguuagagauccccagacacuggaaauccuggacaucaccccaugcagcuucggcggagugucugugaucaccccuggcaccaacaccagcaaucagguggcagugcuguaccaggacgugaacuguaccgaagugcccguggccauucacgccgaucagcugacaccuacauggcggguguacuccaccggcagcaauguguuucagaccagagccggcugucugaucggagccgagcacgugaacaauagcuacgagugcgacauccccaucggcgcuggcaucugugccagcuaccagacacagacaaacagccccagacgggcuagaagcguggccagccagagcaucauugccuacacaaugucucugggcgccgagaacagcguggccuacuccaacaacucuaucgcuauccccaccaacuucaccaucagcgugaccaccgagauccugccuguguccaugaccaagaccagcguggacugcaccauguacaucugcggcgauuccaccgagugcuccaaccugcugcugcaguacggcagcuucugcacccagcugaauagagcccugacagggaucgccguggaacaggacaagaacacccaagagguguucgcccaagugaagcaaaucuacaagaccccuccuaucaaggacuucggcggcuucaauuucagccagauucugcccgauccuagcaagcccagcaagcggagcuucaucgaggaccugcuguucaacaaagugacacuggccgacgccggcuucaucaagcaguauggcgauugucugggcgacauugccgccagggaucugauuugcgcccagaaguuuaacggacugacagugcugccuccucugcugaccgaugagaugaucgcccaguacacaucugcccugcuggccggcacaaucacaagcggcuggacauuuggagcuggcgccgcucugcagauccccuuugcuaugcagauggccuaccgguucaacggcaucggagugacccagaaugugcuguacgagaaccagaagcugaucgccaaccaguucaacagcgccaucggcaagauccaggacagccugagcagcacagcaagcgcccugggaaagcugcaggacguggucaaccagaaugcccaggcacugaacacccuggucaagcagcuguccuccaacuucggcgccaucagcucugugcugaacgauauccugagcagacuggacaaggucgaggccgaggugcagaucgacagacugaucacaggcagacugcagagccuccagacauacgugacccagcagcugaucagagccgccgagauuagagccucugccaaucuggccgccaccaagaugucugagugugugcugggccagagcaagagaguggacuuuugcggcaagggcuaccaccugaugagcuucccucagucugccccucacggcgugguguuucugcacgugacauaugugcccgcucaagagaagaauuucaccaccgcuccagccaucugccacgacggcaaagcccacuuuccuagagaaggcguguucguguccaacggcacccauugguucgugacacagcggaacuucuacgagccccagaucaucaccaccgacaacaccuucgugucuggcaacugcgacguugugaucggcauugugaacaauaccguguacgacccucugcagcccgagcuggacagcuucaaagaggaacuggacaaguacuuuaagaaccacacaagccccgacguggaccugggcgauaucagcggaaucaaugccagcgucgugaacauccagaaagagaucgaccggcugaacgagguggccaagaaucugaacgagagccugaucgaccugcaagaacuggggaaguacgagcaguacaucaaguggcccugguacaucuggcugggcuuuaucgccggacugauugccaucgugauggucacaaucaugcuguguugcaugaccagcugcuguagcugccugaagggcuguuguagcuguggcagcugcugcaaguucgacgaggacgauucugagcccgugcugaagggcgugaaacugcacuacaccugaggacuaguuauaagacugacuagcccgaugggccucccaacgggcccuccuccccuccuugcaccgagauuaauaaaaaaaaaaaaaaaaaaaaaaaaaaaaaaaaaaaaaaaaaaaaaaaaaaaaaaaaaaaaaaaaaaaaaaaaaaaaaaaaaaaaaaaaaaaaaaaaaaaa

SEQ ID NO: 25462 - RNA, 4011 nt, Artificial Sequence
  SARS-CoV-2/Wuhan/WIV05/2019__EPI_ISL_402128 spike protein mRNA gc mod (1-1273)(D614G)
aggagaaagcuuaccauguucguguuucuggugcugcugccccugguguccagccagugugugaaccugaccaccagaacacagcugccuccagccuacaccaacagcuucaccagaggcguguacuaccccgacaagguguucagauccagcgugcugcacucuacccaggaccuguuccugccuuucuucagcaacgugaccugguuccacgccauccacguguccggcaccaauggcaccaagagauucgacaaccccgugcugcccuucaacgacgggguguacuuugccagcaccgagaaguccaacaucaucagaggcuggaucuucggcaccacacuggacagcaagacccagagccugcugaucgugaacaacgccaccaacguggucaucaaagugugcgaguuccaguucugcaacgaccccuuccugggcgucuacuaccacaagaacaacaagagcuggauggaaagcgaguuccggguguacagcagcgccaacaacugcaccuucgaguacgugucccagccuuuccugauggaccuggaaggcaagcagggcaacuucaagaaccugcgcgaguucguguucaagaacaucgacggcuacuucaaaaucuacagcaagcacaccccuaucaaccucgugcgggaucugccucagggcuucucugcucuggaaccccugguggaucugcccaucggcaucaacaucacccgguuucagacacugcuggcccugcacagaagcuaccugacaccuggcgauagcagcagcggauggacagcuggugccgccgcuuacuaugugggcuaccugcagccuagaaccuuccugcugaaguacaacgagaacggcaccaucaccgacgccguggauugugcucuggauccucugagcgagacaaagugcacccugaaguccuucaccguggaaaagggcaucuaccagaccagcaacuuccgggugcagcccaccgaauccaucgugcgguuccccaauaucaccaaucugugccccuucggcgagguguucaaugccaccagauucgccucuguguacgccuggaaccggaagcggaucagcaauugcguggccgacuacuccgugcuguacaacuccgccagcuucagcaccuucaagugcuacggcguguccccuaccaagcugaacgaccugugcuucacaaacguguacgccgacagcuucgugauccggggagaugaagugcggcagauugccccuggacagacaggcaagaucgccgacuacaacuacaagcugcccgacgacuucaccggcugugugauugccuggaacagcaacaaccuggacuccaaagucggcggcaacuacaauuaccuguaccggcuguuccggaaguccaaucugaagcccuucgagcgggacaucagcaccgaaaucuaucaggccggcagcaccccuugcaacggcguggaaggcuucaacugcuacuucccacugcaguccuacggcuuucagcccacaaauggcgugggcuaucagcccuacagagugguggugcugagcuucgaacugcugcaugcuccugccacagugugcggcccuaagaaaagcaccaaucucgugaagaacaaaugcgugaacuucaacuucaacggccugaccggcaccggcgugcugacagagagcaacaagaaguuccugccauuccagcaguuuggccgggauaucgccgauaccacagacgccguuagagauccccagacacuggaaauccuggacaucaccccaugcagcuucggcggagugucugugaucaccccuggcaccaacaccagcaaucagguggcagugcuguaccagggcgugaacuguaccgaagugcccguggccauucacgccgaucagcugacaccuacauggcggguguacuccaccggcagcaauguguuucagaccagagccggcugucugaucggagccgagcacgugaacaauagcuacgagugcgacauccccaucggcgcuggcaucugugccagcuaccagacacagacaaacagccccagacgggcuagaagcguggccagccagagcaucauugccuacacaaugucucugggcgccgagaacagcguggccuacuccaacaacucuaucgcuauccccaccaacuucaccaucagcgugaccaccgagauccugccuguguccaugaccaagaccagcguggacugcaccauguacaucugcggcgauuccaccgagugcuccaaccugcugcugcaguacggcagcuucugcacccagcugaauagagcccugacagggaucgccguggaacaggacaagaacacccaagagguguucgcccaagugaagcaaaucuacaagaccccuccuaucaaggacuucggcggcuucaauuucagccagauucugcccgauccuagcaagcccagcaagcggagcuucaucgaggaccugcuguucaacaaagugacacuggccgacgccggcuucaucaagcaguauggcgauugucugggcgacauugccgccagggaucugauuugcgcccagaaguuuaacggacugacagugcugccuccucugcugaccgaugagaugaucgcccaguacacaucugcccugcuggccggcacaaucacaagcggcuggacauuuggagcuggcgccgcucugcagauccccuuugcuaugcagauggccuaccgguucaacggcaucggagugacccagaaugugcuguacgagaaccagaagcugaucgccaaccaguucaacagcgccaucggcaagauccaggacagccugagcagcacagcaagcgcccugggaaagcugcaggacguggucaaccagaaugcccaggcacugaacacccuggucaagcagcuguccuccaacuucggcgccaucagcucugugcugaacgauauccugagcagacuggacaaggucgaggccgaggugcagaucgacagacugaucacaggcagacugcagagccuccagacauacgugacccagcagcugaucagagccgccgagauuagagccucugccaaucuggccgccaccaagaugucugagugugugcugggccagagcaagagaguggacuuuugcggcaagggcuaccaccugaugagcuucccucagucugccccucacggcgugguguuucugcacgugacauaugugcccgcucaagagaagaauuucaccaccgcuccagccaucugccacgacggcaaagcccacuuuccuagagaaggcguguucguguccaacggcacccauugguucgugacacagcggaacuucuacgagccccagaucaucaccaccgacaacaccuucgugucuggcaacugcgacguugugaucggcauugugaacaauaccguguacgacccucugcagcccgagcuggacagcuucaaagaggaacuggacaaguacuuuaagaaccacacaagccccgacguggaccugggcgauaucagcggaaucaaugccagcgucgugaacauccagaaagagaucgaccggcugaacgagguggccaagaaucugaacgagagccugaucgaccugcaagaacuggggaaguacgagcaguacaucaaguggcccugguacaucuggcugggcuuuaucgccggacugauugccaucgugauggucacaaucaugcuguguugcaugaccagcugcuguagcugccugaagggcuguuguagcuguggcagcugcugcaaguucgacgaggacgauucugagcccgugcugaagggcgugaaacugcacuacaccugaggacuaguuauaagacugacuagcccgaugggccucccaacgggcccuccuccccuccuugcaccgagauuaauaaaaaaaaaaaaaaaaaaaaaaaaaaaaaaaaaaaaaaaaaaaaaaaaaaaaaaaaaaaaaaaaaaaaaaaaaaaaaaaaaaaaaaaaaaaaaaaaaaaa

SEQ ID NO: 25463 - RNA, 4011 nt, Artificial Sequence
  SARS-CoV-2/Wuhan/WIV05/2019__EPI_ISL_402128 spike protein mRNA gc mod (1-1273)(A222V_D614G)
aggagaaagcuuaccauguucguguuucuggugcugcugccccugguguccagccagugugugaaccugaccaccagaacacagcugccuccagccuacaccaacagcuucaccagaggcguguacuaccccgacaagguguucagauccagcgugcugcacucuacccaggaccuguuccugccuuucuucagcaacgugaccugguuccacgccauccacguguccggcaccaauggcaccaagagauucgacaaccccgugcugcccuucaacgacgggguguacuuugccagcaccgagaaguccaacaucaucagaggcuggaucuucggcaccacacuggacagcaagacccagagccugcugaucgugaacaacgccaccaacguggucaucaaagugugcgaguuccaguucugcaacgaccccuuccugggcgucuacuaccacaagaacaacaagagcuggauggaaagcgaguuccggguguacagcagcgccaacaacugcaccuucgaguacgugucccagccuuuccugauggaccuggaaggcaagcagggcaacuucaagaaccugcgcgaguucguguucaagaacaucgacggcuacuucaaaaucuacagcaagcacaccccuaucaaccucgugcgggaucugccucagggcuucucugugcuggaaccccugguggaucugcccaucggcaucaacaucacccgguuucagacacugcuggcccugcacagaagcuaccugacaccuggcgauagcagcagcggauggacagcuggugccgccgcuuacuaugugggcuaccugcagccuagaaccuuccugcugaaguacaacgagaacggcaccaucaccgacgccguggauugugcucuggauccucugagcgagacaaagugcacccugaaguccuucaccguggaaaagggcaucuaccagaccagcaacuuccgggugcagcccaccgaauccaucgugcgguuccccaauaucaccaaucugugccccuucggcgagguguucaaugccaccagauucgccucuguguacgccuggaaccggaagcggaucagcaauugcguggccgacuacuccgugcuguacaacuccgccagcuucagcaccuucaagugcuacggcguguccccuaccaagcugaacgaccugugcuucacaaacguguacgccgacagcuucgugauccggggagaugaagugcggcagauugccccuggacagacaggcaagaucgccgacuacaacuacaagcugcccgacgacuucaccggcugugugauugccuggaacagcaacaaccuggacuccaaagucggcggcaacuacaauuaccuguaccggcuguuccggaaguccaaucugaagcccuucgagcgggacaucagcaccgaaaucuaucaggccggcagcaccccuugcaacggcguggaaggcuucaacugcuacuucccacugcaguccuacggcuuucagcccacaaauggcgugggcuaucagcccuacagagugguggugcugagcuucgaacugcugcaugcuccugccacagugugcggcccuaagaaaagcaccaaucucgugaagaacaaaugcgugaacuucaacuucaacggccugaccggcaccggcgugcugacagagagcaacaagaaguuccugccauuccagcaguuuggccgggauaucgccgauaccacagacgccguuagagauccccagacacuggaaauccuggacaucaccccaugcagcuucggcggagugucugugaucaccccuggcaccaacaccagcaaucagguggcagugcuguaccagggcgugaacuguaccgaagugcccguggccauucacgccgaucagcugacaccuacauggcggguguacuccaccggcagcaauguguuucagaccagagccggcugucugaucggagccgagcacgugaacaauagcuacgagugcgacauccccaucggcgcuggcaucugugccagcuaccagacacagacaaacagccccagacgggcuagaagcguggccagccagagcaucauugccuacacaaugucucugggcgccgagaacagcguggccuacuccaacaacucuaucgcuauccccaccaacuucaccaucagcgugaccaccgagauccugccuguguccaugaccaagaccagcguggacugcaccauguacaucugcggcgauuccaccgagugcuccaaccugcugcugcaguacggcagcuucugcacccagcugaauagagcccugacagggaucgccguggaacaggacaagaacacccaagagguguucgcccaagugaagcaaaucuacaagaccccuccuaucaaggacuucggcggcuucaauuucagccagauucugcccgauccuagcaagcccagcaagcggagcuucaucgaggaccugcuguucaacaaagugacacuggccgacgccggcuucaucaagcaguauggcgauugucugggcgacauugccgccagggaucugauuugcgcccagaaguuuaacggacugacagugcugccuccucugcugaccgaugagaugaucgcccaguacacaucugcccugcuggccggcacaaucacaagcggcuggacauuuggagcuggcgccgcucugcagauccccuuugcuaugcagauggccuaccgguucaacggcaucggagugacccagaaugugcuguacgagaaccagaagcugaucgccaaccaguucaacagcgccaucggcaagauccaggacagccugagcagcacagcaagcgcccugggaaagcugcaggacguggucaaccagaaugcccaggcacugaacacccuggucaagcagcuguccuccaacuucggcgccaucagcucugugcugaacgauauccugagcagacuggacaaggucgaggccgaggugcagaucgacagacugaucacaggcagacugcagagccuccagacauacgugacccagcagcugaucagagccgccgagauuagagccucugccaaucuggccgccaccaagaugucugagugugugcugggccagagcaagagaguggacuuuugcggcaagggcuaccaccugaugagcuucccucagucugccccucacggcgugguguuucugcacgugacauaugugcccgcucaagagaagaauuucaccaccgcuccagccaucugccacgacggcaaagcccacuuuccuagagaaggcguguucguguccaacggcacccauugguucgugacacagcggaacuucuacgagccccagaucaucaccaccgacaacaccuucgugucuggcaacugcgacguugugaucggcauugugaacaauaccguguacgacccucugcagcccgagcuggacagcuucaaagaggaacuggacaaguacuuuaagaaccacacaagccccgacguggaccugggcgauaucagcggaaucaaugccagcgucgugaacauccagaaagagaucgaccggcugaacgagguggccaagaaucugaacgagagccugaucgaccugcaagaacuggggaaguacgagcaguacaucaaguggcccugguacaucuggcugggcuuuaucgccggacugauugccaucgugauggucacaaucaugcuguguugcaugaccagcugcuguagcugccugaagggcuguuguagcuguggcagcugcugcaaguucgacgaggacgauucugagcccgugcugaagggcgugaaacugcacuacaccugaggacuaguuauaagacugacuagcccgaugggccucccaacgggcccuccuccccuccuugcaccgagauuaauaaaaaaaaaaaaaaaaaaaaaaaaaaaaaaaaaaaaaaaaaaaaaaaaaaaaaaaaaaaaaaaaaaaaaaaaaaaaaaaaaaaaaaaaaaaaaaaaaaaa

SEQ ID NO: 25464 - RNA, 4011 nt, Artificial Sequence
  SARS-CoV-2/Wuhan/WIV05/2019__EPI_ISL_402128 spike protein mRNA gc mod (1-1273)(N439K_D614G)
aggagaaagcuuaccauguucguguuucuggugcugcugccccugguguccagccagugugugaaccugaccaccagaacacagcugccuccagccuacaccaacagcuucaccagaggcguguacuaccccgacaagguguucagauccagcgugcugcacucuacccaggaccuguuccugccuuucuucagcaacgugaccugguuccacgccauccacguguccggcaccaauggcaccaagagauucgacaaccccgugcugcccuucaacgacgggguguacuuugccagcaccgagaaguccaacaucaucagaggcuggaucuucggcaccacacuggacagcaagacccagagccugcugaucgugaacaacgccaccaacguggucaucaaagugugcgaguuccaguucugcaacgaccccuuccugggcgucuacuaccacaagaacaacaagagcuggauggaaagcgaguuccggguguacagcagcgccaacaacugcaccuucgaguacgugucccagccuuuccugauggaccuggaaggcaagcagggcaacuucaagaaccugcgcgaguucguguucaagaacaucgacggcuacuucaaaaucuacagcaagcacaccccuaucaaccucgugcgggaucugccucagggcuucucugcucuggaaccccugguggaucugcccaucggcaucaacaucacccgguuucagacacugcuggcccugcacagaagcuaccugacaccuggcgauagcagcagcggauggacagcuggugccgccgcuuacuaugugggcuaccugcagccuagaaccuuccugcugaaguacaacgagaacggcaccaucaccgacgccguggauugugcucuggauccucugagcgagacaaagugcacccugaaguccuucaccguggaaaagggcaucuaccagaccagcaacuuccgggugcagcccaccgaauccaucgugcgguuccccaauaucaccaaucugugccccuucggcgagguguucaaugccaccagauucgccucuguguacgccuggaaccggaagcggaucagcaauugcguggccgacuacuccgugcuguacaacuccgccagcuucagcaccuucaagugcuacggcguguccccuaccaagcugaacgaccugugcuucacaaacguguacgccgacagcuucgugauccggggagaugaagugcggcagauugccccuggacagacaggcaagaucgccgacuacaacuacaagcugcccgacgacuucaccggcugugugauugccuggaacagcaagaaccuggacuccaaagucggcggcaacuacaauuaccuguaccggcuguuccggaaguccaaucugaagcccuucgagcgggacaucagcaccgaaaucuaucaggccggcagcaccccuugcaacggcguggaaggcuucaacugcuacuucccacugcaguccuacggcuuucagcccacaaauggcgugggcuaucagcccuacagagugguggugcugagcuucgaacugcugcaugcuccugccacagugugcggcccuaagaaaagcaccaaucucgugaagaacaaaugcgugaacuucaacuucaacggccugaccggcaccggcgugcugacagagagcaacaagaaguuccugccauuccagcaguuuggccgggauaucgccgauaccacagacgccguuagagauccccagacacuggaaauccuggacaucaccccaugcagcuucggcggagugucugugaucaccccuggcaccaacaccagcaaucagguggcagugcuguaccagggcgugaacuguaccgaagugcccguggccauucacgccgaucagcugacaccuacauggcggguguacuccaccggcagcaauguguuucagaccagagccggcugucugaucggagccgagcacgugaacaauagcuacgagugcgacauccccaucggcgcuggcaucugugccagcuaccagacacagacaaacagccccagacgggcuagaagcguggccagccagagcaucauugccuacacaaugucucugggcgccgagaacagcguggccuacuccaacaacucuaucgcuauccccaccaacuucaccaucagcgugaccaccgagauccugccuguguccaugaccaagaccagcguggacugcaccauguacaucugcggcgauuccaccgagugcuccaaccugcugcugcaguacggcagcuucugcacccagcugaauagagcccugacagggaucgccguggaacaggacaagaacacccaagagguguucgcccaagugaagcaaaucuacaagaccccuccuaucaaggacuucggcggcuucaauuucagccagauucugcccgauccuagcaagcccagcaagcggagcuucaucgaggaccugcuguucaacaaagugacacuggccgacgccggcuucaucaagcaguauggcgauugucugggcgacauugccgccagggaucugauuugcgcccagaaguuuaacggacugacagugcugccuccucugcugaccgaugagaugaucgcccaguacacaucugcccugcuggccggcacaaucacaagcggcuggacauuuggagcuggcgccgcucugcagauccccuuugcuaugcagauggccuaccgguucaacggcaucggagugacccagaaugugcuguacgagaaccagaagcugaucgccaaccaguucaacagcgccaucggcaagauccaggacagccugagcagcacagcaagcgcccugggaaagcugcaggacguggucaaccagaaugcccaggcacugaacacccuggucaagcagcuguccuccaacuucggcgccaucagcucugugcugaacgauauccugagcagacuggacaaggucgaggccgaggugcagaucgacagacugaucacaggcagacugcagagccuccagacauacgugacccagcagcugaucagagccgccgagauuagagccucugccaaucuggccgccaccaagaugucugagugugugcugggccagagcaagagaguggacuuuugcggcaagggcuaccaccugaugagcuucccucagucugccccucacggcgugguguuucugcacgugacauaugugcccgcucaagagaagaauuucaccaccgcuccagccaucugccacgacggcaaagcccacuuuccuagagaaggcguguucguguccaacggcacccauugguucgugacacagcggaacuucuacgagccccagaucaucaccaccgacaacaccuucgugucuggcaacugcgacguugugaucggcauugugaacaauaccguguacgacccucugcagcccgagcuggacagcuucaaagaggaacuggacaaguacuuuaagaaccacacaagccccgacguggaccugggcgauaucagcggaaucaaugccagcgucgugaacauccagaaagagaucgaccggcugaacgagguggccaagaaucugaacgagagccugaucgaccugcaagaacuggggaaguacgagcaguacaucaaguggcccugguacaucuggcugggcuuuaucgccggacugauugccaucgugauggucacaaucaugcuguguugcaugaccagcugcuguagcugccugaagggcuguuguagcuguggcagcugcugcaaguucgacgaggacgauucugagcccgugcugaagggcgugaaacugcacuacaccugaggacuaguuauaagacugacuagcccgaugggccucccaacgggcccuccuccccuccuugcaccgagauuaauaaaaaaaaaaaaaaaaaaaaaaaaaaaaaaaaaaaaaaaaaaaaaaaaaaaaaaaaaaaaaaaaaaaaaaaaaaaaaaaaaaaaaaaaaaaaaaaaaaaa

SEQ ID NO: 25465 - RNA, 4011 nt, Artificial Sequence
  SARS-CoV-2/Wuhan/WIV05/2019__EPI_ISL_402128 spike protein mRNA gc mod (1-1273)(S477N_D614G)
aggagaaagcuuaccauguucguguuucuggugcugcugccccugguguccagccagugugugaaccugaccaccagaacacagcugccuccagccuacaccaacagcuucaccagaggcguguacuaccccgacaagguguucagauccagcgugcugcacucuacccaggaccuguuccugccuuucuucagcaacgugaccugguuccacgccauccacguguccggcaccaauggcaccaagagauucgacaaccccgugcugcccuucaacgacgggguguacuuugccagcaccgagaaguccaacaucaucagaggcuggaucuucggcaccacacuggacagcaagacccagagccugcugaucgugaacaacgccaccaacguggucaucaaagugugcgaguuccaguucugcaacgaccccuuccugggcgucuacuaccacaagaacaacaagagcuggauggaaagcgaguuccggguguacagcagcgccaacaacugcaccuucgaguacgugucccagccuuuccugauggaccuggaaggcaagcagggcaacuucaagaaccugcgcgaguucguguucaagaacaucgacggcuacuucaaaaucuacagcaagcacaccccuaucaaccucgugcgggaucugccucagggcuucucugcucuggaaccccugguggaucugcccaucggcaucaacaucacccgguuucagacacugcuggcccugcacagaagcuaccugacaccuggcgauagcagcagcggauggacagcuggugccgccgcuuacuaugugggcuaccugcagccuagaaccuuccugcugaaguacaacgagaacggcaccaucaccgacgccguggauugugcucuggauccucugagcgagacaaagugcacccugaaguccuucaccguggaaaagggcaucuaccagaccagcaacuuccgggugcagcccaccgaauccaucgugcgguuccccaauaucaccaaucugugccccuucggcgagguguucaaugccaccagauucgccucuguguacgccuggaaccggaagcggaucagcaauugcguggccgacuacuccgugcuguacaacuccgccagcuucagcaccuucaagugcuacggcguguccccuaccaagcugaacgaccugugcuucacaaacguguacgccgacagcuucgugauccggggagaugaagugcggcagauugccccuggacagacaggcaagaucgccgacuacaacuacaagcugcccgacgacuucaccggcugugugauugccuggaacagcaacaaccuggacuccaaagucggcggcaacuacaauuaccuguaccggcuguuccggaaguccaaucugaagcccuucgagcgggacaucagcaccgaaaucuaucaggccggcaacaccccuugcaacggcguggaaggcuucaacugcuacuucccacugcaguccuacggcuuucagcccacaaauggcgugggcuaucagcccuacagagugguggugcugagcuucgaacugcugcaugcuccugccacagugugcggcccuaagaaaagcaccaaucucgugaagaacaaaugcgugaacuucaacuucaacggccugaccggcaccggcgugcugacagagagcaacaagaaguuccugccauuccagcaguuuggccgggauaucgccgauaccacagacgccguuagagauccccagacacuggaaauccuggacaucaccccaugcagcuucggcggagugucugugaucaccccuggcaccaacaccagcaaucagguggcagugcuguaccagggcgugaacuguaccgaagugcccguggccauucacgccgaucagcugacaccuacauggcggguguacuccaccggcagcaauguguuucagaccagagccggcugucugaucggagccgagcacgugaacaauagcuacgagugcgacauccccaucggcgcuggcaucugugccagcuaccagacacagacaaacagccccagacgggcuagaagcguggccagccagagcaucauugccuacacaaugucucugggcgccgagaacagcguggccuacuccaacaacucuaucgcuauccccaccaacuucaccaucagcgugaccaccgagauccugccuguguccaugaccaagaccagcguggacugcaccauguacaucugcggcgauuccaccgagugcuccaaccugcugcugcaguacggcagcuucugcacccagcugaauagagcccugacagggaucgccguggaacaggacaagaacacccaagagguguucgcccaagugaagcaaaucuacaagaccccuccuaucaaggacuucggcggcuucaauuucagccagauucugcccgauccuagcaagcccagcaagcggagcuucaucgaggaccugcuguucaacaaagugacacuggccgacgccggcuucaucaagcaguauggcgauugucugggcgacauugccgccagggaucugauuugcgcccagaaguuuaacggacugacagugcugccuccucugcugaccgaugagaugaucgcccaguacacaucugcccugcuggccggcacaaucacaagcggcuggacauuuggagcuggcgccgcucugcagauccccuuugcuaugcagauggccuaccgguucaacggcaucggagugacccagaaugugcuguacgagaaccagaagcugaucgccaaccaguucaacagcgccaucggcaagauccaggacagccugagcagcacagcaagcgcccugggaaagcugcaggacguggucaaccagaaugcccaggcacugaacacccuggucaagcagcuguccuccaacuucggcgccaucagcucugugcugaacgauauccugagcagacuggacaaggucgaggccgaggugcagaucgacagacugaucacaggcagacugcagagccuccagacauacgugacccagcagcugaucagagccgccgagauuagagccucugccaaucuggccgccaccaagaugucugagugugugcugggccagagcaagagaguggacuuuugcggcaagggcuaccaccugaugagcuucccucagucugccccucacggcgugguguuucugcacgugacauaugugcccgcucaagagaagaauuucaccaccgcuccagccaucugccacgacggcaaagcccacuuuccuagagaaggcguguucguguccaacggcacccauugguucgugacacagcggaacuucuacgagccccagaucaucaccaccgacaacaccuucgugucuggcaacugcgacguugugaucggcauugugaacaauaccguguacgacccucugcagcccgagcuggacagcuucaaagaggaacuggacaaguacuuuaagaaccacacaagccccgacguggaccugggcgauaucagcggaaucaaugccagcgucgugaacauccagaaagagaucgaccggcugaacgagguggccaagaaucugaacgagagccugaucgaccugcaagaacuggggaaguacgagcaguacaucaaguggcccugguacaucuggcugggcuuuaucgccggacugauugccaucgugauggucacaaucaugcuguguugcaugaccagcugcuguagcugccugaagggcuguuguagcuguggcagcugcugcaaguucgacgaggacgauucugagcccgugcugaagggcgugaaacugcacuacaccugaggacuaguuauaagacugacuagcccgaugggccucccaacgggcccuccuccccuccuugcaccgagauuaauaaaaaaaaaaaaaaaaaaaaaaaaaaaaaaaaaaaaaaaaaaaaaaaaaaaaaaaaaaaaaaaaaaaaaaaaaaaaaaaaaaaaaaaaaaaaaaaaaaaa

SEQ ID NO: 25466 - RNA, 4011 nt, Artificial Sequence
  SARS-CoV-2/Wuhan/WIV05/2019__EPI_ISL_402128 spike protein mRNA gc mod (1-1273)(N501Y_D614G)
aggagaaagcuuaccauguucguguuucuggugcugcugccccugguguccagccagugugugaaccugaccaccagaacacagcugccuccagccuacaccaacagcuucaccagaggcguguacuaccccgacaagguguucagauccagcgugcugcacucuacccaggaccuguuccugccuuucuucagcaacgugaccugguuccacgccauccacguguccggcaccaauggcaccaagagauucgacaaccccgugcugcccuucaacgacgggguguacuuugccagcaccgagaaguccaacaucaucagaggcuggaucuucggcaccacacuggacagcaagacccagagccugcugaucgugaacaacgccaccaacguggucaucaaagugugcgaguuccaguucugcaacgaccccuuccugggcgucuacuaccacaagaacaacaagagcuggauggaaagcgaguuccggguguacagcagcgccaacaacugcaccuucgaguacgugucccagccuuuccugauggaccuggaaggcaagcagggcaacuucaagaaccugcgcgaguucguguucaagaacaucgacggcuacuucaaaaucuacagcaagcacaccccuaucaaccucgugcgggaucugccucagggcuucucugcucuggaaccccugguggaucugcccaucggcaucaacaucacccgguuucagacacugcuggcccugcacagaagcuaccugacaccuggcgauagcagcagcggauggacagcuggugccgccgcuuacuaugugggcuaccugcagccuagaaccuuccugcugaaguacaacgagaacggcaccaucaccgacgccguggauugugcucuggauccucugagcgagacaaagugcacccugaaguccuucaccguggaaaagggcaucuaccagaccagcaacuuccgggugcagcccaccgaauccaucgugcgguuccccaauaucaccaaucugugccccuucggcgagguguucaaugccaccagauucgccucuguguacgccuggaaccggaagcggaucagcaauugcguggccgacuacuccgugcuguacaacuccgccagcuucagcaccuucaagugcuacggcguguccccuaccaagcugaacgaccugugcuucacaaacguguacgccgacagcuucgugauccggggagaugaagugcggcagauugccccuggacagacaggcaagaucgccgacuacaacuacaagcugcccgacgacuucaccggcugugugauugccuggaacagcaacaaccuggacuccaaagucggcggcaacuacaauuaccuguaccggcuguuccggaaguccaaucugaagcccuucgagcgggacaucagcaccgaaaucuaucaggccggcagcaccccuugcaacggcguggaaggcuucaacugcuacuucccacugcaguccuacggcuuucagcccacauacggcgugggcuaucagcccuacagagugguggugcugagcuucgaacugcugcaugcuccugccacagugugcggcccuaagaaaagcaccaaucucgugaagaacaaaugcgugaacuucaacuucaacggccugaccggcaccggcgugcugacagagagcaacaagaaguuccugccauuccagcaguuuggccgggauaucgccgauaccacagacgccguuagagauccccagacacuggaaauccuggacaucaccccaugcagcuucggcggagugucugugaucaccccuggcaccaacaccagcaaucagguggcagugcuguaccagggcgugaacuguaccgaagugcccguggccauucacgccgaucagcugacaccuacauggcggguguacuccaccggcagcaauguguuucagaccagagccggcugucugaucggagccgagcacgugaacaauagcuacgagugcgacauccccaucggcgcuggcaucugugccagcuaccagacacagacaaacagccccagacgggcuagaagcguggccagccagagcaucauugccuacacaaugucucugggcgccgagaacagcguggccuacuccaacaacucuaucgcuauccccaccaacuucaccaucagcgugaccaccgagauccugccuguguccaugaccaagaccagcguggacugcaccauguacaucugcggcgauuccaccgagugcuccaaccugcugcugcaguacggcagcuucugcacccagcugaauagagcccugacagggaucgccguggaacaggacaagaacacccaagagguguucgcccaagugaagcaaaucuacaagaccccuccuaucaaggacuucggcggcuucaauuucagccagauucugcccgauccuagcaagcccagcaagcggagcuucaucgaggaccugcuguucaacaaagugacacuggccgacgccggcuucaucaagcaguauggcgauugucugggcgacauugccgccagggaucugauuugcgcccagaaguuuaacggacugacagugcugccuccucugcugaccgaugagaugaucgcccaguacacaucugcccugcuggccggcacaaucacaagcggcuggacauuuggagcuggcgccgcucugcagauccccuuugcuaugcagauggccuaccgguucaacggcaucggagugacccagaaugugcuguacgagaaccagaagcugaucgccaaccaguucaacagcgccaucggcaagauccaggacagccugagcagcacagcaagcgcccugggaaagcugcaggacguggucaaccagaaugcccaggcacugaacacccuggucaagcagcuguccuccaacuucggcgccaucagcucugugcugaacgauauccugagcagacuggacaaggucgaggccgaggugcagaucgacagacugaucacaggcagacugcagagccuccagacauacgugacccagcagcugaucagagccgccgagauuagagccucugccaaucuggccgccaccaagaugucugagugugugcugggccagagcaagagaguggacuuuugcggcaagggcuaccaccugaugagcuucccucagucugccccucacggcgugguguuucugcacgugacauaugugcccgcucaagagaagaauuucaccaccgcuccagccaucugccacgacggcaaagcccacuuuccuagagaaggcguguucguguccaacggcacccauugguucgugacacagcggaacuucuacgagccccagaucaucaccaccgacaacaccuucgugucuggcaacugcgacguugugaucggcauugugaacaauaccguguacgacccucugcagcccgagcuggacagcuucaaagaggaacuggacaaguacuuuaagaaccacacaagccccgacguggaccugggcgauaucagcggaaucaaugccagcgucgugaacauccagaaagagaucgaccggcugaacgagguggccaagaaucugaacgagagccugaucgaccugcaagaacuggggaaguacgagcaguacaucaaguggcccugguacaucuggcugggcuuuaucgccggacugauugccaucgugauggucacaaucaugcuguguugcaugaccagcugcuguagcugccugaagggcuguuguagcuguggcagcugcugcaaguucgacgaggacgauucugagcccgugcugaagggcgugaaacugcacuacaccugaggacuaguuauaagacugacuagcccgaugggccucccaacgggcccuccuccccuccuugcaccgagauuaauaaaaaaaaaaaaaaaaaaaaaaaaaaaaaaaaaaaaaaaaaaaaaaaaaaaaaaaaaaaaaaaaaaaaaaaaaaaaaaaaaaaaaaaaaaaaaaaaaaaa

SEQ ID NO: 25467 - RNA, 4005 nt, Artificial Sequence
  SARS-CoV-2/Wuhan/WIV05/2019__EPI_ISL_402128 spike protein mRNA gc mod (1-1273)(H69del_V70del_D614G)
aggagaaagcuuaccauguucguguuucuggugcugcugccccugguguccagccagugugugaaccugaccaccagaacacagcugccuccagccuacaccaacagcuucaccagaggcguguacuaccccgacaagguguucagauccagcgugcugcacucuacccaggaccuguuccugccuuucuucagcaacgugaccugguuccacgccaucuccggcaccaauggcaccaagagauucgacaaccccgugcugcccuucaacgacgggguguacuuugccagcaccgagaaguccaacaucaucagaggcuggaucuucggcaccacacuggacagcaagacccagagccugcugaucgugaacaacgccaccaacguggucaucaaagugugcgaguuccaguucugcaacgaccccuuccugggcgucuacuaccacaagaacaacaagagcuggauggaaagcgaguuccggguguacagcagcgccaacaacugcaccuucgaguacgugucccagccuuuccugauggaccuggaaggcaagcagggcaacuucaagaaccugcgcgaguucguguucaagaacaucgacggcuacuucaaaaucuacagcaagcacaccccuaucaaccucgugcgggaucugccucagggcuucucugcucuggaaccccugguggaucugcccaucggcaucaacaucacccgguuucagacacugcuggcccugcacagaagcuaccugacaccuggcgauagcagcagcggauggacagcuggugccgccgcuuacuaugugggcuaccugcagccuagaaccuuccugcugaaguacaacgagaacggcaccaucaccgacgccguggauugugcucuggauccucugagcgagacaaagugcacccugaaguccuucaccguggaaaagggcaucuaccagaccagcaacuuccgggugcagcccaccgaauccaucgugcgguuccccaauaucaccaaucugugccccuucggcgagguguucaaugccaccagauucgccucuguguacgccuggaaccggaagcggaucagcaauugcguggccgacuacuccgugcuguacaacuccgccagcuucagcaccuucaagugcuacggcguguccccuaccaagcugaacgaccugugcuucacaaacguguacgccgacagcuucgugauccggggagaugaagugcggcagauugccccuggacagacaggcaagaucgccgacuacaacuacaagcugcccgacgacuucaccggcugugugauugccuggaacagcaacaaccuggacuccaaagucggcggcaacuacaauuaccuguaccggcuguuccggaaguccaaucugaagcccuucgagcgggacaucagcaccgaaaucuaucaggccggcagcaccccuugcaacggcguggaaggcuucaacugcuacuucccacugcaguccuacggcuuucagcccacaaauggcgugggcuaucagcccuacagagugguggugcugagcuucgaacugcugcaugcuccugccacagugugcggcccuaagaaaagcaccaaucucgugaagaacaaaugcgugaacuucaacuucaacggccugaccggcaccggcgugcugacagagagcaacaagaaguuccugccauuccagcaguuuggccgggauaucgccgauaccacagacgccguuagagauccccagacacuggaaauccuggacaucaccccaugcagcuucggcggagugucugugaucaccccuggcaccaacaccagcaaucagguggcagugcuguaccagggcgugaacuguaccgaagugcccguggccauucacgccgaucagcugacaccuacauggcggguguacuccaccggcagcaauguguuucagaccagagccggcugucugaucggagccgagcacgugaacaauagcuacgagugcgacauccccaucggcgcuggcaucugugccagcuaccagacacagacaaacagccccagacgggcuagaagcguggccagccagagcaucauugccuacacaaugucucugggcgccgagaacagcguggccuacuccaacaacucuaucgcuauccccaccaacuucaccaucagcgugaccaccgagauccugccuguguccaugaccaagaccagcguggacugcaccauguacaucugcggcgauuccaccgagugcuccaaccugcugcugcaguacggcagcuucugcacccagcugaauagagcccugacagggaucgccguggaacaggacaagaacacccaagagguguucgcccaagugaagcaaaucuacaagaccccuccuaucaaggacuucggcggcuucaauuucagccagauucugcccgauccuagcaagcccagcaagcggagcuucaucgaggaccugcuguucaacaaagugacacuggccgacgccggcuucaucaagcaguauggcgauugucugggcgacauugccgccagggaucugauuugcgcccagaaguuuaacggacugacagugcugccuccucugcugaccgaugagaugaucgcccaguacacaucugcccugcuggccggcacaaucacaagcggcuggacauuuggagcuggcgccgcucugcagauccccuuugcuaugcagauggccuaccgguucaacggcaucggagugacccagaaugugcuguacgagaaccagaagcugaucgccaaccaguucaacagcgccaucggcaagauccaggacagccugagcagcacagcaagcgcccugggaaagcugcaggacguggucaaccagaaugcccaggcacugaacacccuggucaagcagcuguccuccaacuucggcgccaucagcucugugcugaacgauauccugagcagacuggacaaggucgaggccgaggugcagaucgacagacugaucacaggcagacugcagagccuccagacauacgugacccagcagcugaucagagccgccgagauuagagccucugccaaucuggccgccaccaagaugucugagugugugcugggccagagcaagagaguggacuuuugcggcaagggcuaccaccugaugagcuucccucagucugccccucacggcgugguguuucugcacgugacauaugugcccgcucaagagaagaauuucaccaccgcuccagccaucugccacgacggcaaagcccacuuuccuagagaaggcguguucguguccaacggcacccauugguucgugacacagcggaacuucuacgagccccagaucaucaccaccgacaacaccuucgugucuggcaacugcgacguugugaucggcauugugaacaauaccguguacgacccucugcagcccgagcuggacagcuucaaagaggaacuggacaaguacuuuaagaaccacacaagccccgacguggaccugggcgauaucagcggaaucaaugccagcgucgugaacauccagaaagagaucgaccggcugaacgagguggccaagaaucugaacgagagccugaucgaccugcaagaacuggggaaguacgagcaguacaucaaguggcccugguacaucuggcugggcuuuaucgccggacugauugccaucgugauggucacaaucaugcuguguugcaugaccagcugcuguagcugccugaagggcuguuguagcuguggcagcugcugcaaguucgacgaggacgauucugagcccgugcugaagggcgugaaacugcacuacaccugaggacuaguuauaagacugacuagcccgaugggccucccaacgggcccuccuccccuccuugcaccgagauuaauaaaaaaaaaaaaaaaaaaaaaaaaaaaaaaaaaaaaaaaaaaaaaaaaaaaaaaaaaaaaaaaaaaaaaaaaaaaaaaaaaaaaaaaaaaaaaaaaaaaa

SEQ ID NO: 25468 - RNA, 4011 nt, Artificial Sequence
  SARS-CoV-2/Wuhan/WIV05/2019__EPI_ISL_402128 spike protein mRNA gc mod (1-1273)(Y453F_D614G)
aggagaaagcuuaccauguucguguuucuggugcugcugccccugguguccagccagugugugaaccugaccaccagaacacagcugccuccagccuacaccaacagcuucaccagaggcguguacuaccccgacaagguguucagauccagcgugcugcacucuacccaggaccuguuccugccuuucuucagcaacgugaccugguuccacgccauccacguguccggcaccaauggcaccaagagauucgacaaccccgugcugcccuucaacgacgggguguacuuugccagcaccgagaaguccaacaucaucagaggcuggaucuucggcaccacacuggacagcaagacccagagccugcugaucgugaacaacgccaccaacguggucaucaaagugugcgaguuccaguucugcaacgaccccuuccugggcgucuacuaccacaagaacaacaagagcuggauggaaagcgaguuccggguguacagcagcgccaacaacugcaccuucgaguacgugucccagccuuuccugauggaccuggaaggcaagcagggcaacuucaagaaccugcgcgaguucguguucaagaacaucgacggcuacuucaaaaucuacagcaagcacaccccuaucaaccucgugcgggaucugccucagggcuucucugcucuggaaccccugguggaucugcccaucggcaucaacaucacccgguuucagacacugcuggcccugcacagaagcuaccugacaccuggcgauagcagcagcggauggacagcuggugccgccgcuuacuaugugggcuaccugcagccuagaaccuuccugcugaaguacaacgagaacggcaccaucaccgacgccguggauugugcucuggauccucugagcgagacaaagugcacccugaaguccuucaccguggaaaagggcaucuaccagaccagcaacuuccgggugcagcccaccgaauccaucgugcgguuccccaauaucaccaaucugugccccuucggcgagguguucaaugccaccagauucgccucuguguacgccuggaaccggaagcggaucagcaauugcguggccgacuacuccgugcuguacaacuccgccagcuucagcaccuucaagugcuacggcguguccccuaccaagcugaacgaccugugcuucacaaacguguacgccgacagcuucgugauccggggagaugaagugcggcagauugccccuggacagacaggcaagaucgccgacuacaacuacaagcugcccgacgacuucaccggcugugugauugccuggaacagcaacaaccuggacuccaaagucggcggcaacuacaauuaccuguuccggcuguuccggaaguccaaucugaagcccuucgagcgggacaucagcaccgaaaucuaucaggccggcagcaccccuugcaacggcguggaaggcuucaacugcuacuucccacugcaguccuacggcuuucagcccacaaauggcgugggcuaucagcccuacagagugguggugcugagcuucgaacugcugcaugcuccugccacagugugcggcccuaagaaaagcaccaaucucgugaagaacaaaugcgugaacuucaacuucaacggccugaccggcaccggcgugcugacagagagcaacaagaaguuccugccauuccagcaguuuggccgggauaucgccgauaccacagacgccguuagagauccccagacacuggaaauccuggacaucaccccaugcagcuucggcggagugucugugaucaccccuggcaccaacaccagcaaucagguggcagugcuguaccagggcgugaacuguaccgaagugcccguggccauucacgccgaucagcugacaccuacauggcggguguacuccaccggcagcaauguguuucagaccagagccggcugucugaucggagccgagcacgugaacaauagcuacgagugcgacauccccaucggcgcuggcaucugugccagcuaccagacacagacaaacagccccagacgggcuagaagcguggccagccagagcaucauugccuacacaaugucucugggcgccgagaacagcguggccuacuccaacaacucuaucgcuauccccaccaacuucaccaucagcgugaccaccgagauccugccuguguccaugaccaagaccagcguggacugcaccauguacaucugcggcgauuccaccgagugcuccaaccugcugcugcaguacggcagcuucugcacccagcugaauagagcccugacagggaucgccguggaacaggacaagaacacccaagagguguucgcccaagugaagcaaaucuacaagaccccuccuaucaaggacuucggcggcuucaauuucagccagauucugcccgauccuagcaagcccagcaagcggagcuucaucgaggaccugcuguucaacaaagugacacuggccgacgccggcuucaucaagcaguauggcgauugucugggcgacauugccgccagggaucugauuugcgcccagaaguuuaacggacugacagugcugccuccucugcugaccgaugagaugaucgcccaguacacaucugcccugcuggccggcacaaucacaagcggcuggacauuuggagcuggcgccgcucugcagauccccuuugcuaugcagauggccuaccgguucaacggcaucggagugacccagaaugugcuguacgagaaccagaagcugaucgccaaccaguucaacagcgccaucggcaagauccaggacagccugagcagcacagcaagcgcccugggaaagcugcaggacguggucaaccagaaugcccaggcacugaacacccuggucaagcagcuguccuccaacuucggcgccaucagcucugugcugaacgauauccugagcagacuggacaaggucgaggccgaggugcagaucgacagacugaucacaggcagacugcagagccuccagacauacgugacccagcagcugaucagagccgccgagauuagagccucugccaaucuggccgccaccaagaugucugagugugugcugggccagagcaagagaguggacuuuugcggcaagggcuaccaccugaugagcuucccucagucugccccucacggcgugguguuucugcacgugacauaugugcccgcucaagagaagaauuucaccaccgcuccagccaucugccacgacggcaaagcccacuuuccuagagaaggcguguucguguccaacggcacccauugguucgugacacagcggaacuucuacgagccccagaucaucaccaccgacaacaccuucgugucuggcaacugcgacguugugaucggcauugugaacaauaccguguacgacccucugcagcccgagcuggacagcuucaaagaggaacuggacaaguacuuuaagaaccacacaagccccgacguggaccugggcgauaucagcggaaucaaugccagcgucgugaacauccagaaagagaucgaccggcugaacgagguggccaagaaucugaacgagagccugaucgaccugcaagaacuggggaaguacgagcaguacaucaaguggcccugguacaucuggcugggcuuuaucgccggacugauugccaucgugauggucacaaucaugcuguguugcaugaccagcugcuguagcugccugaagggcuguuguagcuguggcagcugcugcaaguucgacgaggacgauucugagcccgugcugaagggcgugaaacugcacuacaccugaggacuaguuauaagacugacuagcccgaugggccucccaacgggcccuccuccccuccuugcaccgagauuaauaaaaaaaaaaaaaaaaaaaaaaaaaaaaaaaaaaaaaaaaaaaaaaaaaaaaaaaaaaaaaaaaaaaaaaaaaaaaaaaaaaaaaaaaaaaaaaaaaaaa

SEQ ID NO: 25469 - RNA, 4011 nt, Artificial Sequence
  SARS-CoV-2/Wuhan/WIV05/2019__EPI_ISL_402128 spike protein mRNA gc mod (1-1273)(D614G_I692V)
aggagaaagcuuaccauguucguguuucuggugcugcugccccugguguccagccagugugugaaccugaccaccagaacacagcugccuccagccuacaccaacagcuucaccagaggcguguacuaccccgacaagguguucagauccagcgugcugcacucuacccaggaccuguuccugccuuucuucagcaacgugaccugguuccacgccauccacguguccggcaccaauggcaccaagagauucgacaaccccgugcugcccuucaacgacgggguguacuuugccagcaccgagaaguccaacaucaucagaggcuggaucuucggcaccacacuggacagcaagacccagagccugcugaucgugaacaacgccaccaacguggucaucaaagugugcgaguuccaguucugcaacgaccccuuccugggcgucuacuaccacaagaacaacaagagcuggauggaaagcgaguuccggguguacagcagcgccaacaacugcaccuucgaguacgugucccagccuuuccugauggaccuggaaggcaagcagggcaacuucaagaaccugcgcgaguucguguucaagaacaucgacggcuacuucaaaaucuacagcaagcacaccccuaucaaccucgugcgggaucugccucagggcuucucugcucuggaaccccugguggaucugcccaucggcaucaacaucacccgguuucagacacugcuggcccugcacagaagcuaccugacaccuggcgauagcagcagcggauggacagcuggugccgccgcuuacuaugugggcuaccugcagccuagaaccuuccugcugaaguacaacgagaacggcaccaucaccgacgccguggauugugcucuggauccucugagcgagacaaagugcacccugaaguccuucaccguggaaaagggcaucuaccagaccagcaacuuccgggugcagcccaccgaauccaucgugcgguuccccaauaucaccaaucugugccccuucggcgagguguucaaugccaccagauucgccucuguguacgccuggaaccggaagcggaucagcaauugcguggccgacuacuccgugcuguacaacuccgccagcuucagcaccuucaagugcuacggcguguccccuaccaagcugaacgaccugugcuucacaaacguguacgccgacagcuucgugauccggggagaugaagugcggcagauugccccuggacagacaggcaagaucgccgacuacaacuacaagcugcccgacgacuucaccggcugugugauugccuggaacagcaacaaccuggacuccaaagucggcggcaacuacaauuaccuguaccggcuguuccggaaguccaaucugaagcccuucgagcgggacaucagcaccgaaaucuaucaggccggcagcaccccuugcaacggcguggaaggcuucaacugcuacuucccacugcaguccuacggcuuucagcccacaaauggcgugggcuaucagcccuacagagugguggugcugagcuucgaacugcugcaugcuccugccacagugugcggcccuaagaaaagcaccaaucucgugaagaacaaaugcgugaacuucaacuucaacggccugaccggcaccggcgugcugacagagagcaacaagaaguuccugccauuccagcaguuuggccgggauaucgccgauaccacagacgccguuagagauccccagacacuggaaauccuggacaucaccccaugcagcuucggcggagugucugugaucaccccuggcaccaacaccagcaaucagguggcagugcuguaccagggcgugaacuguaccgaagugcccguggccauucacgccgaucagcugacaccuacauggcggguguacuccaccggcagcaauguguuucagaccagagccggcugucugaucggagccgagcacgugaacaauagcuacgagugcgacauccccaucggcgcuggcaucugugccagcuaccagacacagacaaacagccccagacgggcuagaagcguggccagccagagcgugauugccuacacaaugucucugggcgccgagaacagcguggccuacuccaacaacucuaucgcuauccccaccaacuucaccaucagcgugaccaccgagauccugccuguguccaugaccaagaccagcguggacugcaccauguacaucugcggcgauuccaccgagugcuccaaccugcugcugcaguacggcagcuucugcacccagcugaauagagcccugacagggaucgccguggaacaggacaagaacacccaagagguguucgcccaagugaagcaaaucuacaagaccccuccuaucaaggacuucggcggcuucaauuucagccagauucugcccgauccuagcaagcccagcaagcggagcuucaucgaggaccugcuguucaacaaagugacacuggccgacgccggcuucaucaagcaguauggcgauugucugggcgacauugccgccagggaucugauuugcgcccagaaguuuaacggacugacagugcugccuccucugcugaccgaugagaugaucgcccaguacacaucugcccugcuggccggcacaaucacaagcggcuggacauuuggagcuggcgccgcucugcagauccccuuugcuaugcagauggccuaccgguucaacggcaucggagugacccagaaugugcuguacgagaaccagaagcugaucgccaaccaguucaacagcgccaucggcaagauccaggacagccugagcagcacagcaagcgcccugggaaagcugcaggacguggucaaccagaaugcccaggcacugaacacccuggucaagcagcuguccuccaacuucggcgccaucagcucugugcugaacgauauccugagcagacuggacaaggucgaggccgaggugcagaucgacagacugaucacaggcagacugcagagccuccagacauacgugacccagcagcugaucagagccgccgagauuagagccucugccaaucuggccgccaccaagaugucugagugugugcugggccagagcaagagaguggacuuuugcggcaagggcuaccaccugaugagcuucccucagucugccccucacggcgugguguuucugcacgugacauaugugcccgcucaagagaagaauuucaccaccgcuccagccaucugccacgacggcaaagcccacuuuccuagagaaggcguguucguguccaacggcacccauugguucgugacacagcggaacuucuacgagccccagaucaucaccaccgacaacaccuucgugucuggcaacugcgacguugugaucggcauugugaacaauaccguguacgacccucugcagcccgagcuggacagcuucaaagaggaacuggacaaguacuuuaagaaccacacaagccccgacguggaccugggcgauaucagcggaaucaaugccagcgucgugaacauccagaaagagaucgaccggcugaacgagguggccaagaaucugaacgagagccugaucgaccugcaagaacuggggaaguacgagcaguacaucaaguggcccugguacaucuggcugggcuuuaucgccggacugauugccaucgugauggucacaaucaugcuguguugcaugaccagcugcuguagcugccugaagggcuguuguagcuguggcagcugcugcaaguucgacgaggacgauucugagcccgugcugaagggcgugaaacugcacuacaccugaggacuaguuauaagacugacuagcccgaugggccucccaacgggcccuccuccccuccuugcaccgagauuaauaaaaaaaaaaaaaaaaaaaaaaaaaaaaaaaaaaaaaaaaaaaaaaaaaaaaaaaaaaaaaaaaaaaaaaaaaaaaaaaaaaaaaaaaaaaaaaaaaaaa

SEQ ID NO: 25470 - RNA, 4011 nt, Artificial Sequence
  SARS-CoV-2/Wuhan/WIV05/2019__EPI_ISL_402128 spike protein mRNA gc mod (1-1273)(D614G_M1229I)
aggagaaagcuuaccauguucguguuucuggugcugcugccccugguguccagccagugugugaaccugaccaccagaacacagcugccuccagccuacaccaacagcuucaccagaggcguguacuaccccgacaagguguucagauccagcgugcugcacucuacccaggaccuguuccugccuuucuucagcaacgugaccugguuccacgccauccacguguccggcaccaauggcaccaagagauucgacaaccccgugcugcccuucaacgacgggguguacuuugccagcaccgagaaguccaacaucaucagaggcuggaucuucggcaccacacuggacagcaagacccagagccugcugaucgugaacaacgccaccaacguggucaucaaagugugcgaguuccaguucugcaacgaccccuuccugggcgucuacuaccacaagaacaacaagagcuggauggaaagcgaguuccggguguacagcagcgccaacaacugcaccuucgaguacgugucccagccuuuccugauggaccuggaaggcaagcagggcaacuucaagaaccugcgcgaguucguguucaagaacaucgacggcuacuucaaaaucuacagcaagcacaccccuaucaaccucgugcgggaucugccucagggcuucucugcucuggaaccccugguggaucugcccaucggcaucaacaucacccgguuucagacacugcuggcccugcacagaagcuaccugacaccuggcgauagcagcagcggauggacagcuggugccgccgcuuacuaugugggcuaccugcagccuagaaccuuccugcugaaguacaacgagaacggcaccaucaccgacgccguggauugugcucuggauccucugagcgagacaaagugcacccugaaguccuucaccguggaaaagggcaucuaccagaccagcaacuuccgggugcagcccaccgaauccaucgugcgguuccccaauaucaccaaucugugccccuucggcgagguguucaaugccaccagauucgccucuguguacgccuggaaccggaagcggaucagcaauugcguggccgacuacuccgugcuguacaacuccgccagcuucagcaccuucaagugcuacggcguguccccuaccaagcugaacgaccugugcuucacaaacguguacgccgacagcuucgugauccggggagaugaagugcggcagauugccccuggacagacaggcaagaucgccgacuacaacuacaagcugcccgacgacuucaccggcugugugauugccuggaacagcaacaaccuggacuccaaagucggcggcaacuacaauuaccuguaccggcuguuccggaaguccaaucugaagcccuucgagcgggacaucagcaccgaaaucuaucaggccggcagcaccccuugcaacggcguggaaggcuucaacugcuacuucccacugcaguccuacggcuuucagcccacaaauggcgugggcuaucagcccuacagagugguggugcugagcuucgaacugcugcaugcuccugccacagugugcggcccuaagaaaagcaccaaucucgugaagaacaaaugcgugaacuucaacuucaacggccugaccggcaccggcgugcugacagagagcaacaagaaguuccugccauuccagcaguuuggccgggauaucgccgauaccacagacgccguuagagauccccagacacuggaaauccuggacaucaccccaugcagcuucggcggagugucugugaucaccccuggcaccaacaccagcaaucagguggcagugcuguaccagggcgugaacuguaccgaagugcccguggccauucacgccgaucagcugacaccuacauggcggguguacuccaccggcagcaauguguuucagaccagagccggcugucugaucggagccgagcacgugaacaauagcuacgagugcgacauccccaucggcgcuggcaucugugccagcuaccagacacagacaaacagccccagacgggcuagaagcguggccagccagagcaucauugccuacacaaugucucugggcgccgagaacagcguggccuacuccaacaacucuaucgcuauccccaccaacuucaccaucagcgugaccaccgagauccugccuguguccaugaccaagaccagcguggacugcaccauguacaucugcggcgauuccaccgagugcuccaaccugcugcugcaguacggcagcuucugcacccagcugaauagagcccugacagggaucgccguggaacaggacaagaacacccaagagguguucgcccaagugaagcaaaucuacaagaccccuccuaucaaggacuucggcggcuucaauuucagccagauucugcccgauccuagcaagcccagcaagcggagcuucaucgaggaccugcuguucaacaaagugacacuggccgacgccggcuucaucaagcaguauggcgauugucugggcgacauugccgccagggaucugauuugcgcccagaaguuuaacggacugacagugcugccuccucugcugaccgaugagaugaucgcccaguacacaucugcccugcuggccggcacaaucacaagcggcuggacauuuggagcuggcgccgcucugcagauccccuuugcuaugcagauggccuaccgguucaacggcaucggagugacccagaaugugcuguacgagaaccagaagcugaucgccaaccaguucaacagcgccaucggcaagauccaggacagccugagcagcacagcaagcgcccugggaaagcugcaggacguggucaaccagaaugcccaggcacugaacacccuggucaagcagcuguccuccaacuucggcgccaucagcucugugcugaacgauauccugagcagacuggacaaggucgaggccgaggugcagaucgacagacugaucacaggcagacugcagagccuccagacauacgugacccagcagcugaucagagccgccgagauuagagccucugccaaucuggccgccaccaagaugucugagugugugcugggccagagcaagagaguggacuuuugcggcaagggcuaccaccugaugagcuucccucagucugccccucacggcgugguguuucugcacgugacauaugugcccgcucaagagaagaauuucaccaccgcuccagccaucugccacgacggcaaagcccacuuuccuagagaaggcguguucguguccaacggcacccauugguucgugacacagcggaacuucuacgagccccagaucaucaccaccgacaacaccuucgugucuggcaacugcgacguugugaucggcauugugaacaauaccguguacgacccucugcagcccgagcuggacagcuucaaagaggaacuggacaaguacuuuaagaaccacacaagccccgacguggaccugggcgauaucagcggaaucaaugccagcgucgugaacauccagaaagagaucgaccggcugaacgagguggccaagaaucugaacgagagccugaucgaccugcaagaacuggggaaguacgagcaguacaucaaguggcccugguacaucuggcugggcuuuaucgccggacugauugccaucgugaucgucacaaucaugcuguguugcaugaccagcugcuguagcugccugaagggcuguuguagcuguggcagcugcugcaaguucgacgaggacgauucugagcccgugcugaagggcgugaaacugcacuacaccugaggacuaguuauaagacugacuagcccgaugggccucccaacgggcccuccuccccuccuugcaccgagauuaauaaaaaaaaaaaaaaaaaaaaaaaaaaaaaaaaaaaaaaaaaaaaaaaaaaaaaaaaaaaaaaaaaaaaaaaaaaaaaaaaaaaaaaaaaaaaaaaaaaaa

SEQ ID NO: 25471 - RNA, 4005 nt, Artificial Sequence
  SARS-CoV-2/Wuhan/WIV05/2019__EPI_ISL_402128 spike protein mRNA gc mod (1-1273)(H69del_V70del_A222V_Y453F_S477N_D614G_I692V)
aggagaaagcuuaccauguucguguuucuggugcugcugccccugguguccagccagugugugaaccugaccaccagaacacagcugccuccagccuacaccaacagcuucaccagaggcguguacuaccccgacaagguguucagauccagcgugcugcacucuacccaggaccuguuccugccuuucuucagcaacgugaccugguuccacgccaucuccggcaccaauggcaccaagagauucgacaaccccgugcugcccuucaacgacgggguguacuuugccagcaccgagaaguccaacaucaucagaggcuggaucuucggcaccacacuggacagcaagacccagagccugcugaucgugaacaacgccaccaacguggucaucaaagugugcgaguuccaguucugcaacgaccccuuccugggcgucuacuaccacaagaacaacaagagcuggauggaaagcgaguuccggguguacagcagcgccaacaacugcaccuucgaguacgugucccagccuuuccugauggaccuggaaggcaagcagggcaacuucaagaaccugcgcgaguucguguucaagaacaucgacggcuacuucaaaaucuacagcaagcacaccccuaucaaccucgugcgggaucugccucagggcuucucugugcuggaaccccugguggaucugcccaucggcaucaacaucacccgguuucagacacugcuggcccugcacagaagcuaccugacaccuggcgauagcagcagcggauggacagcuggugccgccgcuuacuaugugggcuaccugcagccuagaaccuuccugcugaaguacaacgagaacggcaccaucaccgacgccguggauugugcucuggauccucugagcgagacaaagugcacccugaaguccuucaccguggaaaagggcaucuaccagaccagcaacuuccgggugcagcccaccgaauccaucgugcgguuccccaauaucaccaaucugugccccuucggcgagguguucaaugccaccagauucgccucuguguacgccuggaaccggaagcggaucagcaauugcguggccgacuacuccgugcuguacaacuccgccagcuucagcaccuucaagugcuacggcguguccccuaccaagcugaacgaccugugcuucacaaacguguacgccgacagcuucgugauccggggagaugaagugcggcagauugccccuggacagacaggcaagaucgccgacuacaacuacaagcugcccgacgacuucaccggcugugugauugccuggaacagcaacaaccuggacuccaaagucggcggcaacuacaauuaccuguuccggcuguuccggaaguccaaucugaagcccuucgagcgggacaucagcaccgaaaucuaucaggccggcaacaccccuugcaacggcguggaaggcuucaacugcuacuucccacugcaguccuacggcuuucagcccacaaauggcgugggcuaucagcccuacagagugguggugcugagcuucgaacugcugcaugcuccugccacagugugcggcccuaagaaaagcaccaaucucgugaagaacaaaugcgugaacuucaacuucaacggccugaccggcaccggcgugcugacagagagcaacaagaaguuccugccauuccagcaguuuggccgggauaucgccgauaccacagacgccguuagagauccccagacacuggaaauccuggacaucaccccaugcagcuucggcggagugucugugaucaccccuggcaccaacaccagcaaucagguggcagugcuguaccagggcgugaacuguaccgaagugcccguggccauucacgccgaucagcugacaccuacauggcggguguacuccaccggcagcaauguguuucagaccagagccggcugucugaucggagccgagcacgugaacaauagcuacgagugcgacauccccaucggcgcuggcaucugugccagcuaccagacacagacaaacagccccagacgggcuagaagcguggccagccagagcgugauugccuacacaaugucucugggcgccgagaacagcguggccuacuccaacaacucuaucgcuauccccaccaacuucaccaucagcgugaccaccgagauccugccuguguccaugaccaagaccagcguggacugcaccauguacaucugcggcgauuccaccgagugcuccaaccugcugcugcaguacggcagcuucugcacccagcugaauagagcccugacagggaucgccguggaacaggacaagaacacccaagagguguucgcccaagugaagcaaaucuacaagaccccuccuaucaaggacuucggcggcuucaauuucagccagauucugcccgauccuagcaagcccagcaagcggagcuucaucgaggaccugcuguucaacaaagugacacuggccgacgccggcuucaucaagcaguauggcgauugucugggcgacauugccgccagggaucugauuugcgcccagaaguuuaacggacugacagugcugccuccucugcugaccgaugagaugaucgcccaguacacaucugcccugcuggccggcacaaucacaagcggcuggacauuuggagcuggcgccgcucugcagauccccuuugcuaugcagauggccuaccgguucaacggcaucggagugacccagaaugugcuguacgagaaccagaagcugaucgccaaccaguucaacagcgccaucggcaagauccaggacagccugagcagcacagcaagcgcccugggaaagcugcaggacguggucaaccagaaugcccaggcacugaacacccuggucaagcagcuguccuccaacuucggcgccaucagcucugugcugaacgauauccugagcagacuggacaaggucgaggccgaggugcagaucgacagacugaucacaggcagacugcagagccuccagacauacgugacccagcagcugaucagagccgccgagauuagagccucugccaaucuggccgccaccaagaugucugagugugugcugggccagagcaagagaguggacuuuugcggcaagggcuaccaccugaugagcuucccucagucugccccucacggcgugguguuucugcacgugacauaugugcccgcucaagagaagaauuucaccaccgcuccagccaucugccacgacggcaaagcccacuuuccuagagaaggcguguucguguccaacggcacccauugguucgugacacagcggaacuucuacgagccccagaucaucaccaccgacaacaccuucgugucuggcaacugcgacguugugaucggcauugugaacaauaccguguacgacccucugcagcccgagcuggacagcuucaaagaggaacuggacaaguacuuuaagaaccacacaagccccgacguggaccugggcgauaucagcggaaucaaugccagcgucgugaacauccagaaagagaucgaccggcugaacgagguggccaagaaucugaacgagagccugaucgaccugcaagaacuggggaaguacgagcaguacaucaaguggcccugguacaucuggcugggcuuuaucgccggacugauugccaucgugauggucacaaucaugcuguguugcaugaccagcugcuguagcugccugaagggcuguuguagcuguggcagcugcugcaaguucgacgaggacgauucugagcccgugcugaagggcgugaaacugcacuacaccugaggacuaguuauaagacugacuagcccgaugggccucccaacgggcccuccuccccuccuugcaccgagauuaauaaaaaaaaaaaaaaaaaaaaaaaaaaaaaaaaaaaaaaaaaaaaaaaaaaaaaaaaaaaaaaaaaaaaaaaaaaaaaaaaaaaaaaaaaaaaaaaaaaaa

SEQ ID NO: 25472 - RNA, 4005 nt, Artificial Sequence
  SARS-CoV-2/Wuhan/WIV05/2019__EPI_ISL_402128 spike protein mRNA gc mod (1-1273)(H69del_V70del_Y453F_D614G_I692V_M1229I)
aggagaaagcuuaccauguucguguuucuggugcugcugccccugguguccagccagugugugaaccugaccaccagaacacagcugccuccagccuacaccaacagcuucaccagaggcguguacuaccccgacaagguguucagauccagcgugcugcacucuacccaggaccuguuccugccuuucuucagcaacgugaccugguuccacgccaucuccggcaccaauggcaccaagagauucgacaaccccgugcugcccuucaacgacgggguguacuuugccagcaccgagaaguccaacaucaucagaggcuggaucuucggcaccacacuggacagcaagacccagagccugcugaucgugaacaacgccaccaacguggucaucaaagugugcgaguuccaguucugcaacgaccccuuccugggcgucuacuaccacaagaacaacaagagcuggauggaaagcgaguuccggguguacagcagcgccaacaacugcaccuucgaguacgugucccagccuuuccugauggaccuggaaggcaagcagggcaacuucaagaaccugcgcgaguucguguucaagaacaucgacggcuacuucaaaaucuacagcaagcacaccccuaucaaccucgugcgggaucugccucagggcuucucugcucuggaaccccugguggaucugcccaucggcaucaacaucacccgguuucagacacugcuggcccugcacagaagcuaccugacaccuggcgauagcagcagcggauggacagcuggugccgccgcuuacuaugugggcuaccugcagccuagaaccuuccugcugaaguacaacgagaacggcaccaucaccgacgccguggauugugcucuggauccucugagcgagacaaagugcacccugaaguccuucaccguggaaaagggcaucuaccagaccagcaacuuccgggugcagcccaccgaauccaucgugcgguuccccaauaucaccaaucugugccccuucggcgagguguucaaugccaccagauucgccucuguguacgccuggaaccggaagcggaucagcaauugcguggccgacuacuccgugcuguacaacuccgccagcuucagcaccuucaagugcuacggcguguccccuaccaagcugaacgaccugugcuucacaaacguguacgccgacagcuucgugauccggggagaugaagugcggcagauugccccuggacagacaggcaagaucgccgacuacaacuacaagcugcccgacgacuucaccggcugugugauugccuggaacagcaacaaccuggacuccaaagucggcggcaacuacaauuaccuguuccggcuguuccggaaguccaaucugaagcccuucgagcgggacaucagcaccgaaaucuaucaggccggcagcaccccuugcaacggcguggaaggcuucaacugcuacuucccacugcaguccuacggcuuucagcccacaaauggcgugggcuaucagcccuacagagugguggugcugagcuucgaacugcugcaugcuccugccacagugugcggcccuaagaaaagcaccaaucucgugaagaacaaaugcgugaacuucaacuucaacggccugaccggcaccggcgugcugacagagagcaacaagaaguuccugccauuccagcaguuuggccgggauaucgccgauaccacagacgccguuagagauccccagacacuggaaauccuggacaucaccccaugcagcuucggcggagugucugugaucaccccuggcaccaacaccagcaaucagguggcagugcuguaccagggcgugaacuguaccgaagugcccguggccauucacgccgaucagcugacaccuacauggcggguguacuccaccggcagcaauguguuucagaccagagccggcugucugaucggagccgagcacgugaacaauagcuacgagugcgacauccccaucggcgcuggcaucugugccagcuaccagacacagacaaacagccccagacgggcuagaagcguggccagccagagcgugauugccuacacaaugucucugggcgccgagaacagcguggccuacuccaacaacucuaucgcuauccccaccaacuucaccaucagcgugaccaccgagauccugccuguguccaugaccaagaccagcguggacugcaccauguacaucugcggcgauuccaccgagugcuccaaccugcugcugcaguacggcagcuucugcacccagcugaauagagcccugacagggaucgccguggaacaggacaagaacacccaagagguguucgcccaagugaagcaaaucuacaagaccccuccuaucaaggacuucggcggcuucaauuucagccagauucugcccgauccuagcaagcccagcaagcggagcuucaucgaggaccugcuguucaacaaagugacacuggccgacgccggcuucaucaagcaguauggcgauugucugggcgacauugccgccagggaucugauuugcgcccagaaguuuaacggacugacagugcugccuccucugcugaccgaugagaugaucgcccaguacacaucugcccugcuggccggcacaaucacaagcggcuggacauuuggagcuggcgccgcucugcagauccccuuugcuaugcagauggccuaccgguucaacggcaucggagugacccagaaugugcuguacgagaaccagaagcugaucgccaaccaguucaacagcgccaucggcaagauccaggacagccugagcagcacagcaagcgcccugggaaagcugcaggacguggucaaccagaaugcccaggcacugaacacccuggucaagcagcuguccuccaacuucggcgccaucagcucugugcugaacgauauccugagcagacuggacaaggucgaggccgaggugcagaucgacagacugaucacaggcagacugcagagccuccagacauacgugacccagcagcugaucagagccgccgagauuagagccucugccaaucuggccgccaccaagaugucugagugugugcugggccagagcaagagaguggacuuuugcggcaagggcuaccaccugaugagcuucccucagucugccccucacggcgugguguuucugcacgugacauaugugcccgcucaagagaagaauuucaccaccgcuccagccaucugccacgacggcaaagcccacuuuccuagagaaggcguguucguguccaacggcacccauugguucgugacacagcggaacuucuacgagccccagaucaucaccaccgacaacaccuucgugucuggcaacugcgacguugugaucggcauugugaacaauaccguguacgacccucugcagcccgagcuggacagcuucaaagaggaacuggacaaguacuuuaagaaccacacaagccccgacguggaccugggcgauaucagcggaaucaaugccagcgucgugaacauccagaaagagaucgaccggcugaacgagguggccaagaaucugaacgagagccugaucgaccugcaagaacuggggaaguacgagcaguacaucaaguggcccugguacaucuggcugggcuuuaucgccggacugauugccaucgugaucgucacaaucaugcuguguugcaugaccagcugcuguagcugccugaagggcuguuguagcuguggcagcugcugcaaguucgacgaggacgauucugagcccgugcugaagggcgugaaacugcacuacaccugaggacuaguuauaagacugacuagcccgaugggccucccaacgggcccuccuccccuccuugcaccgagauuaauaaaaaaaaaaaaaaaaaaaaaaaaaaaaaaaaaaaaaaaaaaaaaaaaaaaaaaaaaaaaaaaaaaaaaaaaaaaaaaaaaaaaaaaaaaaaaaaaaaaa

SEQ ID NO: 25473 - RNA, 4002 nt, Artificial Sequence
  SARS-CoV-2/Wuhan/WIV05/2019__EPI_ISL_402128 spike protein mRNA gc mod (1-1273)(H69del_V70del_Y144del_N501Y_A570D_D614G_P681H_T716I_S982 A_D1118H)
aggagaaagcuuaccauguucguguuucuggugcugcugccccugguguccagccagugugugaaccugaccaccagaacacagcugccuccagccuacaccaacagcuucaccagaggcguguacuaccccgacaagguguucagauccagcgugcugcacucuacccaggaccuguuccugccuuucuucagcaacgugaccugguuccacgccaucuccggcaccaauggcaccaagagauucgacaaccccgugcugcccuucaacgacgggguguacuuugccagcaccgagaaguccaacaucaucagaggcuggaucuucggcaccacacuggacagcaagacccagagccugcugaucgugaacaacgccaccaacguggucaucaaagugugcgaguuccaguucugcaacgaccccuuccugggcgucuaccacaagaacaacaagagcuggauggaaagcgaguuccggguguacagcagcgccaacaacugcaccuucgaguacgugucccagccuuuccugauggaccuggaaggcaagcagggcaacuucaagaaccugcgcgaguucguguucaagaacaucgacggcuacuucaaaaucuacagcaagcacaccccuaucaaccucgugcgggaucugccucagggcuucucugcucuggaaccccugguggaucugcccaucggcaucaacaucacccgguuucagacacugcuggcccugcacagaagcuaccugacaccuggcgauagcagcagcggauggacagcuggugccgccgcuuacuaugugggcuaccugcagccuagaaccuuccugcugaaguacaacgagaacggcaccaucaccgacgccguggauugugcucuggauccucugagcgagacaaagugcacccugaaguccuucaccguggaaaagggcaucuaccagaccagcaacuuccgggugcagcccaccgaauccaucgugcgguuccccaauaucaccaaucugugccccuucggcgagguguucaaugccaccagauucgccucuguguacgccuggaaccggaagcggaucagcaauugcguggccgacuacuccgugcuguacaacuccgccagcuucagcaccuucaagugcuacggcguguccccuaccaagcugaacgaccugugcuucacaaacguguacgccgacagcuucgugauccggggagaugaagugcggcagauugccccuggacagacaggcaagaucgccgacuacaacuacaagcugcccgacgacuucaccggcugugugauugccuggaacagcaacaaccuggacuccaaagucggcggcaacuacaauuaccuguaccggcuguuccggaaguccaaucugaagcccuucgagcgggacaucagcaccgaaaucuaucaggccggcagcaccccuugcaacggcguggaaggcuucaacugcuacuucccacugcaguccuacggcuuucagcccacauacggcgugggcuaucagcccuacagagugguggugcugagcuucgaacugcugcaugcuccugccacagugugcggcccuaagaaaagcaccaaucucgugaagaacaaaugcgugaacuucaacuucaacggccugaccggcaccggcgugcugacagagagcaacaagaaguuccugccauuccagcaguuuggccgggauaucgacgauaccacagacgccguuagagauccccagacacuggaaauccuggacaucaccccaugcagcuucggcggagugucugugaucaccccuggcaccaacaccagcaaucagguggcagugcuguaccagggcgugaacuguaccgaagugcccguggccauucacgccgaucagcugacaccuacauggcggguguacuccaccggcagcaauguguuucagaccagagccggcugucugaucggagccgagcacgugaacaauagcuacgagugcgacauccccaucggcgcuggcaucugugccagcuaccagacacagacaaacagccacagacgggcuagaagcguggccagccagagcaucauugccuacacaaugucucugggcgccgagaacagcguggccuacuccaacaacucuaucgcuauccccaucaacuucaccaucagcgugaccaccgagauccugccuguguccaugaccaagaccagcguggacugcaccauguacaucugcggcgauuccaccgagugcuccaaccugcugcugcaguacggcagcuucugcacccagcugaauagagcccugacagggaucgccguggaacaggacaagaacacccaagagguguucgcccaagugaagcaaaucuacaagaccccuccuaucaaggacuucggcggcuucaauuucagccagauucugcccgauccuagcaagcccagcaagcggagcuucaucgaggaccugcuguucaacaaagugacacuggccgacgccggcuucaucaagcaguauggcgauugucugggcgacauugccgccagggaucugauuugcgcccagaaguuuaacggacugacagugcugccuccucugcugaccgaugagaugaucgcccaguacacaucugcccugcuggccggcacaaucacaagcggcuggacauuuggagcuggcgccgcucugcagauccccuuugcuaugcagauggccuaccgguucaacggcaucggagugacccagaaugugcuguacgagaaccagaagcugaucgccaaccaguucaacagcgccaucggcaagauccaggacagccugagcagcacagcaagcgcccugggaaagcugcaggacguggucaaccagaaugcccaggcacugaacacccuggucaagcagcuguccuccaacuucggcgccaucagcucugugcugaacgauauccuggccagacuggacaaggucgaggccgaggugcagaucgacagacugaucacaggcagacugcagagccuccagacauacgugacccagcagcugaucagagccgccgagauuagagccucugccaaucuggccgccaccaagaugucugagugugugcugggccagagcaagagaguggacuuuugcggcaagggcuaccaccugaugagcuucccucagucugccccucacggcgugguguuucugcacgugacauaugugcccgcucaagagaagaauuucaccaccgcuccagccaucugccacgacggcaaagcccacuuuccuagagaaggcguguucguguccaacggcacccauugguucgugacacagcggaacuucuacgagccccagaucaucaccacccacaacaccuucgugucuggcaacugcgacguugugaucggcauugugaacaauaccguguacgacccucugcagcccgagcuggacagcuucaaagaggaacuggacaaguacuuuaagaaccacacaagccccgacguggaccugggcgauaucagcggaaucaaugccagcgucgugaacauccagaaagagaucgaccggcugaacgagguggccaagaaucugaacgagagccugaucgaccugcaagaacuggggaaguacgagcaguacaucaaguggcccugguacaucuggcugggcuuuaucgccggacugauugccaucgugauggucacaaucaugcuguguugcaugaccagcugcuguagcugccugaagggcuguuguagcuguggcagcugcugcaaguucgacgaggacgauucugagcccgugcugaagggcgugaaacugcacuacaccugaggacuaguuauaagacugacuagcccgaugggccucccaacgggcccuccuccccuccuugcaccgagauuaauaaaaaaaaaaaaaaaaaaaaaaaaaaaaaaaaaaaaaaaaaaaaaaaaaaaaaaaaaaaaaaaaaaaaaaaaaaaaaaaaaaaaaaaaaaaaaaaaaaaa

SEQ ID NO: 25474 - RNA, 4011 nt, Artificial Sequence
  SARS-CoV-2/Wuhan/WIV05/2019__EPI_ISL_402128 spike protein mRNA gc mod (1-1273)(K417N_E484K_N501Y_D614G)
aggagaaagcuuaccauguucguguuucuggugcugcugccccugguguccagccagugugugaaccugaccaccagaacacagcugccuccagccuacaccaacagcuucaccagaggcguguacuaccccgacaagguguucagauccagcgugcugcacucuacccaggaccuguuccugccuuucuucagcaacgugaccugguuccacgccauccacguguccggcaccaauggcaccaagagauucgacaaccccgugcugcccuucaacgacgggguguacuuugccagcaccgagaaguccaacaucaucagaggcuggaucuucggcaccacacuggacagcaagacccagagccugcugaucgugaacaacgccaccaacguggucaucaaagugugcgaguuccaguucugcaacgaccccuuccugggcgucuacuaccacaagaacaacaagagcuggauggaaagcgaguuccggguguacagcagcgccaacaacugcaccuucgaguacgugucccagccuuuccugauggaccuggaaggcaagcagggcaacuucaagaaccugcgcgaguucguguucaagaacaucgacggcuacuucaaaaucuacagcaagcacaccccuaucaaccucgugcgggaucugccucagggcuucucugcucuggaaccccugguggaucugcccaucggcaucaacaucacccgguuucagacacugcuggcccugcacagaagcuaccugacaccuggcgauagcagcagcggauggacagcuggugccgccgcuuacuaugugggcuaccugcagccuagaaccuuccugcugaaguacaacgagaacggcaccaucaccgacgccguggauugugcucuggauccucugagcgagacaaagugcacccugaaguccuucaccguggaaaagggcaucuaccagaccagcaacuuccgggugcagcccaccgaauccaucgugcgguuccccaauaucaccaaucugugccccuucggcgagguguucaaugccaccagauucgccucuguguacgccuggaaccggaagcggaucagcaauugcguggccgacuacuccgugcuguacaacuccgccagcuucagcaccuucaagugcuacggcguguccccuaccaagcugaacgaccugugcuucacaaacguguacgccgacagcuucgugauccggggagaugaagugcggcagauugccccuggacagacaggcaacaucgccgacuacaacuacaagcugcccgacgacuucaccggcugugugauugccuggaacagcaacaaccuggacuccaaagucggcggcaacuacaauuaccuguaccggcuguuccggaaguccaaucugaagcccuucgagcgggacaucagcaccgaaaucuaucaggccggcagcaccccuugcaacggcgugaagggcuucaacugcuacuucccacugcaguccuacggcuuucagcccacauacggcgugggcuaucagcccuacagagugguggugcugagcuucgaacugcugcaugcuccugccacagugugcggcccuaagaaaagcaccaaucucgugaagaacaaaugcgugaacuucaacuucaacggccugaccggcaccggcgugcugacagagagcaacaagaaguuccugccauuccagcaguuuggccgggauaucgccgauaccacagacgccguuagagauccccagacacuggaaauccuggacaucaccccaugcagcuucggcggagugucugugaucaccccuggcaccaacaccagcaaucagguggcagugcuguaccagggcgugaacuguaccgaagugcccguggccauucacgccgaucagcugacaccuacauggcggguguacuccaccggcagcaauguguuucagaccagagccggcugucugaucggagccgagcacgugaacaauagcuacgagugcgacauccccaucggcgcuggcaucugugccagcuaccagacacagacaaacagccccagacgggcuagaagcguggccagccagagcaucauugccuacacaaugucucugggcgccgagaacagcguggccuacuccaacaacucuaucgcuauccccaccaacuucaccaucagcgugaccaccgagauccugccuguguccaugaccaagaccagcguggacugcaccauguacaucugcggcgauuccaccgagugcuccaaccugcugcugcaguacggcagcuucugcacccagcugaauagagcccugacagggaucgccguggaacaggacaagaacacccaagagguguucgcccaagugaagcaaaucuacaagaccccuccuaucaaggacuucggcggcuucaauuucagccagauucugcccgauccuagcaagcccagcaagcggagcuucaucgaggaccugcuguucaacaaagugacacuggccgacgccggcuucaucaagcaguauggcgauugucugggcgacauugccgccagggaucugauuugcgcccagaaguuuaacggacugacagugcugccuccucugcugaccgaugagaugaucgcccaguacacaucugcccugcuggccggcacaaucacaagcggcuggacauuuggagcuggcgccgcucugcagauccccuuugcuaugcagauggccuaccgguucaacggcaucggagugacccagaaugugcuguacgagaaccagaagcugaucgccaaccaguucaacagcgccaucggcaagauccaggacagccugagcagcacagcaagcgcccugggaaagcugcaggacguggucaaccagaaugcccaggcacugaacacccuggucaagcagcuguccuccaacuucggcgccaucagcucugugcugaacgauauccugagcagacuggacaaggucgaggccgaggugcagaucgacagacugaucacaggcagacugcagagccuccagacauacgugacccagcagcugaucagagccgccgagauuagagccucugccaaucuggccgccaccaagaugucugagugugugcugggccagagcaagagaguggacuuuugcggcaagggcuaccaccugaugagcuucccucagucugccccucacggcgugguguuucugcacgugacauaugugcccgcucaagagaagaauuucaccaccgcuccagccaucugccacgacggcaaagcccacuuuccuagagaaggcguguucguguccaacggcacccauugguucgugacacagcggaacuucuacgagccccagaucaucaccaccgacaacaccuucgugucuggcaacugcgacguugugaucggcauugugaacaauaccguguacgacccucugcagcccgagcuggacagcuucaaagaggaacuggacaaguacuuuaagaaccacacaagccccgacguggaccugggcgauaucagcggaaucaaugccagcgucgugaacauccagaaagagaucgaccggcugaacgagguggccaagaaucugaacgagagccugaucgaccugcaagaacuggggaaguacgagcaguacaucaaguggcccugguacaucuggcugggcuuuaucgccggacugauugccaucgugauggucacaaucaugcuguguugcaugaccagcugcuguagcugccugaagggcuguuguagcuguggcagcugcugcaaguucgacgaggacgauucugagcccgugcugaagggcgugaaacugcacuacaccugaggacuaguuauaagacugacuagcccgaugggccucccaacgggcccuccuccccuccuugcaccgagauuaauaaaaaaaaaaaaaaaaaaaaaaaaaaaaaaaaaaaaaaaaaaaaaaaaaaaaaaaaaaaaaaaaaaaaaaaaaaaaaaaaaaaaaaaaaaaaaaaaaaaa

SEQ ID NO: 25475 - RNA, 4002 nt, Artificial Sequence
  SARS-CoV-2/Wuhan/WIV05/2019__EPI_ISL_402128 spike protein mRNA gc mod (1-1273)(L18F_D80A_D215G_L242del_A243del_L244del_R246I_K417N_E484 K_N501Y_D614G_A701V)
aggagaaagcuuaccauguucguguuucuggugcugcugccccugguguccagccagugugugaacuucaccaccagaacacagcugccuccagccuacaccaacagcuucaccagaggcguguacuaccccgacaagguguucagauccagcgugcugcacucuacccaggaccuguuccugccuuucuucagcaacgugaccugguuccacgccauccacguguccggcaccaauggcaccaagagauucgccaaccccgugcugcccuucaacgacgggguguacuuugccagcaccgagaaguccaacaucaucagaggcuggaucuucggcaccacacuggacagcaagacccagagccugcugaucgugaacaacgccaccaacguggucaucaaagugugcgaguuccaguucugcaacgaccccuuccugggcgucuacuaccacaagaacaacaagagcuggauggaaagcgaguuccggguguacagcagcgccaacaacugcaccuucgaguacgugucccagccuuuccugauggaccuggaaggcaagcagggcaacuucaagaaccugcgcgaguucguguucaagaacaucgacggcuacuucaaaaucuacagcaagcacaccccuaucaaccucgugcggggccugccucagggcuucucugcucuggaaccccugguggaucugcccaucggcaucaacaucacccgguuucagacacugcacaucagcuaccugacaccuggcgauagcagcagcggauggacagcuggugccgccgcuuacuaugugggcuaccugcagccuagaaccuuccugcugaaguacaacgagaacggcaccaucaccgacgccguggauugugcucuggauccucugagcgagacaaagugcacccugaaguccuucaccguggaaaagggcaucuaccagaccagcaacuuccgggugcagcccaccgaauccaucgugcgguuccccaauaucaccaaucugugccccuucggcgagguguucaaugccaccagauucgccucuguguacgccuggaaccggaagcggaucagcaauugcguggccgacuacuccgugcuguacaacuccgccagcuucagcaccuucaagugcuacggcguguccccuaccaagcugaacgaccugugcuucacaaacguguacgccgacagcuucgugauccggggagaugaagugcggcagauugccccuggacagacaggcaacaucgccgacuacaacuacaagcugcccgacgacuucaccggcugugugauugccuggaacagcaacaaccuggacuccaaagucggcggcaacuacaauuaccuguaccggcuguuccggaaguccaaucugaagcccuucgagcgggacaucagcaccgaaaucuaucaggccggcagcaccccuugcaacggcgugaagggcuucaacugcuacuucccacugcaguccuacggcuuucagcccacauacggcgugggcuaucagcccuacagagugguggugcugagcuucgaacugcugcaugcuccugccacagugugcggcccuaagaaaagcaccaaucucgugaagaacaaaugcgugaacuucaacuucaacggccugaccggcaccggcgugcugacagagagcaacaagaaguuccugccauuccagcaguuuggccgggauaucgccgauaccacagacgccguuagagauccccagacacuggaaauccuggacaucaccccaugcagcuucggcggagugucugugaucaccccuggcaccaacaccagcaaucagguggcagugcuguaccagggcgugaacuguaccgaagugcccguggccauucacgccgaucagcugacaccuacauggcggguguacuccaccggcagcaauguguuucagaccagagccggcugucugaucggagccgagcacgugaacaauagcuacgagugcgacauccccaucggcgcuggcaucugugccagcuaccagacacagacaaacagccccagacgggcuagaagcguggccagccagagcaucauugccuacacaaugucucugggcguggagaacagcguggccuacuccaacaacucuaucgcuauccccaccaacuucaccaucagcgugaccaccgagauccugccuguguccaugaccaagaccagcguggacugcaccauguacaucugcggcgauuccaccgagugcuccaaccugcugcugcaguacggcagcuucugcacccagcugaauagagcccugacagggaucgccguggaacaggacaagaacacccaagagguguucgcccaagugaagcaaaucuacaagaccccuccuaucaaggacuucggcggcuucaauuucagccagauucugcccgauccuagcaagcccagcaagcggagcuucaucgaggaccugcuguucaacaaagugacacuggccgacgccggcuucaucaagcaguauggcgauugucugggcgacauugccgccagggaucugauuugcgcccagaaguuuaacggacugacagugcugccuccucugcugaccgaugagaugaucgcccaguacacaucugcccugcuggccggcacaaucacaagcggcuggacauuuggagcuggcgccgcucugcagauccccuuugcuaugcagauggccuaccgguucaacggcaucggagugacccagaaugugcuguacgagaaccagaagcugaucgccaaccaguucaacagcgccaucggcaagauccaggacagccugagcagcacagcaagcgcccugggaaagcugcaggacguggucaaccagaaugcccaggcacugaacacccuggucaagcagcuguccuccaacuucggcgccaucagcucugugcugaacgauauccugagcagacuggacaaggucgaggccgaggugcagaucgacagacugaucacaggcagacugcagagccuccagacauacgugacccagcagcugaucagagccgccgagauuagagccucugccaaucuggccgccaccaagaugucugagugugugcugggccagagcaagagaguggacuuuugcggcaagggcuaccaccugaugagcuucccucagucugccccucacggcgugguguuucugcacgugacauaugugcccgcucaagagaagaauuucaccaccgcuccagccaucugccacgacggcaaagcccacuuuccuagagaaggcguguucguguccaacggcacccauugguucgugacacagcggaacuucuacgagccccagaucaucaccaccgacaacaccuucgugucuggcaacugcgacguugugaucggcauugugaacaauaccguguacgacccucugcagcccgagcuggacagcuucaaagaggaacuggacaaguacuuuaagaaccacacaagccccgacguggaccugggcgauaucagcggaaucaaugccagcgucgugaacauccagaaagagaucgaccggcugaacgagguggccaagaaucugaacgagagccugaucgaccugcaagaacuggggaaguacgagcaguacaucaaguggcccugguacaucuggcugggcuuuaucgccggacugauugccaucgugauggucacaaucaugcuguguugcaugaccagcugcuguagcugccugaagggcuguuguagcuguggcagcugcugcaaguucgacgaggacgauucugagcccgugcugaagggcgugaaacugcacuacaccugaggacuaguuauaagacugacuagcccgaugggccucccaacgggcccuccuccccuccuugcaccgagauuaauaaaaaaaaaaaaaaaaaaaaaaaaaaaaaaaaaaaaaaaaaaaaaaaaaaaaaaaaaaaaaaaaaaaaaaaaaaaaaaaaaaaaaaaaaaaaaaaaaaaa

SEQ ID NO: 25476 - RNA, 4011 nt, Artificial Sequence
  SARS-CoV-2/Wuhan/WIV05/2019__EPI_ISL_402128 spike protein mRNA gc mod (1-1273)(E484K_D614G)
aggagaaagcuuaccauguucguguuucuggugcugcugccccugguguccagccagugugugaaccugaccaccagaacacagcugccuccagccuacaccaacagcuucaccagaggcguguacuaccccgacaagguguucagauccagcgugcugcacucuacccaggaccuguuccugccuuucuucagcaacgugaccugguuccacgccauccacguguccggcaccaauggcaccaagagauucgacaaccccgugcugcccuucaacgacgggguguacuuugccagcaccgagaaguccaacaucaucagaggcuggaucuucggcaccacacuggacagcaagacccagagccugcugaucgugaacaacgccaccaacguggucaucaaagugugcgaguuccaguucugcaacgaccccuuccugggcgucuacuaccacaagaacaacaagagcuggauggaaagcgaguuccggguguacagcagcgccaacaacugcaccuucgaguacgugucccagccuuuccugauggaccuggaaggcaagcagggcaacuucaagaaccugcgcgaguucguguucaagaacaucgacggcuacuucaaaaucuacagcaagcacaccccuaucaaccucgugcgggaucugccucagggcuucucugcucuggaaccccugguggaucugcccaucggcaucaacaucacccgguuucagacacugcuggcccugcacagaagcuaccugacaccuggcgauagcagcagcggauggacagcuggugccgccgcuuacuaugugggcuaccugcagccuagaaccuuccugcugaaguacaacgagaacggcaccaucaccgacgccguggauugugcucuggauccucugagcgagacaaagugcacccugaaguccuucaccguggaaaagggcaucuaccagaccagcaacuuccgggugcagcccaccgaauccaucgugcgguuccccaauaucaccaaucugugccccuucggcgagguguucaaugccaccagauucgccucuguguacgccuggaaccggaagcggaucagcaauugcguggccgacuacuccgugcuguacaacuccgccagcuucagcaccuucaagugcuacggcguguccccuaccaagcugaacgaccugugcuucacaaacguguacgccgacagcuucgugauccggggagaugaagugcggcagauugccccuggacagacaggcaagaucgccgacuacaacuacaagcugcccgacgacuucaccggcugugugauugccuggaacagcaacaaccuggacuccaaagucggcggcaacuacaauuaccuguaccggcuguuccggaaguccaaucugaagcccuucgagcgggacaucagcaccgaaaucuaucaggccggcagcaccccuugcaacggcgugaagggcuucaacugcuacuucccacugcaguccuacggcuuucagcccacaaauggcgugggcuaucagcccuacagagugguggugcugagcuucgaacugcugcaugcuccugccacagugugcggcccuaagaaaagcaccaaucucgugaagaacaaaugcgugaacuucaacuucaacggccugaccggcaccggcgugcugacagagagcaacaagaaguuccugccauuccagcaguuuggccgggauaucgccgauaccacagacgccguuagagauccccagacacuggaaauccuggacaucaccccaugcagcuucggcggagugucugugaucaccccuggcaccaacaccagcaaucagguggcagugcuguaccagggcgugaacuguaccgaagugcccguggccauucacgccgaucagcugacaccuacauggcggguguacuccaccggcagcaauguguuucagaccagagccggcugucugaucggagccgagcacgugaacaauagcuacgagugcgacauccccaucggcgcuggcaucugugccagcuaccagacacagacaaacagccccagacgggcuagaagcguggccagccagagcaucauugccuacacaaugucucugggcgccgagaacagcguggccuacuccaacaacucuaucgcuauccccaccaacuucaccaucagcgugaccaccgagauccugccuguguccaugaccaagaccagcguggacugcaccauguacaucugcggcgauuccaccgagugcuccaaccugcugcugcaguacggcagcuucugcacccagcugaauagagcccugacagggaucgccguggaacaggacaagaacacccaagagguguucgcccaagugaagcaaaucuacaagaccccuccuaucaaggacuucggcggcuucaauuucagccagauucugcccgauccuagcaagcccagcaagcggagcuucaucgaggaccugcuguucaacaaagugacacuggccgacgccggcuucaucaagcaguauggcgauugucugggcgacauugccgccagggaucugauuugcgcccagaaguuuaacggacugacagugcugccuccucugcugaccgaugagaugaucgcccaguacacaucugcccugcuggccggcacaaucacaagcggcuggacauuuggagcuggcgccgcucugcagauccccuuugcuaugcagauggccuaccgguucaacggcaucggagugacccagaaugugcuguacgagaaccagaagcugaucgccaaccaguucaacagcgccaucggcaagauccaggacagccugagcagcacagcaagcgcccugggaaagcugcaggacguggucaaccagaaugcccaggcacugaacacccuggucaagcagcuguccuccaacuucggcgccaucagcucugugcugaacgauauccugagcagacuggacaaggucgaggccgaggugcagaucgacagacugaucacaggcagacugcagagccuccagacauacgugacccagcagcugaucagagccgccgagauuagagccucugccaaucuggccgccaccaagaugucugagugugugcugggccagagcaagagaguggacuuuugcggcaagggcuaccaccugaugagcuucccucagucugccccucacggcgugguguuucugcacgugacauaugugcccgcucaagagaagaauuucaccaccgcuccagccaucugccacgacggcaaagcccacuuuccuagagaaggcguguucguguccaacggcacccauugguucgugacacagcggaacuucuacgagccccagaucaucaccaccgacaacaccuucgugucuggcaacugcgacguugugaucggcauugugaacaauaccguguacgacccucugcagcccgagcuggacagcuucaaagaggaacuggacaaguacuuuaagaaccacacaagccccgacguggaccugggcgauaucagcggaaucaaugccagcgucgugaacauccagaaagagaucgaccggcugaacgagguggccaagaaucugaacgagagccugaucgaccugcaagaacuggggaaguacgagcaguacaucaaguggcccugguacaucuggcugggcuuuaucgccggacugauugccaucgugauggucacaaucaugcuguguugcaugaccagcugcuguagcugccugaagggcuguuguagcuguggcagcugcugcaaguucgacgaggacgauucugagcccgugcugaagggcgugaaacugcacuacaccugaggacuaguuauaagacugacuagcccgaugggccucccaacgggcccuccuccccuccuugcaccgagauuaauaaaaaaaaaaaaaaaaaaaaaaaaaaaaaaaaaaaaaaaaaaaaaaaaaaaaaaaaaaaaaaaaaaaaaaaaaaaaaaaaaaaaaaaaaaaaaaaaaaaa

SEQ ID NO: 25477 - RNA, 4011 nt, Artificial Sequence
  SARS-CoV-2/Wuhan/WIV05/2019__EPI_ISL_402128 spike protein mRNA gc mod (1-1273)(L18F_T20N_P26S_D138Y_R190S_K417T_E484K_N501Y_D614G_H655Y _T1027I)
aggagaaagcuuaccauguucguguuucuggugcugcugccccugguguccagccagugugugaacuucaccaacagaacacagcugccuagcgccuacaccaacagcuucaccagaggcguguacuaccccgacaagguguucagauccagcgugcugcacucuacccaggaccuguuccugccuuucuucagcaacgugaccugguuccacgccauccacguguccggcaccaauggcaccaagagauucgacaaccccgugcugcccuucaacgacgggguguacuuugccagcaccgagaaguccaacaucaucagaggcuggaucuucggcaccacacuggacagcaagacccagagccugcugaucgugaacaacgccaccaacguggucaucaaagugugcgaguuccaguucugcaacuaccccuuccugggcgucuacuaccacaagaacaacaagagcuggauggaaagcgaguuccggguguacagcagcgccaacaacugcaccuucgaguacgugucccagccuuuccugauggaccuggaaggcaagcagggcaacuucaagaaccugagcgaguucguguucaagaacaucgacggcuacuucaaaaucuacagcaagcacaccccuaucaaccucgugcgggaucugccucagggcuucucugcucuggaaccccugguggaucugcccaucggcaucaacaucacccgguuucagacacugcuggcccugcacagaagcuaccugacaccuggcgauagcagcagcggauggacagcuggugccgccgcuuacuaugugggcuaccugcagccuagaaccuuccugcugaaguacaacgagaacggcaccaucaccgacgccguggauugugcucuggauccucugagcgagacaaagugcacccugaaguccuucaccguggaaaagggcaucuaccagaccagcaacuuccgggugcagcccaccgaauccaucgugcgguuccccaauaucaccaaucugugccccuucggcgagguguucaaugccaccagauucgccucuguguacgccuggaaccggaagcggaucagcaauugcguggccgacuacuccgugcuguacaacuccgccagcuucagcaccuucaagugcuacggcguguccccuaccaagcugaacgaccugugcuucacaaacguguacgccgacagcuucgugauccggggagaugaagugcggcagauugccccuggacagacaggcaccaucgccgacuacaacuacaagcugcccgacgacuucaccggcugugugauugccuggaacagcaacaaccuggacuccaaagucggcggcaacuacaauuaccuguaccggcuguuccggaaguccaaucugaagcccuucgagcgggacaucagcaccgaaaucuaucaggccggcagcaccccuugcaacggcgugaagggcuucaacugcuacuucccacugcaguccuacggcuuucagcccacauacggcgugggcuaucagcccuacagagugguggugcugagcuucgaacugcugcaugcuccugccacagugugcggcccuaagaaaagcaccaaucucgugaagaacaaaugcgugaacuucaacuucaacggccugaccggcaccggcgugcugacagagagcaacaagaaguuccugccauuccagcaguuuggccgggauaucgccgauaccacagacgccguuagagauccccagacacuggaaauccuggacaucaccccaugcagcuucggcggagugucugugaucaccccuggcaccaacaccagcaaucagguggcagugcuguaccagggcgugaacuguaccgaagugcccguggccauucacgccgaucagcugacaccuacauggcggguguacuccaccggcagcaauguguuucagaccagagccggcugucugaucggagccgaguacgugaacaauagcuacgagugcgacauccccaucggcgcuggcaucugugccagcuaccagacacagacaaacagccccagacgggcuagaagcguggccagccagagcaucauugccuacacaaugucucugggcgccgagaacagcguggccuacuccaacaacucuaucgcuauccccaccaacuucaccaucagcgugaccaccgagauccugccuguguccaugaccaagaccagcguggacugcaccauguacaucugcggcgauuccaccgagugcuccaaccugcugcugcaguacggcagcuucugcacccagcugaauagagcccugacagggaucgccguggaacaggacaagaacacccaagagguguucgcccaagugaagcaaaucuacaagaccccuccuaucaaggacuucggcggcuucaauuucagccagauucugcccgauccuagcaagcccagcaagcggagcuucaucgaggaccugcuguucaacaaagugacacuggccgacgccggcuucaucaagcaguauggcgauugucugggcgacauugccgccagggaucugauuugcgcccagaaguuuaacggacugacagugcugccuccucugcugaccgaugagaugaucgcccaguacacaucugcccugcuggccggcacaaucacaagcggcuggacauuuggagcuggcgccgcucugcagauccccuuugcuaugcagauggccuaccgguucaacggcaucggagugacccagaaugugcuguacgagaaccagaagcugaucgccaaccaguucaacagcgccaucggcaagauccaggacagccugagcagcacagcaagcgcccugggaaagcugcaggacguggucaaccagaaugcccaggcacugaacacccuggucaagcagcuguccuccaacuucggcgccaucagcucugugcugaacgauauccugagcagacuggacaaggucgaggccgaggugcagaucgacagacugaucacaggcagacugcagagccuccagacauacgugacccagcagcugaucagagccgccgagauuagagccucugccaaucuggccgccaucaagaugucugagugugugcugggccagagcaagagaguggacuuuugcggcaagggcuaccaccugaugagcuucccucagucugccccucacggcgugguguuucugcacgugacauaugugcccgcucaagagaagaauuucaccaccgcuccagccaucugccacgacggcaaagcccacuuuccuagagaaggcguguucguguccaacggcacccauugguucgugacacagcggaacuucuacgagccccagaucaucaccaccgacaacaccuucgugucuggcaacugcgacguugugaucggcauugugaacaauaccguguacgacccucugcagcccgagcuggacagcuucaaagaggaacuggacaaguacuuuaagaaccacacaagccccgacguggaccugggcgauaucagcggaaucaaugccagcgucgugaacauccagaaagagaucgaccggcugaacgagguggccaagaaucugaacgagagccugaucgaccugcaagaacuggggaaguacgagcaguacaucaaguggcccugguacaucuggcugggcuuuaucgccggacugauugccaucgugauggucacaaucaugcuguguugcaugaccagcugcuguagcugccugaagggcuguuguagcuguggcagcugcugcaaguucgacgaggacgauucugagcccgugcugaagggcgugaaacugcacuacaccugaggacuaguuauaagacugacuagcccgaugggccucccaacgggcccuccuccccuccuugcaccgagauuaauaaaaaaaaaaaaaaaaaaaaaaaaaaaaaaaaaaaaaaaaaaaaaaaaaaaaaaaaaaaaaaaaaaaaaaaaaaaaaaaaaaaaaaaaaaaaaaaaaaaa

SEQ ID NO: 25478 - RNA, 4011 nt, Artificial Sequence
  SARS-CoV-2/Wuhan/WIV05/2019__EPI_ISL_402128 spike protein mRNA gc mod (1-1273)(S13I_W152C_L452R_D614G)
aggagaaagcuuaccauguucguguuucuggugcugcugccccugguguccauccagugugugaaccugaccaccagaacacagcugccuccagccuacaccaacagcuucaccagaggcguguacuaccccgacaagguguucagauccagcgugcugcacucuacccaggaccuguuccugccuuucuucagcaacgugaccugguuccacgccauccacguguccggcaccaauggcaccaagagauucgacaaccccgugcugcccuucaacgacgggguguacuuugccagcaccgagaaguccaacaucaucagaggcuggaucuucggcaccacacuggacagcaagacccagagccugcugaucgugaacaacgccaccaacguggucaucaaagugugcgaguuccaguucugcaacgaccccuuccugggcgucuacuaccacaagaacaacaagagcugcauggaaagcgaguuccggguguacagcagcgccaacaacugcaccuucgaguacgugucccagccuuuccugauggaccuggaaggcaagcagggcaacuucaagaaccugcgcgaguucguguucaagaacaucgacggcuacuucaaaaucuacagcaagcacaccccuaucaaccucgugcgggaucugccucagggcuucucugcucuggaaccccugguggaucugcccaucggcaucaacaucacccgguuucagacacugcuggcccugcacagaagcuaccugacaccuggcgauagcagcagcggauggacagcuggugccgccgcuuacuaugugggcuaccugcagccuagaaccuuccugcugaaguacaacgagaacggcaccaucaccgacgccguggauugugcucuggauccucugagcgagacaaagugcacccugaaguccuucaccguggaaaagggcaucuaccagaccagcaacuuccgggugcagcccaccgaauccaucgugcgguuccccaauaucaccaaucugugccccuucggcgagguguucaaugccaccagauucgccucuguguacgccuggaaccggaagcggaucagcaauugcguggccgacuacuccgugcuguacaacuccgccagcuucagcaccuucaagugcuacggcguguccccuaccaagcugaacgaccugugcuucacaaacguguacgccgacagcuucgugauccggggagaugaagugcggcagauugccccuggacagacaggcaagaucgccgacuacaacuacaagcugcccgacgacuucaccggcugugugauugccuggaacagcaacaaccuggacuccaaagucggcggcaacuacaauuaccgcuaccggcuguuccggaaguccaaucugaagcccuucgagcgggacaucagcaccgaaaucuaucaggccggcagcaccccuugcaacggcguggaaggcuucaacugcuacuucccacugcaguccuacggcuuucagcccacaaauggcgugggcuaucagcccuacagagugguggugcugagcuucgaacugcugcaugcuccugccacagugugcggcccuaagaaaagcaccaaucucgugaagaacaaaugcgugaacuucaacuucaacggccugaccggcaccggcgugcugacagagagcaacaagaaguuccugccauuccagcaguuuggccgggauaucgccgauaccacagacgccguuagagauccccagacacuggaaauccuggacaucaccccaugcagcuucggcggagugucugugaucaccccuggcaccaacaccagcaaucagguggcagugcuguaccagggcgugaacuguaccgaagugcccguggccauucacgccgaucagcugacaccuacauggcggguguacuccaccggcagcaauguguuucagaccagagccggcugucugaucggagccgagcacgugaacaauagcuacgagugcgacauccccaucggcgcuggcaucugugccagcuaccagacacagacaaacagccccagacgggcuagaagcguggccagccagagcaucauugccuacacaaugucucugggcgccgagaacagcguggccuacuccaacaacucuaucgcuauccccaccaacuucaccaucagcgugaccaccgagauccugccuguguccaugaccaagaccagcguggacugcaccauguacaucugcggcgauuccaccgagugcuccaaccugcugcugcaguacggcagcuucugcacccagcugaauagagcccugacagggaucgccguggaacaggacaagaacacccaagagguguucgcccaagugaagcaaaucuacaagaccccuccuaucaaggacuucggcggcuucaauuucagccagauucugcccgauccuagcaagcccagcaagcggagcuucaucgaggaccugcuguucaacaaagugacacuggccgacgccggcuucaucaagcaguauggcgauugucugggcgacauugccgccagggaucugauuugcgcccagaaguuuaacggacugacagugcugccuccucugcugaccgaugagaugaucgcccaguacacaucugcccugcuggccggcacaaucacaagcggcuggacauuuggagcuggcgccgcucugcagauccccuuugcuaugcagauggccuaccgguucaacggcaucggagugacccagaaugugcuguacgagaaccagaagcugaucgccaaccaguucaacagcgccaucggcaagauccaggacagccugagcagcacagcaagcgcccugggaaagcugcaggacguggucaaccagaaugcccaggcacugaacacccuggucaagcagcuguccuccaacuucggcgccaucagcucugugcugaacgauauccugagcagacuggacaaggucgaggccgaggugcagaucgacagacugaucacaggcagacugcagagccuccagacauacgugacccagcagcugaucagagccgccgagauuagagccucugccaaucuggccgccaccaagaugucugagugugugcugggccagagcaagagaguggacuuuugcggcaagggcuaccaccugaugagcuucccucagucugccccucacggcgugguguuucugcacgugacauaugugcccgcucaagagaagaauuucaccaccgcuccagccaucugccacgacggcaaagcccacuuuccuagagaaggcguguucguguccaacggcacccauugguucgugacacagcggaacuucuacgagccccagaucaucaccaccgacaacaccuucgugucuggcaacugcgacguugugaucggcauugugaacaauaccguguacgacccucugcagcccgagcuggacagcuucaaagaggaacuggacaaguacuuuaagaaccacacaagccccgacguggaccugggcgauaucagcggaaucaaugccagcgucgugaacauccagaaagagaucgaccggcugaacgagguggccaagaaucugaacgagagccugaucgaccugcaagaacuggggaaguacgagcaguacaucaaguggcccugguacaucuggcugggcuuuaucgccggacugauugccaucgugauggucacaaucaugcuguguugcaugaccagcugcuguagcugccugaagggcuguuguagcuguggcagcugcugcaaguucgacgaggacgauucugagcccgugcugaagggcgugaaacugcacuacaccugaggacuaguuauaagacugacuagcccgaugggccucccaacgggcccuccuccccuccuugcaccgagauuaauaaaaaaaaaaaaaaaaaaaaaaaaaaaaaaaaaaaaaaaaaaaaaaaaaaaaaaaaaaaaaaaaaaaaaaaaaaaaaaaaaaaaaaaaaaaaaaaaaaaa

SEQ ID NO: 25479 - RNA, 4011 nt, Artificial Sequence
  SARS-CoV-2/Wuhan/WIV05/2019__EPI_ISL_402128 spike protein mRNA gc mod (1-1273)
aggagaaagcuuaccauguucguguuccuggugcugcugccucugguguccagccagugugugaaccugaccaccagaacacagcugccuccagccuacaccaacagcuuuaccagaggcguguacuaccccgacaagguguucagauccagcgugcugcacucuacccaggaccuguuccugccuuucuucagcaacgugaccugguuccacgccauccacguguccggcaccaauggcaccaagagauucgacaaccccgugcugcccuucaacgacgggguguacuuugccagcaccgagaaguccaacaucaucagaggcuggaucuucggcaccacacuggacagcaagacccagagccugcugaucgugaacaacgccaccaacguggucaucaaagugugcgaguuccaguucugcaacgaccccuuccugggcgucuacuaccacaagaacaacaagagcuggauggaaagcgaguuccggguguacagcagcgccaacaacugcaccuucgaguacgugucccagccuuuccugauggaccuggaaggcaagcagggcaacuucaagaaccugcgcgaguucguguuuaagaacaucgacggcuacuucaagaucuacagcaagcacaccccuaucaaccucgugcgggaucugccucagggcuucucugcucuggaaccccugguggaucugcccaucggcaucaacaucacccgguuucagacacugcuggcccugcacagaagcuaccugacaccuggcgauagcagcagcggauggacagcuggugccgccgcuuacuaugugggcuaccugcagccuagaaccuuccugcugaaguacaacgagaacggcaccaucaccgacgccguggauugugcucuggauccucugagcgagacaaagugcacccugaaguccuucaccguggaaaagggcaucuaccagaccagcaacuuccgggugcagcccaccgaauccaucgugcgguuccccaauaucaccaaucugugccccuucggcgagguguucaaugccaccagauucgccucuguguacgccuggaaccggaagcggaucagcaauugcguggccgacuacuccgugcuguacaacuccgccagcuucagcaccuucaagugcuacggcguguccccuaccaagcugaacgaccugugcuucacaaacguguacgccgacagcuucgugauccggggagaugaagugcggcagauugccccuggacagacaggcaagaucgccgacuacaacuacaagcugcccgacgacuucaccggcugugugauugccuggaacagcaacaaccuggacuccaaagucggcggcaacuacaauuaccuguaccggcuguuccggaaguccaaucugaagcccuucgagcgggacaucuccaccgagaucuaucaggccggcagcaccccuuguaacggcguggaaggcuucaacugcuacuucccacugcaguccuacggcuuucagcccacaaauggcgugggcuaucagcccuacagagugguggugcugagcuucgaacugcugcaugccccugccacagugugcggcccuaagaaaagcaccaaucucgugaagaacaaaugcgugaacuucaacuucaacggccugaccggcaccggcgugcugacagagagcaacaagaaguuccugccauuccagcaguuuggccgggauaucgccgauaccacagacgccguuagagauccccagacacuggaaauccuggacaucaccccuugcagcuucggcggagugucugugaucaccccuggcaccaacaccagcaaucagguggcagugcuguaccaggacgugaacuguaccgaagugcccguggccauucacgccgaucagcugacaccuacauggcggguguacuccaccggcagcaauguguuucagaccagagccggcugucugaucggagccgagcacgugaacaauagcuacgagugcgacauccccaucggcgcuggaaucugcgccagcuaccagacacagacaaacagcccucggagagccagaagcguggccagccagagcaucauugccuacacaaugucucugggcgccgagaacagcguggccuacuccaacaacucuaucgcuauccccaccaacuucaccaucagcgugaccacagagauccugccuguguccaugaccaagaccagcguggacugcaccauguacaucugcggcgauuccaccgagugcuccaaccugcugcugcaguacggcagcuucugcacccagcugaauagagcccugacagggaucgccguggaacaggacaagaacacccaagagguguucgcccaagugaagcagaucuacaagaccccuccuaucaaggacuucggcggcuucaauuucagccagauucugcccgauccuagcaagcccagcaagcggagcuucaucgaggaccugcuguucaacaaagugacacuggccgacgccggcuucaucaagcaguauggcgauugucugggcgacauugccgccagggaucugauuugcgcccagaaguuuaacggacugacagugcugccuccucugcugaccgaugagaugaucgcccaguacacaucugcccugcuggccggcacaaucacaagcggcuggacauuuggagcaggcgccgcucugcagauccccuuugcuaugcagauggccuaccgguucaacggcaucggagugacccagaaugugcuguacgagaaccagaagcugaucgccaaccaguucaacagcgccaucggcaagauccaggacagccugagcagcacagcaagcgcccugggaaagcugcaggacguggucaaccagaaugcccaggcacugaacacccuggucaagcagcuguccuccaacuucggcgccaucagcucugugcugaacgauauccugagcagacuggacaaggucgaggccgaggugcagaucgacagacugaucacaggcagacugcagagccuccagacauacgugacccagcagcugaucagagccgccgagauuagagccucugccaaucuggccgccaccaagaugucugagugugugcugggccagagcaagagaguggacuuuugcggcaagggcuaccaccugaugagcuucccucagucugccccucacggcgugguguuucugcacgugacauaugugcccgcucaagagaagaauuucaccaccgcuccagccaucugccacgacggcaaagcccacuuuccuagagaaggcguguucguguccaacggcacccauugguucgugacacagcggaacuucuacgagccccagaucaucaccaccgacaacaccuucgugucuggcaacugcgacgucgugaucggcauugugaacaauaccguguacgacccucugcagcccgagcuggacagcuucaaagaggaacuggacaaguacuuuaagaaccacacaagccccgacguggaccugggcgauaucagcggaaucaaugccagcgucgugaacauccagaaagagaucgaccggcugaacgagguggccaagaaucugaacgagagccugaucgaccugcaagaacuggggaaguacgagcaguacaucaaguggcccugguacaucuggcugggcuuuaucgccggacugauugccaucgugauggucacaaucaugcuguguugcaugaccagcugcuguagcugccugaagggcuguuguagcuguggcagcugcugcaaguucgacgaggacgauucugagcccgugcugaagggcgugaaacugcacuacacaugaggacuaguuauaagacugacuagcccgaugggccucccaacgggcccuccuccccuccuugcaccgagauuaauaaaaaaaaaaaaaaaaaaaaaaaaaaaaaaaaaaaaaaaaaaaaaaaaaaaaaaaaaaaaaaaaaaaaaaaaaaaaaaaaaaaaaaaaaaaaaaaaaaaa

SEQ ID NO: 25480 - RNA, 4011 nt, Artificial Sequence
  SARS-CoV-2/Wuhan/WIV05/2019__EPI_ISL_402128 spike protein mRNA gc mod (1-1273)(D614G)
aggagaaagcuuaccauguucguguuccuggugcugcugccucugguguccagccagugugugaaccugaccaccagaacacagcugccuccagccuacaccaacagcuuuaccagaggcguguacuaccccgacaagguguucagauccagcgugcugcacucuacccaggaccuguuccugccuuucuucagcaacgugaccugguuccacgccauccacguguccggcaccaauggcaccaagagauucgacaaccccgugcugcccuucaacgacgggguguacuuugccagcaccgagaaguccaacaucaucagaggcuggaucuucggcaccacacuggacagcaagacccagagccugcugaucgugaacaacgccaccaacguggucaucaaagugugcgaguuccaguucugcaacgaccccuuccugggcgucuacuaccacaagaacaacaagagcuggauggaaagcgaguuccggguguacagcagcgccaacaacugcaccuucgaguacgugucccagccuuuccugauggaccuggaaggcaagcagggcaacuucaagaaccugcgcgaguucguguuuaagaacaucgacggcuacuucaagaucuacagcaagcacaccccuaucaaccucgugcgggaucugccucagggcuucucugcucuggaaccccugguggaucugcccaucggcaucaacaucacccgguuucagacacugcuggcccugcacagaagcuaccugacaccuggcgauagcagcagcggauggacagcuggugccgccgcuuacuaugugggcuaccugcagccuagaaccuuccugcugaaguacaacgagaacggcaccaucaccgacgccguggauugugcucuggauccucugagcgagacaaagugcacccugaaguccuucaccguggaaaagggcaucuaccagaccagcaacuuccgggugcagcccaccgaauccaucgugcgguuccccaauaucaccaaucugugccccuucggcgagguguucaaugccaccagauucgccucuguguacgccuggaaccggaagcggaucagcaauugcguggccgacuacuccgugcuguacaacuccgccagcuucagcaccuucaagugcuacggcguguccccuaccaagcugaacgaccugugcuucacaaacguguacgccgacagcuucgugauccggggagaugaagugcggcagauugccccuggacagacaggcaagaucgccgacuacaacuacaagcugcccgacgacuucaccggcugugugauugccuggaacagcaacaaccuggacuccaaagucggcggcaacuacaauuaccuguaccggcuguuccggaaguccaaucugaagcccuucgagcgggacaucuccaccgagaucuaucaggccggcagcaccccuuguaacggcguggaaggcuucaacugcuacuucccacugcaguccuacggcuuucagcccacaaauggcgugggcuaucagcccuacagagugguggugcugagcuucgaacugcugcaugccccugccacagugugcggcccuaagaaaagcaccaaucucgugaagaacaaaugcgugaacuucaacuucaacggccugaccggcaccggcgugcugacagagagcaacaagaaguuccugccauuccagcaguuuggccgggauaucgccgauaccacagacgccguuagagauccccagacacuggaaauccuggacaucaccccuugcagcuucggcggagugucugugaucaccccuggcaccaacaccagcaaucagguggcagugcuguaccagggcgugaacuguaccgaagugcccguggccauucacgccgaucagcugacaccuacauggcggguguacuccaccggcagcaauguguuucagaccagagccggcugucugaucggagccgagcacgugaacaauagcuacgagugcgacauccccaucggcgcuggaaucugcgccagcuaccagacacagacaaacagcccucggagagccagaagcguggccagccagagcaucauugccuacacaaugucucugggcgccgagaacagcguggccuacuccaacaacucuaucgcuauccccaccaacuucaccaucagcgugaccacagagauccugccuguguccaugaccaagaccagcguggacugcaccauguacaucugcggcgauuccaccgagugcuccaaccugcugcugcaguacggcagcuucugcacccagcugaauagagcccugacagggaucgccguggaacaggacaagaacacccaagagguguucgcccaagugaagcagaucuacaagaccccuccuaucaaggacuucggcggcuucaauuucagccagauucugcccgauccuagcaagcccagcaagcggagcuucaucgaggaccugcuguucaacaaagugacacuggccgacgccggcuucaucaagcaguauggcgauugucugggcgacauugccgccagggaucugauuugcgcccagaaguuuaacggacugacagugcugccuccucugcugaccgaugagaugaucgcccaguacacaucugcccugcuggccggcacaaucacaagcggcuggacauuuggagcaggcgccgcucugcagauccccuuugcuaugcagauggccuaccgguucaacggcaucggagugacccagaaugugcuguacgagaaccagaagcugaucgccaaccaguucaacagcgccaucggcaagauccaggacagccugagcagcacagcaagcgcccugggaaagcugcaggacguggucaaccagaaugcccaggcacugaacacccuggucaagcagcuguccuccaacuucggcgccaucagcucugugcugaacgauauccugagcagacuggacaaggucgaggccgaggugcagaucgacagacugaucacaggcagacugcagagccuccagacauacgugacccagcagcugaucagagccgccgagauuagagccucugccaaucuggccgccaccaagaugucugagugugugcugggccagagcaagagaguggacuuuugcggcaagggcuaccaccugaugagcuucccucagucugccccucacggcgugguguuucugcacgugacauaugugcccgcucaagagaagaauuucaccaccgcuccagccaucugccacgacggcaaagcccacuuuccuagagaaggcguguucguguccaacggcacccauugguucgugacacagcggaacuucuacgagccccagaucaucaccaccgacaacaccuucgugucuggcaacugcgacgucgugaucggcauugugaacaauaccguguacgacccucugcagcccgagcuggacagcuucaaagaggaacuggacaaguacuuuaagaaccacacaagccccgacguggaccugggcgauaucagcggaaucaaugccagcgucgugaacauccagaaagagaucgaccggcugaacgagguggccaagaaucugaacgagagccugaucgaccugcaagaacuggggaaguacgagcaguacaucaaguggcccugguacaucuggcugggcuuuaucgccggacugauugccaucgugauggucacaaucaugcuguguugcaugaccagcugcuguagcugccugaagggcuguuguagcuguggcagcugcugcaaguucgacgaggacgauucugagcccgugcugaagggcgugaaacugcacuacacaugaggacuaguuauaagacugacuagcccgaugggccucccaacgggcccuccuccccuccuugcaccgagauuaauaaaaaaaaaaaaaaaaaaaaaaaaaaaaaaaaaaaaaaaaaaaaaaaaaaaaaaaaaaaaaaaaaaaaaaaaaaaaaaaaaaaaaaaaaaaaaaaaaaaa

SEQ ID NO: 25481 - RNA, 4011 nt, Artificial Sequence
  SARS-CoV-2/Wuhan/WIV05/2019__EPI_ISL_402128 spike protein mRNA gc mod (1-1273)(A222V_D614G)
aggagaaagcuuaccauguucguguuccuggugcugcugccucugguguccagccagugugugaaccugaccaccagaacacagcugccuccagccuacaccaacagcuuuaccagaggcguguacuaccccgacaagguguucagauccagcgugcugcacucuacccaggaccuguuccugccuuucuucagcaacgugaccugguuccacgccauccacguguccggcaccaauggcaccaagagauucgacaaccccgugcugcccuucaacgacgggguguacuuugccagcaccgagaaguccaacaucaucagaggcuggaucuucggcaccacacuggacagcaagacccagagccugcugaucgugaacaacgccaccaacguggucaucaaagugugcgaguuccaguucugcaacgaccccuuccugggcgucuacuaccacaagaacaacaagagcuggauggaaagcgaguuccggguguacagcagcgccaacaacugcaccuucgaguacgugucccagccuuuccugauggaccuggaaggcaagcagggcaacuucaagaaccugcgcgaguucguguuuaagaacaucgacggcuacuucaagaucuacagcaagcacaccccuaucaaccucgugcgggaucugccucagggcuucucugugcuggaaccccugguggaucugcccaucggcaucaacaucacccgguuucagacacugcuggcccugcacagaagcuaccugacaccuggcgauagcagcagcggauggacagcuggugccgccgcuuacuaugugggcuaccugcagccuagaaccuuccugcugaaguacaacgagaacggcaccaucaccgacgccguggauugugcucuggauccucugagcgagacaaagugcacccugaaguccuucaccguggaaaagggcaucuaccagaccagcaacuuccgggugcagcccaccgaauccaucgugcgguuccccaauaucaccaaucugugccccuucggcgagguguucaaugccaccagauucgccucuguguacgccuggaaccggaagcggaucagcaauugcguggccgacuacuccgugcuguacaacuccgccagcuucagcaccuucaagugcuacggcguguccccuaccaagcugaacgaccugugcuucacaaacguguacgccgacagcuucgugauccggggagaugaagugcggcagauugccccuggacagacaggcaagaucgccgacuacaacuacaagcugcccgacgacuucaccggcugugugauugccuggaacagcaacaaccuggacuccaaagucggcggcaacuacaauuaccuguaccggcuguuccggaaguccaaucugaagcccuucgagcgggacaucuccaccgagaucuaucaggccggcagcaccccuuguaacggcguggaaggcuucaacugcuacuucccacugcaguccuacggcuuucagcccacaaauggcgugggcuaucagcccuacagagugguggugcugagcuucgaacugcugcaugccccugccacagugugcggcccuaagaaaagcaccaaucucgugaagaacaaaugcgugaacuucaacuucaacggccugaccggcaccggcgugcugacagagagcaacaagaaguuccugccauuccagcaguuuggccgggauaucgccgauaccacagacgccguuagagauccccagacacuggaaauccuggacaucaccccuugcagcuucggcggagugucugugaucaccccuggcaccaacaccagcaaucagguggcagugcuguaccagggcgugaacuguaccgaagugcccguggccauucacgccgaucagcugacaccuacauggcggguguacuccaccggcagcaauguguuucagaccagagccggcugucugaucggagccgagcacgugaacaauagcuacgagugcgacauccccaucggcgcuggaaucugcgccagcuaccagacacagacaaacagcccucggagagccagaagcguggccagccagagcaucauugccuacacaaugucucugggcgccgagaacagcguggccuacuccaacaacucuaucgcuauccccaccaacuucaccaucagcgugaccacagagauccugccuguguccaugaccaagaccagcguggacugcaccauguacaucugcggcgauuccaccgagugcuccaaccugcugcugcaguacggcagcuucugcacccagcugaauagagcccugacagggaucgccguggaacaggacaagaacacccaagagguguucgcccaagugaagcagaucuacaagaccccuccuaucaaggacuucggcggcuucaauuucagccagauucugcccgauccuagcaagcccagcaagcggagcuucaucgaggaccugcuguucaacaaagugacacuggccgacgccggcuucaucaagcaguauggcgauugucugggcgacauugccgccagggaucugauuugcgcccagaaguuuaacggacugacagugcugccuccucugcugaccgaugagaugaucgcccaguacacaucugcccugcuggccggcacaaucacaagcggcuggacauuuggagcaggcgccgcucugcagauccccuuugcuaugcagauggccuaccgguucaacggcaucggagugacccagaaugugcuguacgagaaccagaagcugaucgccaaccaguucaacagcgccaucggcaagauccaggacagccugagcagcacagcaagcgcccugggaaagcugcaggacguggucaaccagaaugcccaggcacugaacacccuggucaagcagcuguccuccaacuucggcgccaucagcucugugcugaacgauauccugagcagacuggacaaggucgaggccgaggugcagaucgacagacugaucacaggcagacugcagagccuccagacauacgugacccagcagcugaucagagccgccgagauuagagccucugccaaucuggccgccaccaagaugucugagugugugcugggccagagcaagagaguggacuuuugcggcaagggcuaccaccugaugagcuucccucagucugccccucacggcgugguguuucugcacgugacauaugugcccgcucaagagaagaauuucaccaccgcuccagccaucugccacgacggcaaagcccacuuuccuagagaaggcguguucguguccaacggcacccauugguucgugacacagcggaacuucuacgagccccagaucaucaccaccgacaacaccuucgugucuggcaacugcgacgucgugaucggcauugugaacaauaccguguacgacccucugcagcccgagcuggacagcuucaaagaggaacuggacaaguacuuuaagaaccacacaagccccgacguggaccugggcgauaucagcggaaucaaugccagcgucgugaacauccagaaagagaucgaccggcugaacgagguggccaagaaucugaacgagagccugaucgaccugcaagaacuggggaaguacgagcaguacaucaaguggcccugguacaucuggcugggcuuuaucgccggacugauugccaucgugauggucacaaucaugcuguguugcaugaccagcugcuguagcugccugaagggcuguuguagcuguggcagcugcugcaaguucgacgaggacgauucugagcccgugcugaagggcgugaaacugcacuacacaugaggacuaguuauaagacugacuagcccgaugggccucccaacgggcccuccuccccuccuugcaccgagauuaauaaaaaaaaaaaaaaaaaaaaaaaaaaaaaaaaaaaaaaaaaaaaaaaaaaaaaaaaaaaaaaaaaaaaaaaaaaaaaaaaaaaaaaaaaaaaaaaaaaaa

SEQ ID NO: 25482 - RNA, 4011 nt, Artificial Sequence
  SARS-CoV-2/Wuhan/WIV05/2019__EPI_ISL_402128 spike protein mRNA gc mod (1-1273)(N439K_D614G)
aggagaaagcuuaccauguucguguuccuggugcugcugccucugguguccagccagugugugaaccugaccaccagaacacagcugccuccagccuacaccaacagcuuuaccagaggcguguacuaccccgacaagguguucagauccagcgugcugcacucuacccaggaccuguuccugccuuucuucagcaacgugaccugguuccacgccauccacguguccggcaccaauggcaccaagagauucgacaaccccgugcugcccuucaacgacgggguguacuuugccagcaccgagaaguccaacaucaucagaggcuggaucuucggcaccacacuggacagcaagacccagagccugcugaucgugaacaacgccaccaacguggucaucaaagugugcgaguuccaguucugcaacgaccccuuccugggcgucuacuaccacaagaacaacaagagcuggauggaaagcgaguuccggguguacagcagcgccaacaacugcaccuucgaguacgugucccagccuuuccugauggaccuggaaggcaagcagggcaacuucaagaaccugcgcgaguucguguuuaagaacaucgacggcuacuucaagaucuacagcaagcacaccccuaucaaccucgugcgggaucugccucagggcuucucugcucuggaaccccugguggaucugcccaucggcaucaacaucacccgguuucagacacugcuggcccugcacagaagcuaccugacaccuggcgauagcagcagcggauggacagcuggugccgccgcuuacuaugugggcuaccugcagccuagaaccuuccugcugaaguacaacgagaacggcaccaucaccgacgccguggauugugcucuggauccucugagcgagacaaagugcacccugaaguccuucaccguggaaaagggcaucuaccagaccagcaacuuccgggugcagcccaccgaauccaucgugcgguuccccaauaucaccaaucugugccccuucggcgagguguucaaugccaccagauucgccucuguguacgccuggaaccggaagcggaucagcaauugcguggccgacuacuccgugcuguacaacuccgccagcuucagcaccuucaagugcuacggcguguccccuaccaagcugaacgaccugugcuucacaaacguguacgccgacagcuucgugauccggggagaugaagugcggcagauugccccuggacagacaggcaagaucgccgacuacaacuacaagcugcccgacgacuucaccggcugugugauugccuggaacagcaagaaccuggacuccaaagucggcggcaacuacaauuaccuguaccggcuguuccggaaguccaaucugaagcccuucgagcgggacaucuccaccgagaucuaucaggccggcagcaccccuuguaacggcguggaaggcuucaacugcuacuucccacugcaguccuacggcuuucagcccacaaauggcgugggcuaucagcccuacagagugguggugcugagcuucgaacugcugcaugccccugccacagugugcggcccuaagaaaagcaccaaucucgugaagaacaaaugcgugaacuucaacuucaacggccugaccggcaccggcgugcugacagagagcaacaagaaguuccugccauuccagcaguuuggccgggauaucgccgauaccacagacgccguuagagauccccagacacuggaaauccuggacaucaccccuugcagcuucggcggagugucugugaucaccccuggcaccaacaccagcaaucagguggcagugcuguaccagggcgugaacuguaccgaagugcccguggccauucacgccgaucagcugacaccuacauggcggguguacuccaccggcagcaauguguuucagaccagagccggcugucugaucggagccgagcacgugaacaauagcuacgagugcgacauccccaucggcgcuggaaucugcgccagcuaccagacacagacaaacagcccucggagagccagaagcguggccagccagagcaucauugccuacacaaugucucugggcgccgagaacagcguggccuacuccaacaacucuaucgcuauccccaccaacuucaccaucagcgugaccacagagauccugccuguguccaugaccaagaccagcguggacugcaccauguacaucugcggcgauuccaccgagugcuccaaccugcugcugcaguacggcagcuucugcacccagcugaauagagcccugacagggaucgccguggaacaggacaagaacacccaagagguguucgcccaagugaagcagaucuacaagaccccuccuaucaaggacuucggcggcuucaauuucagccagauucugcccgauccuagcaagcccagcaagcggagcuucaucgaggaccugcuguucaacaaagugacacuggccgacgccggcuucaucaagcaguauggcgauugucugggcgacauugccgccagggaucugauuugcgcccagaaguuuaacggacugacagugcugccuccucugcugaccgaugagaugaucgcccaguacacaucugcccugcuggccggcacaaucacaagcggcuggacauuuggagcaggcgccgcucugcagauccccuuugcuaugcagauggccuaccgguucaacggcaucggagugacccagaaugugcuguacgagaaccagaagcugaucgccaaccaguucaacagcgccaucggcaagauccaggacagccugagcagcacagcaagcgcccugggaaagcugcaggacguggucaaccagaaugcccaggcacugaacacccuggucaagcagcuguccuccaacuucggcgccaucagcucugugcugaacgauauccugagcagacuggacaaggucgaggccgaggugcagaucgacagacugaucacaggcagacugcagagccuccagacauacgugacccagcagcugaucagagccgccgagauuagagccucugccaaucuggccgccaccaagaugucugagugugugcugggccagagcaagagaguggacuuuugcggcaagggcuaccaccugaugagcuucccucagucugccccucacggcgugguguuucugcacgugacauaugugcccgcucaagagaagaauuucaccaccgcuccagccaucugccacgacggcaaagcccacuuuccuagagaaggcguguucguguccaacggcacccauugguucgugacacagcggaacuucuacgagccccagaucaucaccaccgacaacaccuucgugucuggcaacugcgacgucgugaucggcauugugaacaauaccguguacgacccucugcagcccgagcuggacagcuucaaagaggaacuggacaaguacuuuaagaaccacacaagccccgacguggaccugggcgauaucagcggaaucaaugccagcgucgugaacauccagaaagagaucgaccggcugaacgagguggccaagaaucugaacgagagccugaucgaccugcaagaacuggggaaguacgagcaguacaucaaguggcccugguacaucuggcugggcuuuaucgccggacugauugccaucgugauggucacaaucaugcuguguugcaugaccagcugcuguagcugccugaagggcuguuguagcuguggcagcugcugcaaguucgacgaggacgauucugagcccgugcugaagggcgugaaacugcacuacacaugaggacuaguuauaagacugacuagcccgaugggccucccaacgggcccuccuccccuccuugcaccgagauuaauaaaaaaaaaaaaaaaaaaaaaaaaaaaaaaaaaaaaaaaaaaaaaaaaaaaaaaaaaaaaaaaaaaaaaaaaaaaaaaaaaaaaaaaaaaaaaaaaaaaa

SEQ ID NO: 25483 - RNA, 4011 nt, Artificial Sequence
  SARS-CoV-2/Wuhan/WIV05/2019__EPI_ISL_402128 spike protein mRNA gc mod (1-1273)(S477N_D614G)
aggagaaagcuuaccauguucguguuccuggugcugcugccucugguguccagccagugugugaaccugaccaccagaacacagcugccuccagccuacaccaacagcuuuaccagaggcguguacuaccccgacaagguguucagauccagcgugcugcacucuacccaggaccuguuccugccuuucuucagcaacgugaccugguuccacgccauccacguguccggcaccaauggcaccaagagauucgacaaccccgugcugcccuucaacgacgggguguacuuugccagcaccgagaaguccaacaucaucagaggcuggaucuucggcaccacacuggacagcaagacccagagccugcugaucgugaacaacgccaccaacguggucaucaaagugugcgaguuccaguucugcaacgaccccuuccugggcgucuacuaccacaagaacaacaagagcuggauggaaagcgaguuccggguguacagcagcgccaacaacugcaccuucgaguacgugucccagccuuuccugauggaccuggaaggcaagcagggcaacuucaagaaccugcgcgaguucguguuuaagaacaucgacggcuacuucaagaucuacagcaagcacaccccuaucaaccucgugcgggaucugccucagggcuucucugcucuggaaccccugguggaucugcccaucggcaucaacaucacccgguuucagacacugcuggcccugcacagaagcuaccugacaccuggcgauagcagcagcggauggacagcuggugccgccgcuuacuaugugggcuaccugcagccuagaaccuuccugcugaaguacaacgagaacggcaccaucaccgacgccguggauugugcucuggauccucugagcgagacaaagugcacccugaaguccuucaccguggaaaagggcaucuaccagaccagcaacuuccgggugcagcccaccgaauccaucgugcgguuccccaauaucaccaaucugugccccuucggcgagguguucaaugccaccagauucgccucuguguacgccuggaaccggaagcggaucagcaauugcguggccgacuacuccgugcuguacaacuccgccagcuucagcaccuucaagugcuacggcguguccccuaccaagcugaacgaccugugcuucacaaacguguacgccgacagcuucgugauccggggagaugaagugcggcagauugccccuggacagacaggcaagaucgccgacuacaacuacaagcugcccgacgacuucaccggcugugugauugccuggaacagcaacaaccuggacuccaaagucggcggcaacuacaauuaccuguaccggcuguuccggaaguccaaucugaagcccuucgagcgggacaucuccaccgagaucuaucaggccggcaacaccccuuguaacggcguggaaggcuucaacugcuacuucccacugcaguccuacggcuuucagcccacaaauggcgugggcuaucagcccuacagagugguggugcugagcuucgaacugcugcaugccccugccacagugugcggcccuaagaaaagcaccaaucucgugaagaacaaaugcgugaacuucaacuucaacggccugaccggcaccggcgugcugacagagagcaacaagaaguuccugccauuccagcaguuuggccgggauaucgccgauaccacagacgccguuagagauccccagacacuggaaauccuggacaucaccccuugcagcuucggcggagugucugugaucaccccuggcaccaacaccagcaaucagguggcagugcuguaccagggcgugaacuguaccgaagugcccguggccauucacgccgaucagcugacaccuacauggcggguguacuccaccggcagcaauguguuucagaccagagccggcugucugaucggagccgagcacgugaacaauagcuacgagugcgacauccccaucggcgcuggaaucugcgccagcuaccagacacagacaaacagcccucggagagccagaagcguggccagccagagcaucauugccuacacaaugucucugggcgccgagaacagcguggccuacuccaacaacucuaucgcuauccccaccaacuucaccaucagcgugaccacagagauccugccuguguccaugaccaagaccagcguggacugcaccauguacaucugcggcgauuccaccgagugcuccaaccugcugcugcaguacggcagcuucugcacccagcugaauagagcccugacagggaucgccguggaacaggacaagaacacccaagagguguucgcccaagugaagcagaucuacaagaccccuccuaucaaggacuucggcggcuucaauuucagccagauucugcccgauccuagcaagcccagcaagcggagcuucaucgaggaccugcuguucaacaaagugacacuggccgacgccggcuucaucaagcaguauggcgauugucugggcgacauugccgccagggaucugauuugcgcccagaaguuuaacggacugacagugcugccuccucugcugaccgaugagaugaucgcccaguacacaucugcccugcuggccggcacaaucacaagcggcuggacauuuggagcaggcgccgcucugcagauccccuuugcuaugcagauggccuaccgguucaacggcaucggagugacccagaaugugcuguacgagaaccagaagcugaucgccaaccaguucaacagcgccaucggcaagauccaggacagccugagcagcacagcaagcgcccugggaaagcugcaggacguggucaaccagaaugcccaggcacugaacacccuggucaagcagcuguccuccaacuucggcgccaucagcucugugcugaacgauauccugagcagacuggacaaggucgaggccgaggugcagaucgacagacugaucacaggcagacugcagagccuccagacauacgugacccagcagcugaucagagccgccgagauuagagccucugccaaucuggccgccaccaagaugucugagugugugcugggccagagcaagagaguggacuuuugcggcaagggcuaccaccugaugagcuucccucagucugccccucacggcgugguguuucugcacgugacauaugugcccgcucaagagaagaauuucaccaccgcuccagccaucugccacgacggcaaagcccacuuuccuagagaaggcguguucguguccaacggcacccauugguucgugacacagcggaacuucuacgagccccagaucaucaccaccgacaacaccuucgugucuggcaacugcgacgucgugaucggcauugugaacaauaccguguacgacccucugcagcccgagcuggacagcuucaaagaggaacuggacaaguacuuuaagaaccacacaagccccgacguggaccugggcgauaucagcggaaucaaugccagcgucgugaacauccagaaagagaucgaccggcugaacgagguggccaagaaucugaacgagagccugaucgaccugcaagaacuggggaaguacgagcaguacaucaaguggcccugguacaucuggcugggcuuuaucgccggacugauugccaucgugauggucacaaucaugcuguguugcaugaccagcugcuguagcugccugaagggcuguuguagcuguggcagcugcugcaaguucgacgaggacgauucugagcccgugcugaagggcgugaaacugcacuacacaugaggacuaguuauaagacugacuagcccgaugggccucccaacgggcccuccuccccuccuugcaccgagauuaauaaaaaaaaaaaaaaaaaaaaaaaaaaaaaaaaaaaaaaaaaaaaaaaaaaaaaaaaaaaaaaaaaaaaaaaaaaaaaaaaaaaaaaaaaaaaaaaaaaaa

SEQ ID NO: 25484 - RNA, 4011 nt, Artificial Sequence
  SARS-CoV-2/Wuhan/WIV05/2019__EPI_ISL_402128 spike protein mRNA gc mod (1-1273)(N501Y_D614G)
aggagaaagcuuaccauguucguguuccuggugcugcugccucugguguccagccagugugugaaccugaccaccagaacacagcugccuccagccuacaccaacagcuuuaccagaggcguguacuaccccgacaagguguucagauccagcgugcugcacucuacccaggaccuguuccugccuuucuucagcaacgugaccugguuccacgccauccacguguccggcaccaauggcaccaagagauucgacaaccccgugcugcccuucaacgacgggguguacuuugccagcaccgagaaguccaacaucaucagaggcuggaucuucggcaccacacuggacagcaagacccagagccugcugaucgugaacaacgccaccaacguggucaucaaagugugcgaguuccaguucugcaacgaccccuuccugggcgucuacuaccacaagaacaacaagagcuggauggaaagcgaguuccggguguacagcagcgccaacaacugcaccuucgaguacgugucccagccuuuccugauggaccuggaaggcaagcagggcaacuucaagaaccugcgcgaguucguguuuaagaacaucgacggcuacuucaagaucuacagcaagcacaccccuaucaaccucgugcgggaucugccucagggcuucucugcucuggaaccccugguggaucugcccaucggcaucaacaucacccgguuucagacacugcuggcccugcacagaagcuaccugacaccuggcgauagcagcagcggauggacagcuggugccgccgcuuacuaugugggcuaccugcagccuagaaccuuccugcugaaguacaacgagaacggcaccaucaccgacgccguggauugugcucuggauccucugagcgagacaaagugcacccugaaguccuucaccguggaaaagggcaucuaccagaccagcaacuuccgggugcagcccaccgaauccaucgugcgguuccccaauaucaccaaucugugccccuucggcgagguguucaaugccaccagauucgccucuguguacgccuggaaccggaagcggaucagcaauugcguggccgacuacuccgugcuguacaacuccgccagcuucagcaccuucaagugcuacggcguguccccuaccaagcugaacgaccugugcuucacaaacguguacgccgacagcuucgugauccggggagaugaagugcggcagauugccccuggacagacaggcaagaucgccgacuacaacuacaagcugcccgacgacuucaccggcugugugauugccuggaacagcaacaaccuggacuccaaagucggcggcaacuacaauuaccuguaccggcuguuccggaaguccaaucugaagcccuucgagcgggacaucuccaccgagaucuaucaggccggcagcaccccuuguaacggcguggaaggcuucaacugcuacuucccacugcaguccuacggcuuucagcccacauacggcgugggcuaucagcccuacagagugguggugcugagcuucgaacugcugcaugccccugccacagugugcggcccuaagaaaagcaccaaucucgugaagaacaaaugcgugaacuucaacuucaacggccugaccggcaccggcgugcugacagagagcaacaagaaguuccugccauuccagcaguuuggccgggauaucgccgauaccacagacgccguuagagauccccagacacuggaaauccuggacaucaccccuugcagcuucggcggagugucugugaucaccccuggcaccaacaccagcaaucagguggcagugcuguaccagggcgugaacuguaccgaagugcccguggccauucacgccgaucagcugacaccuacauggcggguguacuccaccggcagcaauguguuucagaccagagccggcugucugaucggagccgagcacgugaacaauagcuacgagugcgacauccccaucggcgcuggaaucugcgccagcuaccagacacagacaaacagcccucggagagccagaagcguggccagccagagcaucauugccuacacaaugucucugggcgccgagaacagcguggccuacuccaacaacucuaucgcuauccccaccaacuucaccaucagcgugaccacagagauccugccuguguccaugaccaagaccagcguggacugcaccauguacaucugcggcgauuccaccgagugcuccaaccugcugcugcaguacggcagcuucugcacccagcugaauagagcccugacagggaucgccguggaacaggacaagaacacccaagagguguucgcccaagugaagcagaucuacaagaccccuccuaucaaggacuucggcggcuucaauuucagccagauucugcccgauccuagcaagcccagcaagcggagcuucaucgaggaccugcuguucaacaaagugacacuggccgacgccggcuucaucaagcaguauggcgauugucugggcgacauugccgccagggaucugauuugcgcccagaaguuuaacggacugacagugcugccuccucugcugaccgaugagaugaucgcccaguacacaucugcccugcuggccggcacaaucacaagcggcuggacauuuggagcaggcgccgcucugcagauccccuuugcuaugcagauggccuaccgguucaacggcaucggagugacccagaaugugcuguacgagaaccagaagcugaucgccaaccaguucaacagcgccaucggcaagauccaggacagccugagcagcacagcaagcgcccugggaaagcugcaggacguggucaaccagaaugcccaggcacugaacacccuggucaagcagcuguccuccaacuucggcgccaucagcucugugcugaacgauauccugagcagacuggacaaggucgaggccgaggugcagaucgacagacugaucacaggcagacugcagagccuccagacauacgugacccagcagcugaucagagccgccgagauuagagccucugccaaucuggccgccaccaagaugucugagugugugcugggccagagcaagagaguggacuuuugcggcaagggcuaccaccugaugagcuucccucagucugccccucacggcgugguguuucugcacgugacauaugugcccgcucaagagaagaauuucaccaccgcuccagccaucugccacgacggcaaagcccacuuuccuagagaaggcguguucguguccaacggcacccauugguucgugacacagcggaacuucuacgagccccagaucaucaccaccgacaacaccuucgugucuggcaacugcgacgucgugaucggcauugugaacaauaccguguacgacccucugcagcccgagcuggacagcuucaaagaggaacuggacaaguacuuuaagaaccacacaagccccgacguggaccugggcgauaucagcggaaucaaugccagcgucgugaacauccagaaagagaucgaccggcugaacgagguggccaagaaucugaacgagagccugaucgaccugcaagaacuggggaaguacgagcaguacaucaaguggcccugguacaucuggcugggcuuuaucgccggacugauugccaucgugauggucacaaucaugcuguguugcaugaccagcugcuguagcugccugaagggcuguuguagcuguggcagcugcugcaaguucgacgaggacgauucugagcccgugcugaagggcgugaaacugcacuacacaugaggacuaguuauaagacugacuagcccgaugggccucccaacgggcccuccuccccuccuugcaccgagauuaauaaaaaaaaaaaaaaaaaaaaaaaaaaaaaaaaaaaaaaaaaaaaaaaaaaaaaaaaaaaaaaaaaaaaaaaaaaaaaaaaaaaaaaaaaaaaaaaaaaaa

SEQ ID NO: 25485 - RNA, 4005 nt, Artificial Sequence
  SARS-CoV-2/Wuhan/WIV05/2019__EPI_ISL_402128 spike protein mRNA gc mod (1-1273)(H69del_V70del_D614G)
aggagaaagcuuaccauguucguguuccuggugcugcugccucugguguccagccagugugugaaccugaccaccagaacacagcugccuccagccuacaccaacagcuuuaccagaggcguguacuaccccgacaagguguucagauccagcgugcugcacucuacccaggaccuguuccugccuuucuucagcaacgugaccugguuccacgccaucuccggcaccaauggcaccaagagauucgacaaccccgugcugcccuucaacgacgggguguacuuugccagcaccgagaaguccaacaucaucagaggcuggaucuucggcaccacacuggacagcaagacccagagccugcugaucgugaacaacgccaccaacguggucaucaaagugugcgaguuccaguucugcaacgaccccuuccugggcgucuacuaccacaagaacaacaagagcuggauggaaagcgaguuccggguguacagcagcgccaacaacugcaccuucgaguacgugucccagccuuuccugauggaccuggaaggcaagcagggcaacuucaagaaccugcgcgaguucguguuuaagaacaucgacggcuacuucaagaucuacagcaagcacaccccuaucaaccucgugcgggaucugccucagggcuucucugcucuggaaccccugguggaucugcccaucggcaucaacaucacccgguuucagacacugcuggcccugcacagaagcuaccugacaccuggcgauagcagcagcggauggacagcuggugccgccgcuuacuaugugggcuaccugcagccuagaaccuuccugcugaaguacaacgagaacggcaccaucaccgacgccguggauugugcucuggauccucugagcgagacaaagugcacccugaaguccuucaccguggaaaagggcaucuaccagaccagcaacuuccgggugcagcccaccgaauccaucgugcgguuccccaauaucaccaaucugugccccuucggcgagguguucaaugccaccagauucgccucuguguacgccuggaaccggaagcggaucagcaauugcguggccgacuacuccgugcuguacaacuccgccagcuucagcaccuucaagugcuacggcguguccccuaccaagcugaacgaccugugcuucacaaacguguacgccgacagcuucgugauccggggagaugaagugcggcagauugccccuggacagacaggcaagaucgccgacuacaacuacaagcugcccgacgacuucaccggcugugugauugccuggaacagcaacaaccuggacuccaaagucggcggcaacuacaauuaccuguaccggcuguuccggaaguccaaucugaagcccuucgagcgggacaucuccaccgagaucuaucaggccggcagcaccccuuguaacggcguggaaggcuucaacugcuacuucccacugcaguccuacggcuuucagcccacaaauggcgugggcuaucagcccuacagagugguggugcugagcuucgaacugcugcaugccccugccacagugugcggcccuaagaaaagcaccaaucucgugaagaacaaaugcgugaacuucaacuucaacggccugaccggcaccggcgugcugacagagagcaacaagaaguuccugccauuccagcaguuuggccgggauaucgccgauaccacagacgccguuagagauccccagacacuggaaauccuggacaucaccccuugcagcuucggcggagugucugugaucaccccuggcaccaacaccagcaaucagguggcagugcuguaccagggcgugaacuguaccgaagugcccguggccauucacgccgaucagcugacaccuacauggcggguguacuccaccggcagcaauguguuucagaccagagccggcugucugaucggagccgagcacgugaacaauagcuacgagugcgacauccccaucggcgcuggaaucugcgccagcuaccagacacagacaaacagcccucggagagccagaagcguggccagccagagcaucauugccuacacaaugucucugggcgccgagaacagcguggccuacuccaacaacucuaucgcuauccccaccaacuucaccaucagcgugaccacagagauccugccuguguccaugaccaagaccagcguggacugcaccauguacaucugcggcgauuccaccgagugcuccaaccugcugcugcaguacggcagcuucugcacccagcugaauagagcccugacagggaucgccguggaacaggacaagaacacccaagagguguucgcccaagugaagcagaucuacaagaccccuccuaucaaggacuucggcggcuucaauuucagccagauucugcccgauccuagcaagcccagcaagcggagcuucaucgaggaccugcuguucaacaaagugacacuggccgacgccggcuucaucaagcaguauggcgauugucugggcgacauugccgccagggaucugauuugcgcccagaaguuuaacggacugacagugcugccuccucugcugaccgaugagaugaucgcccaguacacaucugcccugcuggccggcacaaucacaagcggcuggacauuuggagcaggcgccgcucugcagauccccuuugcuaugcagauggccuaccgguucaacggcaucggagugacccagaaugugcuguacgagaaccagaagcugaucgccaaccaguucaacagcgccaucggcaagauccaggacagccugagcagcacagcaagcgcccugggaaagcugcaggacguggucaaccagaaugcccaggcacugaacacccuggucaagcagcuguccuccaacuucggcgccaucagcucugugcugaacgauauccugagcagacuggacaaggucgaggccgaggugcagaucgacagacugaucacaggcagacugcagagccuccagacauacgugacccagcagcugaucagagccgccgagauuagagccucugccaaucuggccgccaccaagaugucugagugugugcugggccagagcaagagaguggacuuuugcggcaagggcuaccaccugaugagcuucccucagucugccccucacggcgugguguuucugcacgugacauaugugcccgcucaagagaagaauuucaccaccgcuccagccaucugccacgacggcaaagcccacuuuccuagagaaggcguguucguguccaacggcacccauugguucgugacacagcggaacuucuacgagccccagaucaucaccaccgacaacaccuucgugucuggcaacugcgacgucgugaucggcauugugaacaauaccguguacgacccucugcagcccgagcuggacagcuucaaagaggaacuggacaaguacuuuaagaaccacacaagccccgacguggaccugggcgauaucagcggaaucaaugccagcgucgugaacauccagaaagagaucgaccggcugaacgagguggccaagaaucugaacgagagccugaucgaccugcaagaacuggggaaguacgagcaguacaucaaguggcccugguacaucuggcugggcuuuaucgccggacugauugccaucgugauggucacaaucaugcuguguugcaugaccagcugcuguagcugccugaagggcuguuguagcuguggcagcugcugcaaguucgacgaggacgauucugagcccgugcugaagggcgugaaacugcacuacacaugaggacuaguuauaagacugacuagcccgaugggccucccaacgggcccuccuccccuccuugcaccgagauuaauaaaaaaaaaaaaaaaaaaaaaaaaaaaaaaaaaaaaaaaaaaaaaaaaaaaaaaaaaaaaaaaaaaaaaaaaaaaaaaaaaaaaaaaaaaaaaaaaaaaa

SEQ ID NO: 25486 - RNA, 4011 nt, Artificial Sequence
  SARS-CoV-2/Wuhan/WIV05/2019__EPI_ISL_402128 spike protein mRNA gc mod (1-1273)(Y453F_D614G)
aggagaaagcuuaccauguucguguuccuggugcugcugccucugguguccagccagugugugaaccugaccaccagaacacagcugccuccagccuacaccaacagcuuuaccagaggcguguacuaccccgacaagguguucagauccagcgugcugcacucuacccaggaccuguuccugccuuucuucagcaacgugaccugguuccacgccauccacguguccggcaccaauggcaccaagagauucgacaaccccgugcugcccuucaacgacgggguguacuuugccagcaccgagaaguccaacaucaucagaggcuggaucuucggcaccacacuggacagcaagacccagagccugcugaucgugaacaacgccaccaacguggucaucaaagugugcgaguuccaguucugcaacgaccccuuccugggcgucuacuaccacaagaacaacaagagcuggauggaaagcgaguuccggguguacagcagcgccaacaacugcaccuucgaguacgugucccagccuuuccugauggaccuggaaggcaagcagggcaacuucaagaaccugcgcgaguucguguuuaagaacaucgacggcuacuucaagaucuacagcaagcacaccccuaucaaccucgugcgggaucugccucagggcuucucugcucuggaaccccugguggaucugcccaucggcaucaacaucacccgguuucagacacugcuggcccugcacagaagcuaccugacaccuggcgauagcagcagcggauggacagcuggugccgccgcuuacuaugugggcuaccugcagccuagaaccuuccugcugaaguacaacgagaacggcaccaucaccgacgccguggauugugcucuggauccucugagcgagacaaagugcacccugaaguccuucaccguggaaaagggcaucuaccagaccagcaacuuccgggugcagcccaccgaauccaucgugcgguuccccaauaucaccaaucugugccccuucggcgagguguucaaugccaccagauucgccucuguguacgccuggaaccggaagcggaucagcaauugcguggccgacuacuccgugcuguacaacuccgccagcuucagcaccuucaagugcuacggcguguccccuaccaagcugaacgaccugugcuucacaaacguguacgccgacagcuucgugauccggggagaugaagugcggcagauugccccuggacagacaggcaagaucgccgacuacaacuacaagcugcccgacgacuucaccggcugugugauugccuggaacagcaacaaccuggacuccaaagucggcggcaacuacaauuaccuguuccggcuguuccggaaguccaaucugaagcccuucgagcgggacaucuccaccgagaucuaucaggccggcagcaccccuuguaacggcguggaaggcuucaacugcuacuucccacugcaguccuacggcuuucagcccacaaauggcgugggcuaucagcccuacagagugguggugcugagcuucgaacugcugcaugccccugccacagugugcggcccuaagaaaagcaccaaucucgugaagaacaaaugcgugaacuucaacuucaacggccugaccggcaccggcgugcugacagagagcaacaagaaguuccugccauuccagcaguuuggccgggauaucgccgauaccacagacgccguuagagauccccagacacuggaaauccuggacaucaccccuugcagcuucggcggagugucugugaucaccccuggcaccaacaccagcaaucagguggcagugcuguaccagggcgugaacuguaccgaagugcccguggccauucacgccgaucagcugacaccuacauggcggguguacuccaccggcagcaauguguuucagaccagagccggcugucugaucggagccgagcacgugaacaauagcuacgagugcgacauccccaucggcgcuggaaucugcgccagcuaccagacacagacaaacagcccucggagagccagaagcguggccagccagagcaucauugccuacacaaugucucugggcgccgagaacagcguggccuacuccaacaacucuaucgcuauccccaccaacuucaccaucagcgugaccacagagauccugccuguguccaugaccaagaccagcguggacugcaccauguacaucugcggcgauuccaccgagugcuccaaccugcugcugcaguacggcagcuucugcacccagcugaauagagcccugacagggaucgccguggaacaggacaagaacacccaagagguguucgcccaagugaagcagaucuacaagaccccuccuaucaaggacuucggcggcuucaauuucagccagauucugcccgauccuagcaagcccagcaagcggagcuucaucgaggaccugcuguucaacaaagugacacuggccgacgccggcuucaucaagcaguauggcgauugucugggcgacauugccgccagggaucugauuugcgcccagaaguuuaacggacugacagugcugccuccucugcugaccgaugagaugaucgcccaguacacaucugcccugcuggccggcacaaucacaagcggcuggacauuuggagcaggcgccgcucugcagauccccuuugcuaugcagauggccuaccgguucaacggcaucggagugacccagaaugugcuguacgagaaccagaagcugaucgccaaccaguucaacagcgccaucggcaagauccaggacagccugagcagcacagcaagcgcccugggaaagcugcaggacguggucaaccagaaugcccaggcacugaacacccuggucaagcagcuguccuccaacuucggcgccaucagcucugugcugaacgauauccugagcagacuggacaaggucgaggccgaggugcagaucgacagacugaucacaggcagacugcagagccuccagacauacgugacccagcagcugaucagagccgccgagauuagagccucugccaaucuggccgccaccaagaugucugagugugugcugggccagagcaagagaguggacuuuugcggcaagggcuaccaccugaugagcuucccucagucugccccucacggcgugguguuucugcacgugacauaugugcccgcucaagagaagaauuucaccaccgcuccagccaucugccacgacggcaaagcccacuuuccuagagaaggcguguucguguccaacggcacccauugguucgugacacagcggaacuucuacgagccccagaucaucaccaccgacaacaccuucgugucuggcaacugcgacgucgugaucggcauugugaacaauaccguguacgacccucugcagcccgagcuggacagcuucaaagaggaacuggacaaguacuuuaagaaccacacaagccccgacguggaccugggcgauaucagcggaaucaaugccagcgucgugaacauccagaaagagaucgaccggcugaacgagguggccaagaaucugaacgagagccugaucgaccugcaagaacuggggaaguacgagcaguacaucaaguggcccugguacaucuggcugggcuuuaucgccggacugauugccaucgugauggucacaaucaugcuguguugcaugaccagcugcuguagcugccugaagggcuguuguagcuguggcagcugcugcaaguucgacgaggacgauucugagcccgugcugaagggcgugaaacugcacuacacaugaggacuaguuauaagacugacuagcccgaugggccucccaacgggcccuccuccccuccuugcaccgagauuaauaaaaaaaaaaaaaaaaaaaaaaaaaaaaaaaaaaaaaaaaaaaaaaaaaaaaaaaaaaaaaaaaaaaaaaaaaaaaaaaaaaaaaaaaaaaaaaaaaaaa

SEQ ID NO: 25487 - RNA, 4011 nt, Artificial Sequence
  SARS-CoV-2/Wuhan/WIV05/2019__EPI_ISL_402128 spike protein mRNA gc mod (1-1273)(D614G_I692V)
aggagaaagcuuaccauguucguguuccuggugcugcugccucugguguccagccagugugugaaccugaccaccagaacacagcugccuccagccuacaccaacagcuuuaccagaggcguguacuaccccgacaagguguucagauccagcgugcugcacucuacccaggaccuguuccugccuuucuucagcaacgugaccugguuccacgccauccacguguccggcaccaauggcaccaagagauucgacaaccccgugcugcccuucaacgacgggguguacuuugccagcaccgagaaguccaacaucaucagaggcuggaucuucggcaccacacuggacagcaagacccagagccugcugaucgugaacaacgccaccaacguggucaucaaagugugcgaguuccaguucugcaacgaccccuuccugggcgucuacuaccacaagaacaacaagagcuggauggaaagcgaguuccggguguacagcagcgccaacaacugcaccuucgaguacgugucccagccuuuccugauggaccuggaaggcaagcagggcaacuucaagaaccugcgcgaguucguguuuaagaacaucgacggcuacuucaagaucuacagcaagcacaccccuaucaaccucgugcgggaucugccucagggcuucucugcucuggaaccccugguggaucugcccaucggcaucaacaucacccgguuucagacacugcuggcccugcacagaagcuaccugacaccuggcgauagcagcagcggauggacagcuggugccgccgcuuacuaugugggcuaccugcagccuagaaccuuccugcugaaguacaacgagaacggcaccaucaccgacgccguggauugugcucuggauccucugagcgagacaaagugcacccugaaguccuucaccguggaaaagggcaucuaccagaccagcaacuuccgggugcagcccaccgaauccaucgugcgguuccccaauaucaccaaucugugccccuucggcgagguguucaaugccaccagauucgccucuguguacgccuggaaccggaagcggaucagcaauugcguggccgacuacuccgugcuguacaacuccgccagcuucagcaccuucaagugcuacggcguguccccuaccaagcugaacgaccugugcuucacaaacguguacgccgacagcuucgugauccggggagaugaagugcggcagauugccccuggacagacaggcaagaucgccgacuacaacuacaagcugcccgacgacuucaccggcugugugauugccuggaacagcaacaaccuggacuccaaagucggcggcaacuacaauuaccuguaccggcuguuccggaaguccaaucugaagcccuucgagcgggacaucuccaccgagaucuaucaggccggcagcaccccuuguaacggcguggaaggcuucaacugcuacuucccacugcaguccuacggcuuucagcccacaaauggcgugggcuaucagcccuacagagugguggugcugagcuucgaacugcugcaugccccugccacagugugcggcccuaagaaaagcaccaaucucgugaagaacaaaugcgugaacuucaacuucaacggccugaccggcaccggcgugcugacagagagcaacaagaaguuccugccauuccagcaguuuggccgggauaucgccgauaccacagacgccguuagagauccccagacacuggaaauccuggacaucaccccuugcagcuucggcggagugucugugaucaccccuggcaccaacaccagcaaucagguggcagugcuguaccagggcgugaacuguaccgaagugcccguggccauucacgccgaucagcugacaccuacauggcggguguacuccaccggcagcaauguguuucagaccagagccggcugucugaucggagccgagcacgugaacaauagcuacgagugcgacauccccaucggcgcuggaaucugcgccagcuaccagacacagacaaacagcccucggagagccagaagcguggccagccagagcgugauugccuacacaaugucucugggcgccgagaacagcguggccuacuccaacaacucuaucgcuauccccaccaacuucaccaucagcgugaccacagagauccugccuguguccaugaccaagaccagcguggacugcaccauguacaucugcggcgauuccaccgagugcuccaaccugcugcugcaguacggcagcuucugcacccagcugaauagagcccugacagggaucgccguggaacaggacaagaacacccaagagguguucgcccaagugaagcagaucuacaagaccccuccuaucaaggacuucggcggcuucaauuucagccagauucugcccgauccuagcaagcccagcaagcggagcuucaucgaggaccugcuguucaacaaagugacacuggccgacgccggcuucaucaagcaguauggcgauugucugggcgacauugccgccagggaucugauuugcgcccagaaguuuaacggacugacagugcugccuccucugcugaccgaugagaugaucgcccaguacacaucugcccugcuggccggcacaaucacaagcggcuggacauuuggagcaggcgccgcucugcagauccccuuugcuaugcagauggccuaccgguucaacggcaucggagugacccagaaugugcuguacgagaaccagaagcugaucgccaaccaguucaacagcgccaucggcaagauccaggacagccugagcagcacagcaagcgcccugggaaagcugcaggacguggucaaccagaaugcccaggcacugaacacccuggucaagcagcuguccuccaacuucggcgccaucagcucugugcugaacgauauccugagcagacuggacaaggucgaggccgaggugcagaucgacagacugaucacaggcagacugcagagccuccagacauacgugacccagcagcugaucagagccgccgagauuagagccucugccaaucuggccgccaccaagaugucugagugugugcugggccagagcaagagaguggacuuuugcggcaagggcuaccaccugaugagcuucccucagucugccccucacggcgugguguuucugcacgugacauaugugcccgcucaagagaagaauuucaccaccgcuccagccaucugccacgacggcaaagcccacuuuccuagagaaggcguguucguguccaacggcacccauugguucgugacacagcggaacuucuacgagccccagaucaucaccaccgacaacaccuucgugucuggcaacugcgacgucgugaucggcauugugaacaauaccguguacgacccucugcagcccgagcuggacagcuucaaagaggaacuggacaaguacuuuaagaaccacacaagccccgacguggaccugggcgauaucagcggaaucaaugccagcgucgugaacauccagaaagagaucgaccggcugaacgagguggccaagaaucugaacgagagccugaucgaccugcaagaacuggggaaguacgagcaguacaucaaguggcccugguacaucuggcugggcuuuaucgccggacugauugccaucgugauggucacaaucaugcuguguugcaugaccagcugcuguagcugccugaagggcuguuguagcuguggcagcugcugcaaguucgacgaggacgauucugagcccgugcugaagggcgugaaacugcacuacacaugaggacuaguuauaagacugacuagcccgaugggccucccaacgggcccuccuccccuccuugcaccgagauuaauaaaaaaaaaaaaaaaaaaaaaaaaaaaaaaaaaaaaaaaaaaaaaaaaaaaaaaaaaaaaaaaaaaaaaaaaaaaaaaaaaaaaaaaaaaaaaaaaaaaa

SEQ ID NO: 25488 - RNA, 4011 nt, Artificial Sequence
  SARS-CoV-2/Wuhan/WIV05/2019__EPI_ISL_402128 spike protein mRNA gc mod (1-1273)(D614G_M1229I)
aggagaaagcuuaccauguucguguuccuggugcugcugccucugguguccagccagugugugaaccugaccaccagaacacagcugccuccagccuacaccaacagcuuuaccagaggcguguacuaccccgacaagguguucagauccagcgugcugcacucuacccaggaccuguuccugccuuucuucagcaacgugaccugguuccacgccauccacguguccggcaccaauggcaccaagagauucgacaaccccgugcugcccuucaacgacgggguguacuuugccagcaccgagaaguccaacaucaucagaggcuggaucuucggcaccacacuggacagcaagacccagagccugcugaucgugaacaacgccaccaacguggucaucaaagugugcgaguuccaguucugcaacgaccccuuccugggcgucuacuaccacaagaacaacaagagcuggauggaaagcgaguuccggguguacagcagcgccaacaacugcaccuucgaguacgugucccagccuuuccugauggaccuggaaggcaagcagggcaacuucaagaaccugcgcgaguucguguuuaagaacaucgacggcuacuucaagaucuacagcaagcacaccccuaucaaccucgugcgggaucugccucagggcuucucugcucuggaaccccugguggaucugcccaucggcaucaacaucacccgguuucagacacugcuggcccugcacagaagcuaccugacaccuggcgauagcagcagcggauggacagcuggugccgccgcuuacuaugugggcuaccugcagccuagaaccuuccugcugaaguacaacgagaacggcaccaucaccgacgccguggauugugcucuggauccucugagcgagacaaagugcacccugaaguccuucaccguggaaaagggcaucuaccagaccagcaacuuccgggugcagcccaccgaauccaucgugcgguuccccaauaucaccaaucugugccccuucggcgagguguucaaugccaccagauucgccucuguguacgccuggaaccggaagcggaucagcaauugcguggccgacuacuccgugcuguacaacuccgccagcuucagcaccuucaagugcuacggcguguccccuaccaagcugaacgaccugugcuucacaaacguguacgccgacagcuucgugauccggggagaugaagugcggcagauugccccuggacagacaggcaagaucgccgacuacaacuacaagcugcccgacgacuucaccggcugugugauugccuggaacagcaacaaccuggacuccaaagucggcggcaacuacaauuaccuguaccggcuguuccggaaguccaaucugaagcccuucgagcgggacaucuccaccgagaucuaucaggccggcagcaccccuuguaacggcguggaaggcuucaacugcuacuucccacugcaguccuacggcuuucagcccacaaauggcgugggcuaucagcccuacagagugguggugcugagcuucgaacugcugcaugccccugccacagugugcggcccuaagaaaagcaccaaucucgugaagaacaaaugcgugaacuucaacuucaacggccugaccggcaccggcgugcugacagagagcaacaagaaguuccugccauuccagcaguuuggccgggauaucgccgauaccacagacgccguuagagauccccagacacuggaaauccuggacaucaccccuugcagcuucggcggagugucugugaucaccccuggcaccaacaccagcaaucagguggcagugcuguaccagggcgugaacuguaccgaagugcccguggccauucacgccgaucagcugacaccuacauggcggguguacuccaccggcagcaauguguuucagaccagagccggcugucugaucggagccgagcacgugaacaauagcuacgagugcgacauccccaucggcgcuggaaucugcgccagcuaccagacacagacaaacagcccucggagagccagaagcguggccagccagagcaucauugccuacacaaugucucugggcgccgagaacagcguggccuacuccaacaacucuaucgcuauccccaccaacuucaccaucagcgugaccacagagauccugccuguguccaugaccaagaccagcguggacugcaccauguacaucugcggcgauuccaccgagugcuccaaccugcugcugcaguacggcagcuucugcacccagcugaauagagcccugacagggaucgccguggaacaggacaagaacacccaagagguguucgcccaagugaagcagaucuacaagaccccuccuaucaaggacuucggcggcuucaauuucagccagauucugcccgauccuagcaagcccagcaagcggagcuucaucgaggaccugcuguucaacaaagugacacuggccgacgccggcuucaucaagcaguauggcgauugucugggcgacauugccgccagggaucugauuugcgcccagaaguuuaacggacugacagugcugccuccucugcugaccgaugagaugaucgcccaguacacaucugcccugcuggccggcacaaucacaagcggcuggacauuuggagcaggcgccgcucugcagauccccuuugcuaugcagauggccuaccgguucaacggcaucggagugacccagaaugugcuguacgagaaccagaagcugaucgccaaccaguucaacagcgccaucggcaagauccaggacagccugagcagcacagcaagcgcccugggaaagcugcaggacguggucaaccagaaugcccaggcacugaacacccuggucaagcagcuguccuccaacuucggcgccaucagcucugugcugaacgauauccugagcagacuggacaaggucgaggccgaggugcagaucgacagacugaucacaggcagacugcagagccuccagacauacgugacccagcagcugaucagagccgccgagauuagagccucugccaaucuggccgccaccaagaugucugagugugugcugggccagagcaagagaguggacuuuugcggcaagggcuaccaccugaugagcuucccucagucugccccucacggcgugguguuucugcacgugacauaugugcccgcucaagagaagaauuucaccaccgcuccagccaucugccacgacggcaaagcccacuuuccuagagaaggcguguucguguccaacggcacccauugguucgugacacagcggaacuucuacgagccccagaucaucaccaccgacaacaccuucgugucuggcaacugcgacgucgugaucggcauugugaacaauaccguguacgacccucugcagcccgagcuggacagcuucaaagaggaacuggacaaguacuuuaagaaccacacaagccccgacguggaccugggcgauaucagcggaaucaaugccagcgucgugaacauccagaaagagaucgaccggcugaacgagguggccaagaaucugaacgagagccugaucgaccugcaagaacuggggaaguacgagcaguacaucaaguggcccugguacaucuggcugggcuuuaucgccggacugauugccaucgugaucgucacaaucaugcuguguugcaugaccagcugcuguagcugccugaagggcuguuguagcuguggcagcugcugcaaguucgacgaggacgauucugagcccgugcugaagggcgugaaacugcacuacacaugaggacuaguuauaagacugacuagcccgaugggccucccaacgggcccuccuccccuccuugcaccgagauuaauaaaaaaaaaaaaaaaaaaaaaaaaaaaaaaaaaaaaaaaaaaaaaaaaaaaaaaaaaaaaaaaaaaaaaaaaaaaaaaaaaaaaaaaaaaaaaaaaaaaa

SEQ ID NO: 25489 - RNA, 4005 nt, Artificial Sequence
  SARS-CoV-2/Wuhan/WIV05/2019__EPI_ISL_402128 spike protein mRNA gc mod (1-1273)(H69del_V70del_A222V_Y453F_S477N_D614G_I692V)
aggagaaagcuuaccauguucguguuccuggugcugcugccucugguguccagccagugugugaaccugaccaccagaacacagcugccuccagccuacaccaacagcuuuaccagaggcguguacuaccccgacaagguguucagauccagcgugcugcacucuacccaggaccuguuccugccuuucuucagcaacgugaccugguuccacgccaucuccggcaccaauggcaccaagagauucgacaaccccgugcugcccuucaacgacgggguguacuuugccagcaccgagaaguccaacaucaucagaggcuggaucuucggcaccacacuggacagcaagacccagagccugcugaucgugaacaacgccaccaacguggucaucaaagugugcgaguuccaguucugcaacgaccccuuccugggcgucuacuaccacaagaacaacaagagcuggauggaaagcgaguuccggguguacagcagcgccaacaacugcaccuucgaguacgugucccagccuuuccugauggaccuggaaggcaagcagggcaacuucaagaaccugcgcgaguucguguuuaagaacaucgacggcuacuucaagaucuacagcaagcacaccccuaucaaccucgugcgggaucugccucagggcuucucugugcuggaaccccugguggaucugcccaucggcaucaacaucacccgguuucagacacugcuggcccugcacagaagcuaccugacaccuggcgauagcagcagcggauggacagcuggugccgccgcuuacuaugugggcuaccugcagccuagaaccuuccugcugaaguacaacgagaacggcaccaucaccgacgccguggauugugcucuggauccucugagcgagacaaagugcacccugaaguccuucaccguggaaaagggcaucuaccagaccagcaacuuccgggugcagcccaccgaauccaucgugcgguuccccaauaucaccaaucugugccccuucggcgagguguucaaugccaccagauucgccucuguguacgccuggaaccggaagcggaucagcaauugcguggccgacuacuccgugcuguacaacuccgccagcuucagcaccuucaagugcuacggcguguccccuaccaagcugaacgaccugugcuucacaaacguguacgccgacagcuucgugauccggggagaugaagugcggcagauugccccuggacagacaggcaagaucgccgacuacaacuacaagcugcccgacgacuucaccggcugugugauugccuggaacagcaacaaccuggacuccaaagucggcggcaacuacaauuaccuguuccggcuguuccggaaguccaaucugaagcccuucgagcgggacaucuccaccgagaucuaucaggccggcaacaccccuuguaacggcguggaaggcuucaacugcuacuucccacugcaguccuacggcuuucagcccacaaauggcgugggcuaucagcccuacagagugguggugcugagcuucgaacugcugcaugccccugccacagugugcggcccuaagaaaagcaccaaucucgugaagaacaaaugcgugaacuucaacuucaacggccugaccggcaccggcgugcugacagagagcaacaagaaguuccugccauuccagcaguuuggccgggauaucgccgauaccacagacgccguuagagauccccagacacuggaaauccuggacaucaccccuugcagcuucggcggagugucugugaucaccccuggcaccaacaccagcaaucagguggcagugcuguaccagggcgugaacuguaccgaagugcccguggccauucacgccgaucagcugacaccuacauggcggguguacuccaccggcagcaauguguuucagaccagagccggcugucugaucggagccgagcacgugaacaauagcuacgagugcgacauccccaucggcgcuggaaucugcgccagcuaccagacacagacaaacagcccucggagagccagaagcguggccagccagagcgugauugccuacacaaugucucugggcgccgagaacagcguggccuacuccaacaacucuaucgcuauccccaccaacuucaccaucagcgugaccacagagauccugccuguguccaugaccaagaccagcguggacugcaccauguacaucugcggcgauuccaccgagugcuccaaccugcugcugcaguacggcagcuucugcacccagcugaauagagcccugacagggaucgccguggaacaggacaagaacacccaagagguguucgcccaagugaagcagaucuacaagaccccuccuaucaaggacuucggcggcuucaauuucagccagauucugcccgauccuagcaagcccagcaagcggagcuucaucgaggaccugcuguucaacaaagugacacuggccgacgccggcuucaucaagcaguauggcgauugucugggcgacauugccgccagggaucugauuugcgcccagaaguuuaacggacugacagugcugccuccucugcugaccgaugagaugaucgcccaguacacaucugcccugcuggccggcacaaucacaagcggcuggacauuuggagcaggcgccgcucugcagauccccuuugcuaugcagauggccuaccgguucaacggcaucggagugacccagaaugugcuguacgagaaccagaagcugaucgccaaccaguucaacagcgccaucggcaagauccaggacagccugagcagcacagcaagcgcccugggaaagcugcaggacguggucaaccagaaugcccaggcacugaacacccuggucaagcagcuguccuccaacuucggcgccaucagcucugugcugaacgauauccugagcagacuggacaaggucgaggccgaggugcagaucgacagacugaucacaggcagacugcagagccuccagacauacgugacccagcagcugaucagagccgccgagauuagagccucugccaaucuggccgccaccaagaugucugagugugugcugggccagagcaagagaguggacuuuugcggcaagggcuaccaccugaugagcuucccucagucugccccucacggcgugguguuucugcacgugacauaugugcccgcucaagagaagaauuucaccaccgcuccagccaucugccacgacggcaaagcccacuuuccuagagaaggcguguucguguccaacggcacccauugguucgugacacagcggaacuucuacgagccccagaucaucaccaccgacaacaccuucgugucuggcaacugcgacgucgugaucggcauugugaacaauaccguguacgacccucugcagcccgagcuggacagcuucaaagaggaacuggacaaguacuuuaagaaccacacaagccccgacguggaccugggcgauaucagcggaaucaaugccagcgucgugaacauccagaaagagaucgaccggcugaacgagguggccaagaaucugaacgagagccugaucgaccugcaagaacuggggaaguacgagcaguacaucaaguggcccugguacaucuggcugggcuuuaucgccggacugauugccaucgugauggucacaaucaugcuguguugcaugaccagcugcuguagcugccugaagggcuguuguagcuguggcagcugcugcaaguucgacgaggacgauucugagcccgugcugaagggcgugaaacugcacuacacaugaggacuaguuauaagacugacuagcccgaugggccucccaacgggcccuccuccccuccuugcaccgagauuaauaaaaaaaaaaaaaaaaaaaaaaaaaaaaaaaaaaaaaaaaaaaaaaaaaaaaaaaaaaaaaaaaaaaaaaaaaaaaaaaaaaaaaaaaaaaaaaaaaaaa

SEQ ID NO: 25490 - RNA, 4005 nt, Artificial Sequence
  SARS-CoV-2/Wuhan/WIV05/2019__EPI_ISL_402128 spike protein mRNA gc mod (1-1273)(H69del_V70del_Y453F_D614G_I692V_M1229I)
aggagaaagcuuaccauguucguguuccuggugcugcugccucugguguccagccagugugugaaccugaccaccagaacacagcugccuccagccuacaccaacagcuuuaccagaggcguguacuaccccgacaagguguucagauccagcgugcugcacucuacccaggaccuguuccugccuuucuucagcaacgugaccugguuccacgccaucuccggcaccaauggcaccaagagauucgacaaccccgugcugcccuucaacgacgggguguacuuugccagcaccgagaaguccaacaucaucagaggcuggaucuucggcaccacacuggacagcaagacccagagccugcugaucgugaacaacgccaccaacguggucaucaaagugugcgaguuccaguucugcaacgaccccuuccugggcgucuacuaccacaagaacaacaagagcuggauggaaagcgaguuccggguguacagcagcgccaacaacugcaccuucgaguacgugucccagccuuuccugauggaccuggaaggcaagcagggcaacuucaagaaccugcgcgaguucguguuuaagaacaucgacggcuacuucaagaucuacagcaagcacaccccuaucaaccucgugcgggaucugccucagggcuucucugcucuggaaccccugguggaucugcccaucggcaucaacaucacccgguuucagacacugcuggcccugcacagaagcuaccugacaccuggcgauagcagcagcggauggacagcuggugccgccgcuuacuaugugggcuaccugcagccuagaaccuuccugcugaaguacaacgagaacggcaccaucaccgacgccguggauugugcucuggauccucugagcgagacaaagugcacccugaaguccuucaccguggaaaagggcaucuaccagaccagcaacuuccgggugcagcccaccgaauccaucgugcgguuccccaauaucaccaaucugugccccuucggcgagguguucaaugccaccagauucgccucuguguacgccuggaaccggaagcggaucagcaauugcguggccgacuacuccgugcuguacaacuccgccagcuucagcaccuucaagugcuacggcguguccccuaccaagcugaacgaccugugcuucacaaacguguacgccgacagcuucgugauccggggagaugaagugcggcagauugccccuggacagacaggcaagaucgccgacuacaacuacaagcugcccgacgacuucaccggcugugugauugccuggaacagcaacaaccuggacuccaaagucggcggcaacuacaauuaccuguuccggcuguuccggaaguccaaucugaagcccuucgagcgggacaucuccaccgagaucuaucaggccggcagcaccccuuguaacggcguggaaggcuucaacugcuacuucccacugcaguccuacggcuuucagcccacaaauggcgugggcuaucagcccuacagagugguggugcugagcuucgaacugcugcaugccccugccacagugugcggcccuaagaaaagcaccaaucucgugaagaacaaaugcgugaacuucaacuucaacggccugaccggcaccggcgugcugacagagagcaacaagaaguuccugccauuccagcaguuuggccgggauaucgccgauaccacagacgccguuagagauccccagacacuggaaauccuggacaucaccccuugcagcuucggcggagugucugugaucaccccuggcaccaacaccagcaaucagguggcagugcuguaccagggcgugaacuguaccgaagugcccguggccauucacgccgaucagcugacaccuacauggcggguguacuccaccggcagcaauguguuucagaccagagccggcugucugaucggagccgagcacgugaacaauagcuacgagugcgacauccccaucggcgcuggaaucugcgccagcuaccagacacagacaaacagcccucggagagccagaagcguggccagccagagcgugauugccuacacaaugucucugggcgccgagaacagcguggccuacuccaacaacucuaucgcuauccccaccaacuucaccaucagcgugaccacagagauccugccuguguccaugaccaagaccagcguggacugcaccauguacaucugcggcgauuccaccgagugcuccaaccugcugcugcaguacggcagcuucugcacccagcugaauagagcccugacagggaucgccguggaacaggacaagaacacccaagagguguucgcccaagugaagcagaucuacaagaccccuccuaucaaggacuucggcggcuucaauuucagccagauucugcccgauccuagcaagcccagcaagcggagcuucaucgaggaccugcuguucaacaaagugacacuggccgacgccggcuucaucaagcaguauggcgauugucugggcgacauugccgccagggaucugauuugcgcccagaaguuuaacggacugacagugcugccuccucugcugaccgaugagaugaucgcccaguacacaucugcccugcuggccggcacaaucacaagcggcuggacauuuggagcaggcgccgcucugcagauccccuuugcuaugcagauggccuaccgguucaacggcaucggagugacccagaaugugcuguacgagaaccagaagcugaucgccaaccaguucaacagcgccaucggcaagauccaggacagccugagcagcacagcaagcgcccugggaaagcugcaggacguggucaaccagaaugcccaggcacugaacacccuggucaagcagcuguccuccaacuucggcgccaucagcucugugcugaacgauauccugagcagacuggacaaggucgaggccgaggugcagaucgacagacugaucacaggcagacugcagagccuccagacauacgugacccagcagcugaucagagccgccgagauuagagccucugccaaucuggccgccaccaagaugucugagugugugcugggccagagcaagagaguggacuuuugcggcaagggcuaccaccugaugagcuucccucagucugccccucacggcgugguguuucugcacgugacauaugugcccgcucaagagaagaauuucaccaccgcuccagccaucugccacgacggcaaagcccacuuuccuagagaaggcguguucguguccaacggcacccauugguucgugacacagcggaacuucuacgagccccagaucaucaccaccgacaacaccuucgugucuggcaacugcgacgucgugaucggcauugugaacaauaccguguacgacccucugcagcccgagcuggacagcuucaaagaggaacuggacaaguacuuuaagaaccacacaagccccgacguggaccugggcgauaucagcggaaucaaugccagcgucgugaacauccagaaagagaucgaccggcugaacgagguggccaagaaucugaacgagagccugaucgaccugcaagaacuggggaaguacgagcaguacaucaaguggcccugguacaucuggcugggcuuuaucgccggacugauugccaucgugaucgucacaaucaugcuguguugcaugaccagcugcuguagcugccugaagggcuguuguagcuguggcagcugcugcaaguucgacgaggacgauucugagcccgugcugaagggcgugaaacugcacuacacaugaggacuaguuauaagacugacuagcccgaugggccucccaacgggcccuccuccccuccuugcaccgagauuaauaaaaaaaaaaaaaaaaaaaaaaaaaaaaaaaaaaaaaaaaaaaaaaaaaaaaaaaaaaaaaaaaaaaaaaaaaaaaaaaaaaaaaaaaaaaaaaaaaaaa

SEQ ID NO: 25491 - RNA, 4002 nt, Artificial Sequence
  SARS-CoV-2/Wuhan/WIV05/2019__EPI_ISL_402128 spike protein mRNA gc mod (1-1273)(H69del_V70del_Y144del_N501Y_A570D_D614G_P681H_T716I_S982 A_D1118H)
aggagaaagcuuaccauguucguguuccuggugcugcugccucugguguccagccagugugugaaccugaccaccagaacacagcugccuccagccuacaccaacagcuuuaccagaggcguguacuaccccgacaagguguucagauccagcgugcugcacucuacccaggaccuguuccugccuuucuucagcaacgugaccugguuccacgccaucuccggcaccaauggcaccaagagauucgacaaccccgugcugcccuucaacgacgggguguacuuugccagcaccgagaaguccaacaucaucagaggcuggaucuucggcaccacacuggacagcaagacccagagccugcugaucgugaacaacgccaccaacguggucaucaaagugugcgaguuccaguucugcaacgaccccuuccugggcgucuaccacaagaacaacaagagcuggauggaaagcgaguuccggguguacagcagcgccaacaacugcaccuucgaguacgugucccagccuuuccugauggaccuggaaggcaagcagggcaacuucaagaaccugcgcgaguucguguuuaagaacaucgacggcuacuucaagaucuacagcaagcacaccccuaucaaccucgugcgggaucugccucagggcuucucugcucuggaaccccugguggaucugcccaucggcaucaacaucacccgguuucagacacugcuggcccugcacagaagcuaccugacaccuggcgauagcagcagcggauggacagcuggugccgccgcuuacuaugugggcuaccugcagccuagaaccuuccugcugaaguacaacgagaacggcaccaucaccgacgccguggauugugcucuggauccucugagcgagacaaagugcacccugaaguccuucaccguggaaaagggcaucuaccagaccagcaacuuccgggugcagcccaccgaauccaucgugcgguuccccaauaucaccaaucugugccccuucggcgagguguucaaugccaccagauucgccucuguguacgccuggaaccggaagcggaucagcaauugcguggccgacuacuccgugcuguacaacuccgccagcuucagcaccuucaagugcuacggcguguccccuaccaagcugaacgaccugugcuucacaaacguguacgccgacagcuucgugauccggggagaugaagugcggcagauugccccuggacagacaggcaagaucgccgacuacaacuacaagcugcccgacgacuucaccggcugugugauugccuggaacagcaacaaccuggacuccaaagucggcggcaacuacaauuaccuguaccggcuguuccggaaguccaaucugaagcccuucgagcgggacaucuccaccgagaucuaucaggccggcagcaccccuuguaacggcguggaaggcuucaacugcuacuucccacugcaguccuacggcuuucagcccacauacggcgugggcuaucagcccuacagagugguggugcugagcuucgaacugcugcaugccccugccacagugugcggcccuaagaaaagcaccaaucucgugaagaacaaaugcgugaacuucaacuucaacggccugaccggcaccggcgugcugacagagagcaacaagaaguuccugccauuccagcaguuuggccgggauaucgacgauaccacagacgccguuagagauccccagacacuggaaauccuggacaucaccccuugcagcuucggcggagugucugugaucaccccuggcaccaacaccagcaaucagguggcagugcuguaccagggcgugaacuguaccgaagugcccguggccauucacgccgaucagcugacaccuacauggcggguguacuccaccggcagcaauguguuucagaccagagccggcugucugaucggagccgagcacgugaacaauagcuacgagugcgacauccccaucggcgcuggaaucugcgccagcuaccagacacagacaaacagccaccggagagccagaagcguggccagccagagcaucauugccuacacaaugucucugggcgccgagaacagcguggccuacuccaacaacucuaucgcuauccccaucaacuucaccaucagcgugaccacagagauccugccuguguccaugaccaagaccagcguggacugcaccauguacaucugcggcgauuccaccgagugcuccaaccugcugcugcaguacggcagcuucugcacccagcugaauagagcccugacagggaucgccguggaacaggacaagaacacccaagagguguucgcccaagugaagcagaucuacaagaccccuccuaucaaggacuucggcggcuucaauuucagccagauucugcccgauccuagcaagcccagcaagcggagcuucaucgaggaccugcuguucaacaaagugacacuggccgacgccggcuucaucaagcaguauggcgauugucugggcgacauugccgccagggaucugauuugcgcccagaaguuuaacggacugacagugcugccuccucugcugaccgaugagaugaucgcccaguacacaucugcccugcuggccggcacaaucacaagcggcuggacauuuggagcaggcgccgcucugcagauccccuuugcuaugcagauggccuaccgguucaacggcaucggagugacccagaaugugcuguacgagaaccagaagcugaucgccaaccaguucaacagcgccaucggcaagauccaggacagccugagcagcacagcaagcgcccugggaaagcugcaggacguggucaaccagaaugcccaggcacugaacacccuggucaagcagcuguccuccaacuucggcgccaucagcucugugcugaacgauauccuggccagacuggacaaggucgaggccgaggugcagaucgacagacugaucacaggcagacugcagagccuccagacauacgugacccagcagcugaucagagccgccgagauuagagccucugccaaucuggccgccaccaagaugucugagugugugcugggccagagcaagagaguggacuuuugcggcaagggcuaccaccugaugagcuucccucagucugccccucacggcgugguguuucugcacgugacauaugugcccgcucaagagaagaauuucaccaccgcuccagccaucugccacgacggcaaagcccacuuuccuagagaaggcguguucguguccaacggcacccauugguucgugacacagcggaacuucuacgagccccagaucaucaccacccacaacaccuucgugucuggcaacugcgacgucgugaucggcauugugaacaauaccguguacgacccucugcagcccgagcuggacagcuucaaagaggaacuggacaaguacuuuaagaaccacacaagccccgacguggaccugggcgauaucagcggaaucaaugccagcgucgugaacauccagaaagagaucgaccggcugaacgagguggccaagaaucugaacgagagccugaucgaccugcaagaacuggggaaguacgagcaguacaucaaguggcccugguacaucuggcugggcuuuaucgccggacugauugccaucgugauggucacaaucaugcuguguugcaugaccagcugcuguagcugccugaagggcuguuguagcuguggcagcugcugcaaguucgacgaggacgauucugagcccgugcugaagggcgugaaacugcacuacacaugaggacuaguuauaagacugacuagcccgaugggccucccaacgggcccuccuccccuccuugcaccgagauuaauaaaaaaaaaaaaaaaaaaaaaaaaaaaaaaaaaaaaaaaaaaaaaaaaaaaaaaaaaaaaaaaaaaaaaaaaaaaaaaaaaaaaaaaaaaaaaaaaaaaa

SEQ ID NO: 25492 - RNA, 4011 nt, Artificial Sequence
  SARS-CoV-2/Wuhan/WIV05/2019__EPI_ISL_402128 spike protein mRNA gc mod (1-1273)(K417N_E484K_N501Y_D614G)
aggagaaagcuuaccauguucguguuccuggugcugcugccucugguguccagccagugugugaaccugaccaccagaacacagcugccuccagccuacaccaacagcuuuaccagaggcguguacuaccccgacaagguguucagauccagcgugcugcacucuacccaggaccuguuccugccuuucuucagcaacgugaccugguuccacgccauccacguguccggcaccaauggcaccaagagauucgacaaccccgugcugcccuucaacgacgggguguacuuugccagcaccgagaaguccaacaucaucagaggcuggaucuucggcaccacacuggacagcaagacccagagccugcugaucgugaacaacgccaccaacguggucaucaaagugugcgaguuccaguucugcaacgaccccuuccugggcgucuacuaccacaagaacaacaagagcuggauggaaagcgaguuccggguguacagcagcgccaacaacugcaccuucgaguacgugucccagccuuuccugauggaccuggaaggcaagcagggcaacuucaagaaccugcgcgaguucguguuuaagaacaucgacggcuacuucaagaucuacagcaagcacaccccuaucaaccucgugcgggaucugccucagggcuucucugcucuggaaccccugguggaucugcccaucggcaucaacaucacccgguuucagacacugcuggcccugcacagaagcuaccugacaccuggcgauagcagcagcggauggacagcuggugccgccgcuuacuaugugggcuaccugcagccuagaaccuuccugcugaaguacaacgagaacggcaccaucaccgacgccguggauugugcucuggauccucugagcgagacaaagugcacccugaaguccuucaccguggaaaagggcaucuaccagaccagcaacuuccgggugcagcccaccgaauccaucgugcgguuccccaauaucaccaaucugugccccuucggcgagguguucaaugccaccagauucgccucuguguacgccuggaaccggaagcggaucagcaauugcguggccgacuacuccgugcuguacaacuccgccagcuucagcaccuucaagugcuacggcguguccccuaccaagcugaacgaccugugcuucacaaacguguacgccgacagcuucgugauccggggagaugaagugcggcagauugccccuggacagacaggcaacaucgccgacuacaacuacaagcugcccgacgacuucaccggcugugugauugccuggaacagcaacaaccuggacuccaaagucggcggcaacuacaauuaccuguaccggcuguuccggaaguccaaucugaagcccuucgagcgggacaucuccaccgagaucuaucaggccggcagcaccccuuguaacggcgugaagggcuucaacugcuacuucccacugcaguccuacggcuuucagcccacauacggcgugggcuaucagcccuacagagugguggugcugagcuucgaacugcugcaugccccugccacagugugcggcccuaagaaaagcaccaaucucgugaagaacaaaugcgugaacuucaacuucaacggccugaccggcaccggcgugcugacagagagcaacaagaaguuccugccauuccagcaguuuggccgggauaucgccgauaccacagacgccguuagagauccccagacacuggaaauccuggacaucaccccuugcagcuucggcggagugucugugaucaccccuggcaccaacaccagcaaucagguggcagugcuguaccagggcgugaacuguaccgaagugcccguggccauucacgccgaucagcugacaccuacauggcggguguacuccaccggcagcaauguguuucagaccagagccggcugucugaucggagccgagcacgugaacaauagcuacgagugcgacauccccaucggcgcuggaaucugcgccagcuaccagacacagacaaacagcccucggagagccagaagcguggccagccagagcaucauugccuacacaaugucucugggcgccgagaacagcguggccuacuccaacaacucuaucgcuauccccaccaacuucaccaucagcgugaccacagagauccugccuguguccaugaccaagaccagcguggacugcaccauguacaucugcggcgauuccaccgagugcuccaaccugcugcugcaguacggcagcuucugcacccagcugaauagagcccugacagggaucgccguggaacaggacaagaacacccaagagguguucgcccaagugaagcagaucuacaagaccccuccuaucaaggacuucggcggcuucaauuucagccagauucugcccgauccuagcaagcccagcaagcggagcuucaucgaggaccugcuguucaacaaagugacacuggccgacgccggcuucaucaagcaguauggcgauugucugggcgacauugccgccagggaucugauuugcgcccagaaguuuaacggacugacagugcugccuccucugcugaccgaugagaugaucgcccaguacacaucugcccugcuggccggcacaaucacaagcggcuggacauuuggagcaggcgccgcucugcagauccccuuugcuaugcagauggccuaccgguucaacggcaucggagugacccagaaugugcuguacgagaaccagaagcugaucgccaaccaguucaacagcgccaucggcaagauccaggacagccugagcagcacagcaagcgcccugggaaagcugcaggacguggucaaccagaaugcccaggcacugaacacccuggucaagcagcuguccuccaacuucggcgccaucagcucugugcugaacgauauccugagcagacuggacaaggucgaggccgaggugcagaucgacagacugaucacaggcagacugcagagccuccagacauacgugacccagcagcugaucagagccgccgagauuagagccucugccaaucuggccgccaccaagaugucugagugugugcugggccagagcaagagaguggacuuuugcggcaagggcuaccaccugaugagcuucccucagucugccccucacggcgugguguuucugcacgugacauaugugcccgcucaagagaagaauuucaccaccgcuccagccaucugccacgacggcaaagcccacuuuccuagagaaggcguguucguguccaacggcacccauugguucgugacacagcggaacuucuacgagccccagaucaucaccaccgacaacaccuucgugucuggcaacugcgacgucgugaucggcauugugaacaauaccguguacgacccucugcagcccgagcuggacagcuucaaagaggaacuggacaaguacuuuaagaaccacacaagccccgacguggaccugggcgauaucagcggaaucaaugccagcgucgugaacauccagaaagagaucgaccggcugaacgagguggccaagaaucugaacgagagccugaucgaccugcaagaacuggggaaguacgagcaguacaucaaguggcccugguacaucuggcugggcuuuaucgccggacugauugccaucgugauggucacaaucaugcuguguugcaugaccagcugcuguagcugccugaagggcuguuguagcuguggcagcugcugcaaguucgacgaggacgauucugagcccgugcugaagggcgugaaacugcacuacacaugaggacuaguuauaagacugacuagcccgaugggccucccaacgggcccuccuccccuccuugcaccgagauuaauaaaaaaaaaaaaaaaaaaaaaaaaaaaaaaaaaaaaaaaaaaaaaaaaaaaaaaaaaaaaaaaaaaaaaaaaaaaaaaaaaaaaaaaaaaaaaaaaaaaa

SEQ ID NO: 25493 - RNA, 4002 nt, Artificial Sequence
  SARS-CoV-2/Wuhan/WIV05/2019__EPI_ISL_402128 spike protein mRNA gc mod (1-1273)(L18F_D80A_D215G_L242del_A243del_L244del_R246I_K417N_E484 K_N501Y_D614G_A701V)
aggagaaagcuuaccauguucguguuccuggugcugcugccucugguguccagccagugugugaacuucaccaccagaacacagcugccuccagccuacaccaacagcuuuaccagaggcguguacuaccccgacaagguguucagauccagcgugcugcacucuacccaggaccuguuccugccuuucuucagcaacgugaccugguuccacgccauccacguguccggcaccaauggcaccaagagauucgccaaccccgugcugcccuucaacgacgggguguacuuugccagcaccgagaaguccaacaucaucagaggcuggaucuucggcaccacacuggacagcaagacccagagccugcugaucgugaacaacgccaccaacguggucaucaaagugugcgaguuccaguucugcaacgaccccuuccugggcgucuacuaccacaagaacaacaagagcuggauggaaagcgaguuccggguguacagcagcgccaacaacugcaccuucgaguacgugucccagccuuuccugauggaccuggaaggcaagcagggcaacuucaagaaccugcgcgaguucguguuuaagaacaucgacggcuacuucaagaucuacagcaagcacaccccuaucaaccucgugcggggccugccucagggcuucucugcucuggaaccccugguggaucugcccaucggcaucaacaucacccgguuucagacacugcacaucagcuaccugacaccuggcgauagcagcagcggauggacagcuggugccgccgcuuacuaugugggcuaccugcagccuagaaccuuccugcugaaguacaacgagaacggcaccaucaccgacgccguggauugugcucuggauccucugagcgagacaaagugcacccugaaguccuucaccguggaaaagggcaucuaccagaccagcaacuuccgggugcagcccaccgaauccaucgugcgguuccccaauaucaccaaucugugccccuucggcgagguguucaaugccaccagauucgccucuguguacgccuggaaccggaagcggaucagcaauugcguggccgacuacuccgugcuguacaacuccgccagcuucagcaccuucaagugcuacggcguguccccuaccaagcugaacgaccugugcuucacaaacguguacgccgacagcuucgugauccggggagaugaagugcggcagauugccccuggacagacaggcaacaucgccgacuacaacuacaagcugcccgacgacuucaccggcugugugauugccuggaacagcaacaaccuggacuccaaagucggcggcaacuacaauuaccuguaccggcuguuccggaaguccaaucugaagcccuucgagcgggacaucuccaccgagaucuaucaggccggcagcaccccuuguaacggcgugaagggcuucaacugcuacuucccacugcaguccuacggcuuucagcccacauacggcgugggcuaucagcccuacagagugguggugcugagcuucgaacugcugcaugccccugccacagugugcggcccuaagaaaagcaccaaucucgugaagaacaaaugcgugaacuucaacuucaacggccugaccggcaccggcgugcugacagagagcaacaagaaguuccugccauuccagcaguuuggccgggauaucgccgauaccacagacgccguuagagauccccagacacuggaaauccuggacaucaccccuugcagcuucggcggagugucugugaucaccccuggcaccaacaccagcaaucagguggcagugcuguaccagggcgugaacuguaccgaagugcccguggccauucacgccgaucagcugacaccuacauggcggguguacuccaccggcagcaauguguuucagaccagagccggcugucugaucggagccgagcacgugaacaauagcuacgagugcgacauccccaucggcgcuggaaucugcgccagcuaccagacacagacaaacagcccucggagagccagaagcguggccagccagagcaucauugccuacacaaugucucugggcguggagaacagcguggccuacuccaacaacucuaucgcuauccccaccaacuucaccaucagcgugaccacagagauccugccuguguccaugaccaagaccagcguggacugcaccauguacaucugcggcgauuccaccgagugcuccaaccugcugcugcaguacggcagcuucugcacccagcugaauagagcccugacagggaucgccguggaacaggacaagaacacccaagagguguucgcccaagugaagcagaucuacaagaccccuccuaucaaggacuucggcggcuucaauuucagccagauucugcccgauccuagcaagcccagcaagcggagcuucaucgaggaccugcuguucaacaaagugacacuggccgacgccggcuucaucaagcaguauggcgauugucugggcgacauugccgccagggaucugauuugcgcccagaaguuuaacggacugacagugcugccuccucugcugaccgaugagaugaucgcccaguacacaucugcccugcuggccggcacaaucacaagcggcuggacauuuggagcaggcgccgcucugcagauccccuuugcuaugcagauggccuaccgguucaacggcaucggagugacccagaaugugcuguacgagaaccagaagcugaucgccaaccaguucaacagcgccaucggcaagauccaggacagccugagcagcacagcaagcgcccugggaaagcugcaggacguggucaaccagaaugcccaggcacugaacacccuggucaagcagcuguccuccaacuucggcgccaucagcucugugcugaacgauauccugagcagacuggacaaggucgaggccgaggugcagaucgacagacugaucacaggcagacugcagagccuccagacauacgugacccagcagcugaucagagccgccgagauuagagccucugccaaucuggccgccaccaagaugucugagugugugcugggccagagcaagagaguggacuuuugcggcaagggcuaccaccugaugagcuucccucagucugccccucacggcgugguguuucugcacgugacauaugugcccgcucaagagaagaauuucaccaccgcuccagccaucugccacgacggcaaagcccacuuuccuagagaaggcguguucguguccaacggcacccauugguucgugacacagcggaacuucuacgagccccagaucaucaccaccgacaacaccuucgugucuggcaacugcgacgucgugaucggcauugugaacaauaccguguacgacccucugcagcccgagcuggacagcuucaaagaggaacuggacaaguacuuuaagaaccacacaagccccgacguggaccugggcgauaucagcggaaucaaugccagcgucgugaacauccagaaagagaucgaccggcugaacgagguggccaagaaucugaacgagagccugaucgaccugcaagaacuggggaaguacgagcaguacaucaaguggcccugguacaucuggcugggcuuuaucgccggacugauugccaucgugauggucacaaucaugcuguguugcaugaccagcugcuguagcugccugaagggcuguuguagcuguggcagcugcugcaaguucgacgaggacgauucugagcccgugcugaagggcgugaaacugcacuacacaugaggacuaguuauaagacugacuagcccgaugggccucccaacgggcccuccuccccuccuugcaccgagauuaauaaaaaaaaaaaaaaaaaaaaaaaaaaaaaaaaaaaaaaaaaaaaaaaaaaaaaaaaaaaaaaaaaaaaaaaaaaaaaaaaaaaaaaaaaaaaaaaaaaaa

SEQ ID NO: 25494 - RNA, 4011 nt, Artificial Sequence
  SARS-CoV-2/Wuhan/WIV05/2019__EPI_ISL_402128 spike protein mRNA gc mod (1-1273)(E484K_D614G)
aggagaaagcuuaccauguucguguuccuggugcugcugccucugguguccagccagugugugaaccugaccaccagaacacagcugccuccagccuacaccaacagcuuuaccagaggcguguacuaccccgacaagguguucagauccagcgugcugcacucuacccaggaccuguuccugccuuucuucagcaacgugaccugguuccacgccauccacguguccggcaccaauggcaccaagagauucgacaaccccgugcugcccuucaacgacgggguguacuuugccagcaccgagaaguccaacaucaucagaggcuggaucuucggcaccacacuggacagcaagacccagagccugcugaucgugaacaacgccaccaacguggucaucaaagugugcgaguuccaguucugcaacgaccccuuccugggcgucuacuaccacaagaacaacaagagcuggauggaaagcgaguuccggguguacagcagcgccaacaacugcaccuucgaguacgugucccagccuuuccugauggaccuggaaggcaagcagggcaacuucaagaaccugcgcgaguucguguuuaagaacaucgacggcuacuucaagaucuacagcaagcacaccccuaucaaccucgugcgggaucugccucagggcuucucugcucuggaaccccugguggaucugcccaucggcaucaacaucacccgguuucagacacugcuggcccugcacagaagcuaccugacaccuggcgauagcagcagcggauggacagcuggugccgccgcuuacuaugugggcuaccugcagccuagaaccuuccugcugaaguacaacgagaacggcaccaucaccgacgccguggauugugcucuggauccucugagcgagacaaagugcacccugaaguccuucaccguggaaaagggcaucuaccagaccagcaacuuccgggugcagcccaccgaauccaucgugcgguuccccaauaucaccaaucugugccccuucggcgagguguucaaugccaccagauucgccucuguguacgccuggaaccggaagcggaucagcaauugcguggccgacuacuccgugcuguacaacuccgccagcuucagcaccuucaagugcuacggcguguccccuaccaagcugaacgaccugugcuucacaaacguguacgccgacagcuucgugauccggggagaugaagugcggcagauugccccuggacagacaggcaagaucgccgacuacaacuacaagcugcccgacgacuucaccggcugugugauugccuggaacagcaacaaccuggacuccaaagucggcggcaacuacaauuaccuguaccggcuguuccggaaguccaaucugaagcccuucgagcgggacaucuccaccgagaucuaucaggccggcagcaccccuuguaacggcgugaagggcuucaacugcuacuucccacugcaguccuacggcuuucagcccacaaauggcgugggcuaucagcccuacagagugguggugcugagcuucgaacugcugcaugccccugccacagugugcggcccuaagaaaagcaccaaucucgugaagaacaaaugcgugaacuucaacuucaacggccugaccggcaccggcgugcugacagagagcaacaagaaguuccugccauuccagcaguuuggccgggauaucgccgauaccacagacgccguuagagauccccagacacuggaaauccuggacaucaccccuugcagcuucggcggagugucugugaucaccccuggcaccaacaccagcaaucagguggcagugcuguaccagggcgugaacuguaccgaagugcccguggccauucacgccgaucagcugacaccuacauggcggguguacuccaccggcagcaauguguuucagaccagagccggcugucugaucggagccgagcacgugaacaauagcuacgagugcgacauccccaucggcgcuggaaucugcgccagcuaccagacacagacaaacagcccucggagagccagaagcguggccagccagagcaucauugccuacacaaugucucugggcgccgagaacagcguggccuacuccaacaacucuaucgcuauccccaccaacuucaccaucagcgugaccacagagauccugccuguguccaugaccaagaccagcguggacugcaccauguacaucugcggcgauuccaccgagugcuccaaccugcugcugcaguacggcagcuucugcacccagcugaauagagcccugacagggaucgccguggaacaggacaagaacacccaagagguguucgcccaagugaagcagaucuacaagaccccuccuaucaaggacuucggcggcuucaauuucagccagauucugcccgauccuagcaagcccagcaagcggagcuucaucgaggaccugcuguucaacaaagugacacuggccgacgccggcuucaucaagcaguauggcgauugucugggcgacauugccgccagggaucugauuugcgcccagaaguuuaacggacugacagugcugccuccucugcugaccgaugagaugaucgcccaguacacaucugcccugcuggccggcacaaucacaagcggcuggacauuuggagcaggcgccgcucugcagauccccuuugcuaugcagauggccuaccgguucaacggcaucggagugacccagaaugugcuguacgagaaccagaagcugaucgccaaccaguucaacagcgccaucggcaagauccaggacagccugagcagcacagcaagcgcccugggaaagcugcaggacguggucaaccagaaugcccaggcacugaacacccuggucaagcagcuguccuccaacuucggcgccaucagcucugugcugaacgauauccugagcagacuggacaaggucgaggccgaggugcagaucgacagacugaucacaggcagacugcagagccuccagacauacgugacccagcagcugaucagagccgccgagauuagagccucugccaaucuggccgccaccaagaugucugagugugugcugggccagagcaagagaguggacuuuugcggcaagggcuaccaccugaugagcuucccucagucugccccucacggcgugguguuucugcacgugacauaugugcccgcucaagagaagaauuucaccaccgcuccagccaucugccacgacggcaaagcccacuuuccuagagaaggcguguucguguccaacggcacccauugguucgugacacagcggaacuucuacgagccccagaucaucaccaccgacaacaccuucgugucuggcaacugcgacgucgugaucggcauugugaacaauaccguguacgacccucugcagcccgagcuggacagcuucaaagaggaacuggacaaguacuuuaagaaccacacaagccccgacguggaccugggcgauaucagcggaaucaaugccagcgucgugaacauccagaaagagaucgaccggcugaacgagguggccaagaaucugaacgagagccugaucgaccugcaagaacuggggaaguacgagcaguacaucaaguggcccugguacaucuggcugggcuuuaucgccggacugauugccaucgugauggucacaaucaugcuguguugcaugaccagcugcuguagcugccugaagggcuguuguagcuguggcagcugcugcaaguucgacgaggacgauucugagcccgugcugaagggcgugaaacugcacuacacaugaggacuaguuauaagacugacuagcccgaugggccucccaacgggcccuccuccccuccuugcaccgagauuaauaaaaaaaaaaaaaaaaaaaaaaaaaaaaaaaaaaaaaaaaaaaaaaaaaaaaaaaaaaaaaaaaaaaaaaaaaaaaaaaaaaaaaaaaaaaaaaaaaaaa

SEQ ID NO: 25495 - RNA, 4011 nt, Artificial Sequence
  SARS-CoV-2/Wuhan/WIV05/2019__EPI_ISL_402128 spike protein mRNA gc mod (1-1273)(L18F_T20N_P26S_D138Y_R190S_K417T_E484K_N501Y_D614G_H655Y _T1027I)
aggagaaagcuuaccauguucguguuccuggugcugcugccucugguguccagccagugugugaacuucaccaacagaacacagcugccuagcgccuacaccaacagcuuuaccagaggcguguacuaccccgacaagguguucagauccagcgugcugcacucuacccaggaccuguuccugccuuucuucagcaacgugaccugguuccacgccauccacguguccggcaccaauggcaccaagagauucgacaaccccgugcugcccuucaacgacgggguguacuuugccagcaccgagaaguccaacaucaucagaggcuggaucuucggcaccacacuggacagcaagacccagagccugcugaucgugaacaacgccaccaacguggucaucaaagugugcgaguuccaguucugcaacuaccccuuccugggcgucuacuaccacaagaacaacaagagcuggauggaaagcgaguuccggguguacagcagcgccaacaacugcaccuucgaguacgugucccagccuuuccugauggaccuggaaggcaagcagggcaacuucaagaaccugagcgaguucguguuuaagaacaucgacggcuacuucaagaucuacagcaagcacaccccuaucaaccucgugcgggaucugccucagggcuucucugcucuggaaccccugguggaucugcccaucggcaucaacaucacccgguuucagacacugcuggcccugcacagaagcuaccugacaccuggcgauagcagcagcggauggacagcuggugccgccgcuuacuaugugggcuaccugcagccuagaaccuuccugcugaaguacaacgagaacggcaccaucaccgacgccguggauugugcucuggauccucugagcgagacaaagugcacccugaaguccuucaccguggaaaagggcaucuaccagaccagcaacuuccgggugcagcccaccgaauccaucgugcgguuccccaauaucaccaaucugugccccuucggcgagguguucaaugccaccagauucgccucuguguacgccuggaaccggaagcggaucagcaauugcguggccgacuacuccgugcuguacaacuccgccagcuucagcaccuucaagugcuacggcguguccccuaccaagcugaacgaccugugcuucacaaacguguacgccgacagcuucgugauccggggagaugaagugcggcagauugccccuggacagacaggcaccaucgccgacuacaacuacaagcugcccgacgacuucaccggcugugugauugccuggaacagcaacaaccuggacuccaaagucggcggcaacuacaauuaccuguaccggcuguuccggaaguccaaucugaagcccuucgagcgggacaucuccaccgagaucuaucaggccggcagcaccccuuguaacggcgugaagggcuucaacugcuacuucccacugcaguccuacggcuuucagcccacauacggcgugggcuaucagcccuacagagugguggugcugagcuucgaacugcugcaugccccugccacagugugcggcccuaagaaaagcaccaaucucgugaagaacaaaugcgugaacuucaacuucaacggccugaccggcaccggcgugcugacagagagcaacaagaaguuccugccauuccagcaguuuggccgggauaucgccgauaccacagacgccguuagagauccccagacacuggaaauccuggacaucaccccuugcagcuucggcggagugucugugaucaccccuggcaccaacaccagcaaucagguggcagugcuguaccagggcgugaacuguaccgaagugcccguggccauucacgccgaucagcugacaccuacauggcggguguacuccaccggcagcaauguguuucagaccagagccggcugucugaucggagccgaguacgugaacaauagcuacgagugcgacauccccaucggcgcuggaaucugcgccagcuaccagacacagacaaacagcccucggagagccagaagcguggccagccagagcaucauugccuacacaaugucucugggcgccgagaacagcguggccuacuccaacaacucuaucgcuauccccaccaacuucaccaucagcgugaccacagagauccugccuguguccaugaccaagaccagcguggacugcaccauguacaucugcggcgauuccaccgagugcuccaaccugcugcugcaguacggcagcuucugcacccagcugaauagagcccugacagggaucgccguggaacaggacaagaacacccaagagguguucgcccaagugaagcagaucuacaagaccccuccuaucaaggacuucggcggcuucaauuucagccagauucugcccgauccuagcaagcccagcaagcggagcuucaucgaggaccugcuguucaacaaagugacacuggccgacgccggcuucaucaagcaguauggcgauugucugggcgacauugccgccagggaucugauuugcgcccagaaguuuaacggacugacagugcugccuccucugcugaccgaugagaugaucgcccaguacacaucugcccugcuggccggcacaaucacaagcggcuggacauuuggagcaggcgccgcucugcagauccccuuugcuaugcagauggccuaccgguucaacggcaucggagugacccagaaugugcuguacgagaaccagaagcugaucgccaaccaguucaacagcgccaucggcaagauccaggacagccugagcagcacagcaagcgcccugggaaagcugcaggacguggucaaccagaaugcccaggcacugaacacccuggucaagcagcuguccuccaacuucggcgccaucagcucugugcugaacgauauccugagcagacuggacaaggucgaggccgaggugcagaucgacagacugaucacaggcagacugcagagccuccagacauacgugacccagcagcugaucagagccgccgagauuagagccucugccaaucuggccgccaucaagaugucugagugugugcugggccagagcaagagaguggacuuuugcggcaagggcuaccaccugaugagcuucccucagucugccccucacggcgugguguuucugcacgugacauaugugcccgcucaagagaagaauuucaccaccgcuccagccaucugccacgacggcaaagcccacuuuccuagagaaggcguguucguguccaacggcacccauugguucgugacacagcggaacuucuacgagccccagaucaucaccaccgacaacaccuucgugucuggcaacugcgacgucgugaucggcauugugaacaauaccguguacgacccucugcagcccgagcuggacagcuucaaagaggaacuggacaaguacuuuaagaaccacacaagccccgacguggaccugggcgauaucagcggaaucaaugccagcgucgugaacauccagaaagagaucgaccggcugaacgagguggccaagaaucugaacgagagccugaucgaccugcaagaacuggggaaguacgagcaguacaucaaguggcccugguacaucuggcugggcuuuaucgccggacugauugccaucgugauggucacaaucaugcuguguugcaugaccagcugcuguagcugccugaagggcuguuguagcuguggcagcugcugcaaguucgacgaggacgauucugagcccgugcugaagggcgugaaacugcacuacacaugaggacuaguuauaagacugacuagcccgaugggccucccaacgggcccuccuccccuccuugcaccgagauuaauaaaaaaaaaaaaaaaaaaaaaaaaaaaaaaaaaaaaaaaaaaaaaaaaaaaaaaaaaaaaaaaaaaaaaaaaaaaaaaaaaaaaaaaaaaaaaaaaaaaa

SEQ ID NO: 25496 - RNA, 4011 nt, Artificial Sequence
  SARS-CoV-2/Wuhan/WIV05/2019__EPI_ISL_402128 spike protein mRNA gc mod (1-1273)(S13I_W152C_L452R_D614G)
aggagaaagcuuaccauguucguguuccuggugcugcugccucugguguccauccagugugugaaccugaccaccagaacacagcugccuccagccuacaccaacagcuuuaccagaggcguguacuaccccgacaagguguucagauccagcgugcugcacucuacccaggaccuguuccugccuuucuucagcaacgugaccugguuccacgccauccacguguccggcaccaauggcaccaagagauucgacaaccccgugcugcccuucaacgacgggguguacuuugccagcaccgagaaguccaacaucaucagaggcuggaucuucggcaccacacuggacagcaagacccagagccugcugaucgugaacaacgccaccaacguggucaucaaagugugcgaguuccaguucugcaacgaccccuuccugggcgucuacuaccacaagaacaacaagagcugcauggaaagcgaguuccggguguacagcagcgccaacaacugcaccuucgaguacgugucccagccuuuccugauggaccuggaaggcaagcagggcaacuucaagaaccugcgcgaguucguguuuaagaacaucgacggcuacuucaagaucuacagcaagcacaccccuaucaaccucgugcgggaucugccucagggcuucucugcucuggaaccccugguggaucugcccaucggcaucaacaucacccgguuucagacacugcuggcccugcacagaagcuaccugacaccuggcgauagcagcagcggauggacagcuggugccgccgcuuacuaugugggcuaccugcagccuagaaccuuccugcugaaguacaacgagaacggcaccaucaccgacgccguggauugugcucuggauccucugagcgagacaaagugcacccugaaguccuucaccguggaaaagggcaucuaccagaccagcaacuuccgggugcagcccaccgaauccaucgugcgguuccccaauaucaccaaucugugccccuucggcgagguguucaaugccaccagauucgccucuguguacgccuggaaccggaagcggaucagcaauugcguggccgacuacuccgugcuguacaacuccgccagcuucagcaccuucaagugcuacggcguguccccuaccaagcugaacgaccugugcuucacaaacguguacgccgacagcuucgugauccggggagaugaagugcggcagauugccccuggacagacaggcaagaucgccgacuacaacuacaagcugcccgacgacuucaccggcugugugauugccuggaacagcaacaaccuggacuccaaagucggcggcaacuacaauuaccgcuaccggcuguuccggaaguccaaucugaagcccuucgagcgggacaucuccaccgagaucuaucaggccggcagcaccccuuguaacggcguggaaggcuucaacugcuacuucccacugcaguccuacggcuuucagcccacaaauggcgugggcuaucagcccuacagagugguggugcugagcuucgaacugcugcaugccccugccacagugugcggcccuaagaaaagcaccaaucucgugaagaacaaaugcgugaacuucaacuucaacggccugaccggcaccggcgugcugacagagagcaacaagaaguuccugccauuccagcaguuuggccgggauaucgccgauaccacagacgccguuagagauccccagacacuggaaauccuggacaucaccccuugcagcuucggcggagugucugugaucaccccuggcaccaacaccagcaaucagguggcagugcuguaccagggcgugaacuguaccgaagugcccguggccauucacgccgaucagcugacaccuacauggcggguguacuccaccggcagcaauguguuucagaccagagccggcugucugaucggagccgagcacgugaacaauagcuacgagugcgacauccccaucggcgcuggaaucugcgccagcuaccagacacagacaaacagcccucggagagccagaagcguggccagccagagcaucauugccuacacaaugucucugggcgccgagaacagcguggccuacuccaacaacucuaucgcuauccccaccaacuucaccaucagcgugaccacagagauccugccuguguccaugaccaagaccagcguggacugcaccauguacaucugcggcgauuccaccgagugcuccaaccugcugcugcaguacggcagcuucugcacccagcugaauagagcccugacagggaucgccguggaacaggacaagaacacccaagagguguucgcccaagugaagcagaucuacaagaccccuccuaucaaggacuucggcggcuucaauuucagccagauucugcccgauccuagcaagcccagcaagcggagcuucaucgaggaccugcuguucaacaaagugacacuggccgacgccggcuucaucaagcaguauggcgauugucugggcgacauugccgccagggaucugauuugcgcccagaaguuuaacggacugacagugcugccuccucugcugaccgaugagaugaucgcccaguacacaucugcccugcuggccggcacaaucacaagcggcuggacauuuggagcaggcgccgcucugcagauccccuuugcuaugcagauggccuaccgguucaacggcaucggagugacccagaaugugcuguacgagaaccagaagcugaucgccaaccaguucaacagcgccaucggcaagauccaggacagccugagcagcacagcaagcgcccugggaaagcugcaggacguggucaaccagaaugcccaggcacugaacacccuggucaagcagcuguccuccaacuucggcgccaucagcucugugcugaacgauauccugagcagacuggacaaggucgaggccgaggugcagaucgacagacugaucacaggcagacugcagagccuccagacauacgugacccagcagcugaucagagccgccgagauuagagccucugccaaucuggccgccaccaagaugucugagugugugcugggccagagcaagagaguggacuuuugcggcaagggcuaccaccugaugagcuucccucagucugccccucacggcgugguguuucugcacgugacauaugugcccgcucaagagaagaauuucaccaccgcuccagccaucugccacgacggcaaagcccacuuuccuagagaaggcguguucguguccaacggcacccauugguucgugacacagcggaacuucuacgagccccagaucaucaccaccgacaacaccuucgugucuggcaacugcgacgucgugaucggcauugugaacaauaccguguacgacccucugcagcccgagcuggacagcuucaaagaggaacuggacaaguacuuuaagaaccacacaagccccgacguggaccugggcgauaucagcggaaucaaugccagcgucgugaacauccagaaagagaucgaccggcugaacgagguggccaagaaucugaacgagagccugaucgaccugcaagaacuggggaaguacgagcaguacaucaaguggcccugguacaucuggcugggcuuuaucgccggacugauugccaucgugauggucacaaucaugcuguguugcaugaccagcugcuguagcugccugaagggcuguuguagcuguggcagcugcugcaaguucgacgaggacgauucugagcccgugcugaagggcgugaaacugcacuacacaugaggacuaguuauaagacugacuagcccgaugggccucccaacgggcccuccuccccuccuugcaccgagauuaauaaaaaaaaaaaaaaaaaaaaaaaaaaaaaaaaaaaaaaaaaaaaaaaaaaaaaaaaaaaaaaaaaaaaaaaaaaaaaaaaaaaaaaaaaaaaaaaaaaaa

SEQ ID NO: 25497 - RNA, 4011 nt, Artificial Sequence
  SARS-CoV-2/Wuhan/WIV05/2019__EPI_ISL_402128 spike protein mRNA gc (1-1273)(K986P_V987P)
aggagaaagcuuaccauguucguguuccugguccuccugccccuggugagcucccagugcgugaaccucaccacccgcacgcagcugccgcccgccuacaccaacagcuucacccggggcgucuacuaccccgacaagguguuccgcuccagcgugcugcacuccacccaggaccucuuccugcccuucuucagcaacgucacgugguuccacgccauccacguguccgggaccaacggcaccaagcgguucgacaacccggugcugcccuucaacgacggggucuacuucgcgagcaccgagaaguccaacaucauccgcggcuggaucuucgggacgacccucgacagcaagacccagucccugcugaucgugaacaacgccaccaacguggucaucaaggugugcgaguuccaguucugcaacgaccccuuccucggcguguacuaccacaagaacaacaagagcuggauggaguccgaguuccgggucuacagcuccgccaacaacugcacguucgaguacgugagccagcccuuccugauggaccuggagggcaagcaggggaacuucaagaaccuccgcgaguucguguucaagaacaucgacggcuacuucaagaucuacuccaagcacaccccgaucaaccugguccgggaccugccccagggguucagcgcccucgagccccugguggaccugcccaucggcaucaacaucacccgcuuccagacccuccuggcccugcaccgguccuaccucacgccgggggacagcagcuccggcuggaccgcgggcgccgccgccuacuacgugggguaccugcagccccgcaccuuccugcucaaguacaacgagaacggcaccaucacggacgcggucgacugcgcccuggacccccugagcgagaccaagugcacccucaaguccuucaccguggagaaggggaucuaccagacgagcaacuuccgggugcagcccaccgaguccaucguccgcuucccgaacaucaccaaccugugccccuucggcgagguguucaacgccacccgguucgccagcgucuacgccuggaaccgcaagcggaucuccaacugcguggcggacuacagcgugcuguacaacuccgccagcuucuccacguucaagugcuacggcgucagccccaccaagcucaacgaccugugcuucaccaacguguacgccgacuccuucgugauccgcggggacgagguccggcagaucgcccccggccagaccgggaagaucgccgacuacaacuacaagcugccggacgacuucacgggcugcgugaucgcguggaacagcaacaaccucgacuccaaggucgggggcaacuacaacuaccuguaccgccuguuccgcaagagcaaccucaagcccuucgagcgggacaucuccaccgagaucuaccaggccggcagcacccccugcaacgggguggagggcuucaacugcuacuucccccugcaguccuacggguuccagccgaccaacggcgugggguaccagcccuaccggguggucgugcugagcuucgagcuccugcacgcccccgccacggugugcggccccaagaaguccaccaaccuggucaagaacaagugcgugaacuucaacuucaacggccucaccgggaccggcgugcugaccgagagcaacaagaaguuccugccguuccagcaguucgggcgcgacaucgccgacacgaccgacgcgguccgcgacccccagacccuggagauccucgacaucacccccugcagcuucggcgggguguccgugaucacgccgggcaccaacaccagcaaccaggucgccgugcuguaccaggacgugaacugcaccgagguccccguggccauccacgccgaccagcugacgcccaccuggcggguguacuccaccggcagcaacgucuuccagacccgcgccgggugccucaucggcgcggagcacgugaacaacuccuacgagugcgacauccccaucggggccggcaucugcgccagcuaccagacgcagaccaacuccccgcggcgcgcccggagcguggcgucccagagcaucaucgccuacaccaugucccugggcgccgagaacagcgucgccuacuccaacaacagcaucgccauccccaccaacuucacgaucuccgugaccaccgagauccugcccgugagcaugaccaagacgagcgucgacugcaccauguacaucugcggggacuccaccgagugcagcaaccuccugcugcaguacggcuccuucugcacccagcucaaccgcgcgcugacggggaucgccguggagcaggacaagaacacccaggagguguucgcccaggucaagcagaucuacaagacgcccccgaucaaggacuucggcggguucaacuucagccagauccugcccgaccccuccaagcccagcaagcgguccuucaucgaggaccuccuguucaacaaggugacccuggccgacgccggcuucaucaagcaguacggcgacugccucggggacaucgcggcccgcgaccugaucugcgcccagaaguucaacggccugaccgugcucccgccccugcugaccgacgagaugaucgcccaguacaccagcgcccuccuggcggggaccaucacguccggcuggaccuucggggccggcgccgcccugcagauccccuucgcgaugcagauggccuaccgguucaacggcaucggggucacccagaacgugcucuacgagaaccagaagcugaucgccaaccaguucaacagcgccaucggcaagauccaggacucccugagcuccaccgccagcgcgcucgggaagcugcaggacguggucaaccagaacgcccaggcccugaacacgcucgugaagcagcuguccagcaacuucggcgccaucuccagcgugcugaacgacauccucucccgccuggacccgcccgaggccgaggugcagaucgaccggcugaucaccgggcgccuccagagccugcagaccuacgugacccagcagcugauccgggcggccgagauccgcgccagcgccaaccucgccgcgaccaagauguccgagugcguccugggccagagcaagcggguggacuucugcggcaagggguaccaccugauguccuucccccagagcgccccgcacggcguggucuuccuccacgugacguacguccccgcccaggagaagaacuucaccaccgcccccgcgaucugccacgacgggaaggcccacuucccccgcgagggcguguucguguccaacgggacccacugguucgucacgcagcggaacuucuacgagccgcagaucaucaccaccgacaacaccuucgugagcggcaacugcgacguggucaucggcaucgugaacaacacgguguacgacccccugcagcccgagcuggacuccuucaaggaggagcucgacaaguacuucaagaaccacaccagccccgacgucgaccugggggacaucuccggcaucaacgccagcguggugaacauccagaaggagaucgaccgccugaacgaggucgccaagaaccucaacgagucccugaucgaccugcaggagcucgggaaguacgagcaguacaucaaguggccgugguacaucuggcugggcuucaucgccggccugaucgcgaucgugauggugaccaucaugcucugcugcaugaccagcugcugcuccugccugaaggggugcugcagcugcggcuccugcugcaaguucgacgaggacgacagcgagcccguccugaagggggugaagcuccacuacacgugaggacuaguuauaagacugacuagcccgaugggccucccaacgggcccuccuccccuccuugcaccgagauuaauaaaaaaaaaaaaaaaaaaaaaaaaaaaaaaaaaaaaaaaaaaaaaaaaaaaaaaaaaaaaaaaaaaaaaaaaaaaaaaaaaaaaaaaaaaaaaaaaaaaa

SEQ ID NO: 25498 - RNA, 4011 nt, Artificial Sequence
  SARS-CoV-2/Wuhan/WIV05/2019__EPI_ISL_402128 spike protein mRNA gc (1-1273)(K986P_V987P_ D614G)
aggagaaagcuuaccauguucguguuccugguccuccugccccuggugagcucccagugcgugaaccucaccacccgcacgcagcugccgcccgccuacaccaacagcuucacccggggcgucuacuaccccgacaagguguuccgcuccagcgugcugcacuccacccaggaccucuuccugcccuucuucagcaacgucacgugguuccacgccauccacguguccgggaccaacggcaccaagcgguucgacaacccggugcugcccuucaacgacggggucuacuucgcgagcaccgagaaguccaacaucauccgcggcuggaucuucgggacgacccucgacagcaagacccagucccugcugaucgugaacaacgccaccaacguggucaucaaggugugcgaguuccaguucugcaacgaccccuuccucggcguguacuaccacaagaacaacaagagcuggauggaguccgaguuccgggucuacagcuccgccaacaacugcacguucgaguacgugagccagcccuuccugauggaccuggagggcaagcaggggaacuucaagaaccuccgcgaguucguguucaagaacaucgacggcuacuucaagaucuacuccaagcacaccccgaucaaccugguccgggaccugccccagggguucagcgcccucgagccccugguggaccugcccaucggcaucaacaucacccgcuuccagacccuccuggcccugcaccgguccuaccucacgccgggggacagcagcuccggcuggaccgcgggcgccgccgccuacuacgugggguaccugcagccccgcaccuuccugcucaaguacaacgagaacggcaccaucacggacgcggucgacugcgcccuggacccccugagcgagaccaagugcacccucaaguccuucaccguggagaaggggaucuaccagacgagcaacuuccgggugcagcccaccgaguccaucguccgcuucccgaacaucaccaaccugugccccuucggcgagguguucaacgccacccgguucgccagcgucuacgccuggaaccgcaagcggaucuccaacugcguggcggacuacagcgugcuguacaacuccgccagcuucuccacguucaagugcuacggcgucagccccaccaagcucaacgaccugugcuucaccaacguguacgccgacuccuucgugauccgcggggacgagguccggcagaucgcccccggccagaccgggaagaucgccgacuacaacuacaagcugccggacgacuucacgggcugcgugaucgcguggaacagcaacaaccucgacuccaaggucgggggcaacuacaacuaccuguaccgccuguuccgcaagagcaaccucaagcccuucgagcgggacaucuccaccgagaucuaccaggccggcagcacccccugcaacgggguggagggcuucaacugcuacuucccccugcaguccuacggguuccagccgaccaacggcgugggguaccagcccuaccggguggucgugcugagcuucgagcuccugcacgcccccgccacggugugcggccccaagaaguccaccaaccuggucaagaacaagugcgugaacuucaacuucaacggccucaccgggaccggcgugcugaccgagagcaacaagaaguuccugccguuccagcaguucgggcgcgacaucgccgacacgaccgacgcgguccgcgacccccagacccuggagauccucgacaucacccccugcagcuucggcgggguguccgugaucacgccgggcaccaacaccagcaaccaggucgccgugcuguaccagggcgugaacugcaccgagguccccguggccauccacgccgaccagcugacgcccaccuggcggguguacuccaccggcagcaacgucuuccagacccgcgccgggugccucaucggcgcggagcacgugaacaacuccuacgagugcgacauccccaucggggccggcaucugcgccagcuaccagacgcagaccaacuccccgcggcgcgcccggagcguggcgucccagagcaucaucgccuacaccaugucccugggcgccgagaacagcgucgccuacuccaacaacagcaucgccauccccaccaacuucacgaucuccgugaccaccgagauccugcccgugagcaugaccaagacgagcgucgacugcaccauguacaucugcggggacuccaccgagugcagcaaccuccugcugcaguacggcuccuucugcacccagcucaaccgcgcgcugacggggaucgccguggagcaggacaagaacacccaggagguguucgcccaggucaagcagaucuacaagacgcccccgaucaaggacuucggcggguucaacuucagccagauccugcccgaccccuccaagcccagcaagcgguccuucaucgaggaccuccuguucaacaaggugacccuggccgacgccggcuucaucaagcaguacggcgacugccucggggacaucgcggcccgcgaccugaucugcgcccagaaguucaacggccugaccgugcucccgccccugcugaccgacgagaugaucgcccaguacaccagcgcccuccuggcggggaccaucacguccggcuggaccuucggggccggcgccgcccugcagauccccuucgcgaugcagauggccuaccgguucaacggcaucggggucacccagaacgugcucuacgagaaccagaagcugaucgccaaccaguucaacagcgccaucggcaagauccaggacucccugagcuccaccgccagcgcgcucgggaagcugcaggacguggucaaccagaacgcccaggcccugaacacgcucgugaagcagcuguccagcaacuucggcgccaucuccagcgugcugaacgacauccucucccgccuggacccgcccgaggccgaggugcagaucgaccggcugaucaccgggcgccuccagagccugcagaccuacgugacccagcagcugauccgggcggccgagauccgcgccagcgccaaccucgccgcgaccaagauguccgagugcguccugggccagagcaagcggguggacuucugcggcaagggguaccaccugauguccuucccccagagcgccccgcacggcguggucuuccuccacgugacguacguccccgcccaggagaagaacuucaccaccgcccccgcgaucugccacgacgggaaggcccacuucccccgcgagggcguguucguguccaacgggacccacugguucgucacgcagcggaacuucuacgagccgcagaucaucaccaccgacaacaccuucgugagcggcaacugcgacguggucaucggcaucgugaacaacacgguguacgacccccugcagcccgagcuggacuccuucaaggaggagcucgacaaguacuucaagaaccacaccagccccgacgucgaccugggggacaucuccggcaucaacgccagcguggugaacauccagaaggagaucgaccgccugaacgaggucgccaagaaccucaacgagucccugaucgaccugcaggagcucgggaaguacgagcaguacaucaaguggccgugguacaucuggcugggcuucaucgccggccugaucgcgaucgugauggugaccaucaugcucugcugcaugaccagcugcugcuccugccugaaggggugcugcagcugcggcuccugcugcaaguucgacgaggacgacagcgagcccguccugaagggggugaagcuccacuacacgugaggacuaguuauaagacugacuagcccgaugggccucccaacgggcccuccuccccuccuugcaccgagauuaauaaaaaaaaaaaaaaaaaaaaaaaaaaaaaaaaaaaaaaaaaaaaaaaaaaaaaaaaaaaaaaaaaaaaaaaaaaaaaaaaaaaaaaaaaaaaaaaaaaaa

SEQ ID NO: 25499 - RNA, 4011 nt, Artificial Sequence
  SARS-CoV-2/Wuhan/WIV05/2019__EPI_ISL_402128 spike protein mRNA gc (1-1273)(K986P_V987P_A222V_D614G)
aggagaaagcuuaccauguucguguuccugguccuccugccccuggugagcucccagugcgugaaccucaccacccgcacgcagcugccgcccgccuacaccaacagcuucacccggggcgucuacuaccccgacaagguguuccgcuccagcgugcugcacuccacccaggaccucuuccugcccuucuucagcaacgucacgugguuccacgccauccacguguccgggaccaacggcaccaagcgguucgacaacccggugcugcccuucaacgacggggucuacuucgcgagcaccgagaaguccaacaucauccgcggcuggaucuucgggacgacccucgacagcaagacccagucccugcugaucgugaacaacgccaccaacguggucaucaaggugugcgaguuccaguucugcaacgaccccuuccucggcguguacuaccacaagaacaacaagagcuggauggaguccgaguuccgggucuacagcuccgccaacaacugcacguucgaguacgugagccagcccuuccugauggaccuggagggcaagcaggggaacuucaagaaccuccgcgaguucguguucaagaacaucgacggcuacuucaagaucuacuccaagcacaccccgaucaaccugguccgggaccugccccagggguucagcguccucgagccccugguggaccugcccaucggcaucaacaucacccgcuuccagacccuccuggcccugcaccgguccuaccucacgccgggggacagcagcuccggcuggaccgcgggcgccgccgccuacuacgugggguaccugcagccccgcaccuuccugcucaaguacaacgagaacggcaccaucacggacgcggucgacugcgcccuggacccccugagcgagaccaagugcacccucaaguccuucaccguggagaaggggaucuaccagacgagcaacuuccgggugcagcccaccgaguccaucguccgcuucccgaacaucaccaaccugugccccuucggcgagguguucaacgccacccgguucgccagcgucuacgccuggaaccgcaagcggaucuccaacugcguggcggacuacagcgugcuguacaacuccgccagcuucuccacguucaagugcuacggcgucagccccaccaagcucaacgaccugugcuucaccaacguguacgccgacuccuucgugauccgcggggacgagguccggcagaucgcccccggccagaccgggaagaucgccgacuacaacuacaagcugccggacgacuucacgggcugcgugaucgcguggaacagcaacaaccucgacuccaaggucgggggcaacuacaacuaccuguaccgccuguuccgcaagagcaaccucaagcccuucgagcgggacaucuccaccgagaucuaccaggccggcagcacccccugcaacgggguggagggcuucaacugcuacuucccccugcaguccuacggguuccagccgaccaacggcgugggguaccagcccuaccggguggucgugcugagcuucgagcuccugcacgcccccgccacggugugcggccccaagaaguccaccaaccuggucaagaacaagugcgugaacuucaacuucaacggccucaccgggaccggcgugcugaccgagagcaacaagaaguuccugccguuccagcaguucgggcgcgacaucgccgacacgaccgacgcgguccgcgacccccagacccuggagauccucgacaucacccccugcagcuucggcgggguguccgugaucacgccgggcaccaacaccagcaaccaggucgccgugcuguaccagggcgugaacugcaccgagguccccguggccauccacgccgaccagcugacgcccaccuggcggguguacuccaccggcagcaacgucuuccagacccgcgccgggugccucaucggcgcggagcacgugaacaacuccuacgagugcgacauccccaucggggccggcaucugcgccagcuaccagacgcagaccaacuccccgcggcgcgcccggagcguggcgucccagagcaucaucgccuacaccaugucccugggcgccgagaacagcgucgccuacuccaacaacagcaucgccauccccaccaacuucacgaucuccgugaccaccgagauccugcccgugagcaugaccaagacgagcgucgacugcaccauguacaucugcggggacuccaccgagugcagcaaccuccugcugcaguacggcuccuucugcacccagcucaaccgcgcgcugacggggaucgccguggagcaggacaagaacacccaggagguguucgcccaggucaagcagaucuacaagacgcccccgaucaaggacuucggcggguucaacuucagccagauccugcccgaccccuccaagcccagcaagcgguccuucaucgaggaccuccuguucaacaaggugacccuggccgacgccggcuucaucaagcaguacggcgacugccucggggacaucgcggcccgcgaccugaucugcgcccagaaguucaacggccugaccgugcucccgccccugcugaccgacgagaugaucgcccaguacaccagcgcccuccuggcggggaccaucacguccggcuggaccuucggggccggcgccgcccugcagauccccuucgcgaugcagauggccuaccgguucaacggcaucggggucacccagaacgugcucuacgagaaccagaagcugaucgccaaccaguucaacagcgccaucggcaagauccaggacucccugagcuccaccgccagcgcgcucgggaagcugcaggacguggucaaccagaacgcccaggcccugaacacgcucgugaagcagcuguccagcaacuucggcgccaucuccagcgugcugaacgacauccucucccgccuggacccgcccgaggccgaggugcagaucgaccggcugaucaccgggcgccuccagagccugcagaccuacgugacccagcagcugauccgggcggccgagauccgcgccagcgccaaccucgccgcgaccaagauguccgagugcguccugggccagagcaagcggguggacuucugcggcaagggguaccaccugauguccuucccccagagcgccccgcacggcguggucuuccuccacgugacguacguccccgcccaggagaagaacuucaccaccgcccccgcgaucugccacgacgggaaggcccacuucccccgcgagggcguguucguguccaacgggacccacugguucgucacgcagcggaacuucuacgagccgcagaucaucaccaccgacaacaccuucgugagcggcaacugcgacguggucaucggcaucgugaacaacacgguguacgacccccugcagcccgagcuggacuccuucaaggaggagcucgacaaguacuucaagaaccacaccagccccgacgucgaccugggggacaucuccggcaucaacgccagcguggugaacauccagaaggagaucgaccgccugaacgaggucgccaagaaccucaacgagucccugaucgaccugcaggagcucgggaaguacgagcaguacaucaaguggccgugguacaucuggcugggcuucaucgccggccugaucgcgaucgugauggugaccaucaugcucugcugcaugaccagcugcugcuccugccugaaggggugcugcagcugcggcuccugcugcaaguucgacgaggacgacagcgagcccguccugaagggggugaagcuccacuacacgugaggacuaguuauaagacugacuagcccgaugggccucccaacgggcccuccuccccuccuugcaccgagauuaauaaaaaaaaaaaaaaaaaaaaaaaaaaaaaaaaaaaaaaaaaaaaaaaaaaaaaaaaaaaaaaaaaaaaaaaaaaaaaaaaaaaaaaaaaaaaaaaaaaaa

SEQ ID NO: 25500 - RNA, 4011 nt, Artificial Sequence
  SARS-CoV-2/Wuhan/WIV05/2019__EPI_ISL_402128 spike protein mRNA gc (1-1273)(K986P_V987P_N439K_D614G)
aggagaaagcuuaccauguucguguuccugguccuccugccccuggugagcucccagugcgugaaccucaccacccgcacgcagcugccgcccgccuacaccaacagcuucacccggggcgucuacuaccccgacaagguguuccgcuccagcgugcugcacuccacccaggaccucuuccugcccuucuucagcaacgucacgugguuccacgccauccacguguccgggaccaacggcaccaagcgguucgacaacccggugcugcccuucaacgacggggucuacuucgcgagcaccgagaaguccaacaucauccgcggcuggaucuucgggacgacccucgacagcaagacccagucccugcugaucgugaacaacgccaccaacguggucaucaaggugugcgaguuccaguucugcaacgaccccuuccucggcguguacuaccacaagaacaacaagagcuggauggaguccgaguuccgggucuacagcuccgccaacaacugcacguucgaguacgugagccagcccuuccugauggaccuggagggcaagcaggggaacuucaagaaccuccgcgaguucguguucaagaacaucgacggcuacuucaagaucuacuccaagcacaccccgaucaaccugguccgggaccugccccagggguucagcgcccucgagccccugguggaccugcccaucggcaucaacaucacccgcuuccagacccuccuggcccugcaccgguccuaccucacgccgggggacagcagcuccggcuggaccgcgggcgccgccgccuacuacgugggguaccugcagccccgcaccuuccugcucaaguacaacgagaacggcaccaucacggacgcggucgacugcgcccuggacccccugagcgagaccaagugcacccucaaguccuucaccguggagaaggggaucuaccagacgagcaacuuccgggugcagcccaccgaguccaucguccgcuucccgaacaucaccaaccugugccccuucggcgagguguucaacgccacccgguucgccagcgucuacgccuggaaccgcaagcggaucuccaacugcguggcggacuacagcgugcuguacaacuccgccagcuucuccacguucaagugcuacggcgucagccccaccaagcucaacgaccugugcuucaccaacguguacgccgacuccuucgugauccgcggggacgagguccggcagaucgcccccggccagaccgggaagaucgccgacuacaacuacaagcugccggacgacuucacgggcugcgugaucgcguggaacagcaagaaccucgacuccaaggucgggggcaacuacaacuaccuguaccgccuguuccgcaagagcaaccucaagcccuucgagcgggacaucuccaccgagaucuaccaggccggcagcacccccugcaacgggguggagggcuucaacugcuacuucccccugcaguccuacggguuccagccgaccaacggcgugggguaccagcccuaccggguggucgugcugagcuucgagcuccugcacgcccccgccacggugugcggccccaagaaguccaccaaccuggucaagaacaagugcgugaacuucaacuucaacggccucaccgggaccggcgugcugaccgagagcaacaagaaguuccugccguuccagcaguucgggcgcgacaucgccgacacgaccgacgcgguccgcgacccccagacccuggagauccucgacaucacccccugcagcuucggcgggguguccgugaucacgccgggcaccaacaccagcaaccaggucgccgugcuguaccagggcgugaacugcaccgagguccccguggccauccacgccgaccagcugacgcccaccuggcggguguacuccaccggcagcaacgucuuccagacccgcgccgggugccucaucggcgcggagcacgugaacaacuccuacgagugcgacauccccaucggggccggcaucugcgccagcuaccagacgcagaccaacuccccgcggcgcgcccggagcguggcgucccagagcaucaucgccuacaccaugucccugggcgccgagaacagcgucgccuacuccaacaacagcaucgccauccccaccaacuucacgaucuccgugaccaccgagauccugcccgugagcaugaccaagacgagcgucgacugcaccauguacaucugcggggacuccaccgagugcagcaaccuccugcugcaguacggcuccuucugcacccagcucaaccgcgcgcugacggggaucgccguggagcaggacaagaacacccaggagguguucgcccaggucaagcagaucuacaagacgcccccgaucaaggacuucggcggguucaacuucagccagauccugcccgaccccuccaagcccagcaagcgguccuucaucgaggaccuccuguucaacaaggugacccuggccgacgccggcuucaucaagcaguacggcgacugccucggggacaucgcggcccgcgaccugaucugcgcccagaaguucaacggccugaccgugcucccgccccugcugaccgacgagaugaucgcccaguacaccagcgcccuccuggcggggaccaucacguccggcuggaccuucggggccggcgccgcccugcagauccccuucgcgaugcagauggccuaccgguucaacggcaucggggucacccagaacgugcucuacgagaaccagaagcugaucgccaaccaguucaacagcgccaucggcaagauccaggacucccugagcuccaccgccagcgcgcucgggaagcugcaggacguggucaaccagaacgcccaggcccugaacacgcucgugaagcagcuguccagcaacuucggcgccaucuccagcgugcugaacgacauccucucccgccuggacccgcccgaggccgaggugcagaucgaccggcugaucaccgggcgccuccagagccugcagaccuacgugacccagcagcugauccgggcggccgagauccgcgccagcgccaaccucgccgcgaccaagauguccgagugcguccugggccagagcaagcggguggacuucugcggcaagggguaccaccugauguccuucccccagagcgccccgcacggcguggucuuccuccacgugacguacguccccgcccaggagaagaacuucaccaccgcccccgcgaucugccacgacgggaaggcccacuucccccgcgagggcguguucguguccaacgggacccacugguucgucacgcagcggaacuucuacgagccgcagaucaucaccaccgacaacaccuucgugagcggcaacugcgacguggucaucggcaucgugaacaacacgguguacgacccccugcagcccgagcuggacuccuucaaggaggagcucgacaaguacuucaagaaccacaccagccccgacgucgaccugggggacaucuccggcaucaacgccagcguggugaacauccagaaggagaucgaccgccugaacgaggucgccaagaaccucaacgagucccugaucgaccugcaggagcucgggaaguacgagcaguacaucaaguggccgugguacaucuggcugggcuucaucgccggccugaucgcgaucgugauggugaccaucaugcucugcugcaugaccagcugcugcuccugccugaaggggugcugcagcugcggcuccugcugcaaguucgacgaggacgacagcgagcccguccugaagggggugaagcuccacuacacgugaggacuaguuauaagacugacuagcccgaugggccucccaacgggcccuccuccccuccuugcaccgagauuaauaaaaaaaaaaaaaaaaaaaaaaaaaaaaaaaaaaaaaaaaaaaaaaaaaaaaaaaaaaaaaaaaaaaaaaaaaaaaaaaaaaaaaaaaaaaaaaaaaaaa

SEQ ID NO: 25501 - RNA, 4011 nt, Artificial Sequence
  SARS-CoV-2/Wuhan/WIV05/2019__EPI_ISL_402128 spike protein mRNA gc (1-1273)(K986P_V987P_S477N_D614G)
aggagaaagcuuaccauguucguguuccugguccuccugccccuggugagcucccagugcgugaaccucaccacccgcacgcagcugccgcccgccuacaccaacagcuucacccggggcgucuacuaccccgacaagguguuccgcuccagcgugcugcacuccacccaggaccucuuccugcccuucuucagcaacgucacgugguuccacgccauccacguguccgggaccaacggcaccaagcgguucgacaacccggugcugcccuucaacgacggggucuacuucgcgagcaccgagaaguccaacaucauccgcggcuggaucuucgggacgacccucgacagcaagacccagucccugcugaucgugaacaacgccaccaacguggucaucaaggugugcgaguuccaguucugcaacgaccccuuccucggcguguacuaccacaagaacaacaagagcuggauggaguccgaguuccgggucuacagcuccgccaacaacugcacguucgaguacgugagccagcccuuccugauggaccuggagggcaagcaggggaacuucaagaaccuccgcgaguucguguucaagaacaucgacggcuacuucaagaucuacuccaagcacaccccgaucaaccugguccgggaccugccccagggguucagcgcccucgagccccugguggaccugcccaucggcaucaacaucacccgcuuccagacccuccuggcccugcaccgguccuaccucacgccgggggacagcagcuccggcuggaccgcgggcgccgccgccuacuacgugggguaccugcagccccgcaccuuccugcucaaguacaacgagaacggcaccaucacggacgcggucgacugcgcccuggacccccugagcgagaccaagugcacccucaaguccuucaccguggagaaggggaucuaccagacgagcaacuuccgggugcagcccaccgaguccaucguccgcuucccgaacaucaccaaccugugccccuucggcgagguguucaacgccacccgguucgccagcgucuacgccuggaaccgcaagcggaucuccaacugcguggcggacuacagcgugcuguacaacuccgccagcuucuccacguucaagugcuacggcgucagccccaccaagcucaacgaccugugcuucaccaacguguacgccgacuccuucgugauccgcggggacgagguccggcagaucgcccccggccagaccgggaagaucgccgacuacaacuacaagcugccggacgacuucacgggcugcgugaucgcguggaacagcaacaaccucgacuccaaggucgggggcaacuacaacuaccuguaccgccuguuccgcaagagcaaccucaagcccuucgagcgggacaucuccaccgagaucuaccaggccggcaacacccccugcaacgggguggagggcuucaacugcuacuucccccugcaguccuacggguuccagccgaccaacggcgugggguaccagcccuaccggguggucgugcugagcuucgagcuccugcacgcccccgccacggugugcggccccaagaaguccaccaaccuggucaagaacaagugcgugaacuucaacuucaacggccucaccgggaccggcgugcugaccgagagcaacaagaaguuccugccguuccagcaguucgggcgcgacaucgccgacacgaccgacgcgguccgcgacccccagacccuggagauccucgacaucacccccugcagcuucggcgggguguccgugaucacgccgggcaccaacaccagcaaccaggucgccgugcuguaccagggcgugaacugcaccgagguccccguggccauccacgccgaccagcugacgcccaccuggcggguguacuccaccggcagcaacgucuuccagacccgcgccgggugccucaucggcgcggagcacgugaacaacuccuacgagugcgacauccccaucggggccggcaucugcgccagcuaccagacgcagaccaacuccccgcggcgcgcccggagcguggcgucccagagcaucaucgccuacaccaugucccugggcgccgagaacagcgucgccuacuccaacaacagcaucgccauccccaccaacuucacgaucuccgugaccaccgagauccugcccgugagcaugaccaagacgagcgucgacugcaccauguacaucugcggggacuccaccgagugcagcaaccuccugcugcaguacggcuccuucugcacccagcucaaccgcgcgcugacggggaucgccguggagcaggacaagaacacccaggagguguucgcccaggucaagcagaucuacaagacgcccccgaucaaggacuucggcggguucaacuucagccagauccugcccgaccccuccaagcccagcaagcgguccuucaucgaggaccuccuguucaacaaggugacccuggccgacgccggcuucaucaagcaguacggcgacugccucggggacaucgcggcccgcgaccugaucugcgcccagaaguucaacggccugaccgugcucccgccccugcugaccgacgagaugaucgcccaguacaccagcgcccuccuggcggggaccaucacguccggcuggaccuucggggccggcgccgcccugcagauccccuucgcgaugcagauggccuaccgguucaacggcaucggggucacccagaacgugcucuacgagaaccagaagcugaucgccaaccaguucaacagcgccaucggcaagauccaggacucccugagcuccaccgccagcgcgcucgggaagcugcaggacguggucaaccagaacgcccaggcccugaacacgcucgugaagcagcuguccagcaacuucggcgccaucuccagcgugcugaacgacauccucucccgccuggacccgcccgaggccgaggugcagaucgaccggcugaucaccgggcgccuccagagccugcagaccuacgugacccagcagcugauccgggcggccgagauccgcgccagcgccaaccucgccgcgaccaagauguccgagugcguccugggccagagcaagcggguggacuucugcggcaagggguaccaccugauguccuucccccagagcgccccgcacggcguggucuuccuccacgugacguacguccccgcccaggagaagaacuucaccaccgcccccgcgaucugccacgacgggaaggcccacuucccccgcgagggcguguucguguccaacgggacccacugguucgucacgcagcggaacuucuacgagccgcagaucaucaccaccgacaacaccuucgugagcggcaacugcgacguggucaucggcaucgugaacaacacgguguacgacccccugcagcccgagcuggacuccuucaaggaggagcucgacaaguacuucaagaaccacaccagccccgacgucgaccugggggacaucuccggcaucaacgccagcguggugaacauccagaaggagaucgaccgccugaacgaggucgccaagaaccucaacgagucccugaucgaccugcaggagcucgggaaguacgagcaguacaucaaguggccgugguacaucuggcugggcuucaucgccggccugaucgcgaucgugauggugaccaucaugcucugcugcaugaccagcugcugcuccugccugaaggggugcugcagcugcggcuccugcugcaaguucgacgaggacgacagcgagcccguccugaagggggugaagcuccacuacacgugaggacuaguuauaagacugacuagcccgaugggccucccaacgggcccuccuccccuccuugcaccgagauuaauaaaaaaaaaaaaaaaaaaaaaaaaaaaaaaaaaaaaaaaaaaaaaaaaaaaaaaaaaaaaaaaaaaaaaaaaaaaaaaaaaaaaaaaaaaaaaaaaaaaa

SEQ ID NO: 25502 - RNA, 4011 nt, Artificial Sequence
  SARS-CoV-2/Wuhan/WIV05/2019__EPI_ISL_402128 spike protein mRNA gc (1-1273)(K986P_V987P_N501Y_D614G)
aggagaaagcuuaccauguucguguuccugguccuccugccccuggugagcucccagugcgugaaccucaccacccgcacgcagcugccgcccgccuacaccaacagcuucacccggggcgucuacuaccccgacaagguguuccgcuccagcgugcugcacuccacccaggaccucuuccugcccuucuucagcaacgucacgugguuccacgccauccacguguccgggaccaacggcaccaagcgguucgacaacccggugcugcccuucaacgacggggucuacuucgcgagcaccgagaaguccaacaucauccgcggcuggaucuucgggacgacccucgacagcaagacccagucccugcugaucgugaacaacgccaccaacguggucaucaaggugugcgaguuccaguucugcaacgaccccuuccucggcguguacuaccacaagaacaacaagagcuggauggaguccgaguuccgggucuacagcuccgccaacaacugcacguucgaguacgugagccagcccuuccugauggaccuggagggcaagcaggggaacuucaagaaccuccgcgaguucguguucaagaacaucgacggcuacuucaagaucuacuccaagcacaccccgaucaaccugguccgggaccugccccagggguucagcgcccucgagccccugguggaccugcccaucggcaucaacaucacccgcuuccagacccuccuggcccugcaccgguccuaccucacgccgggggacagcagcuccggcuggaccgcgggcgccgccgccuacuacgugggguaccugcagccccgcaccuuccugcucaaguacaacgagaacggcaccaucacggacgcggucgacugcgcccuggacccccugagcgagaccaagugcacccucaaguccuucaccguggagaaggggaucuaccagacgagcaacuuccgggugcagcccaccgaguccaucguccgcuucccgaacaucaccaaccugugccccuucggcgagguguucaacgccacccgguucgccagcgucuacgccuggaaccgcaagcggaucuccaacugcguggcggacuacagcgugcuguacaacuccgccagcuucuccacguucaagugcuacggcgucagccccaccaagcucaacgaccugugcuucaccaacguguacgccgacuccuucgugauccgcggggacgagguccggcagaucgcccccggccagaccgggaagaucgccgacuacaacuacaagcugccggacgacuucacgggcugcgugaucgcguggaacagcaacaaccucgacuccaaggucgggggcaacuacaacuaccuguaccgccuguuccgcaagagcaaccucaagcccuucgagcgggacaucuccaccgagaucuaccaggccggcagcacccccugcaacgggguggagggcuucaacugcuacuucccccugcaguccuacggguuccagccgaccuacggcgugggguaccagcccuaccggguggucgugcugagcuucgagcuccugcacgcccccgccacggugugcggccccaagaaguccaccaaccuggucaagaacaagugcgugaacuucaacuucaacggccucaccgggaccggcgugcugaccgagagcaacaagaaguuccugccguuccagcaguucgggcgcgacaucgccgacacgaccgacgcgguccgcgacccccagacccuggagauccucgacaucacccccugcagcuucggcgggguguccgugaucacgccgggcaccaacaccagcaaccaggucgccgugcuguaccagggcgugaacugcaccgagguccccguggccauccacgccgaccagcugacgcccaccuggcggguguacuccaccggcagcaacgucuuccagacccgcgccgggugccucaucggcgcggagcacgugaacaacuccuacgagugcgacauccccaucggggccggcaucugcgccagcuaccagacgcagaccaacuccccgcggcgcgcccggagcguggcgucccagagcaucaucgccuacaccaugucccugggcgccgagaacagcgucgccuacuccaacaacagcaucgccauccccaccaacuucacgaucuccgugaccaccgagauccugcccgugagcaugaccaagacgagcgucgacugcaccauguacaucugcggggacuccaccgagugcagcaaccuccugcugcaguacggcuccuucugcacccagcucaaccgcgcgcugacggggaucgccguggagcaggacaagaacacccaggagguguucgcccaggucaagcagaucuacaagacgcccccgaucaaggacuucggcggguucaacuucagccagauccugcccgaccccuccaagcccagcaagcgguccuucaucgaggaccuccuguucaacaaggugacccuggccgacgccggcuucaucaagcaguacggcgacugccucggggacaucgcggcccgcgaccugaucugcgcccagaaguucaacggccugaccgugcucccgccccugcugaccgacgagaugaucgcccaguacaccagcgcccuccuggcggggaccaucacguccggcuggaccuucggggccggcgccgcccugcagauccccuucgcgaugcagauggccuaccgguucaacggcaucggggucacccagaacgugcucuacgagaaccagaagcugaucgccaaccaguucaacagcgccaucggcaagauccaggacucccugagcuccaccgccagcgcgcucgggaagcugcaggacguggucaaccagaacgcccaggcccugaacacgcucgugaagcagcuguccagcaacuucggcgccaucuccagcgugcugaacgacauccucucccgccuggacccgcccgaggccgaggugcagaucgaccggcugaucaccgggcgccuccagagccugcagaccuacgugacccagcagcugauccgggcggccgagauccgcgccagcgccaaccucgccgcgaccaagauguccgagugcguccugggccagagcaagcggguggacuucugcggcaagggguaccaccugauguccuucccccagagcgccccgcacggcguggucuuccuccacgugacguacguccccgcccaggagaagaacuucaccaccgcccccgcgaucugccacgacgggaaggcccacuucccccgcgagggcguguucguguccaacgggacccacugguucgucacgcagcggaacuucuacgagccgcagaucaucaccaccgacaacaccuucgugagcggcaacugcgacguggucaucggcaucgugaacaacacgguguacgacccccugcagcccgagcuggacuccuucaaggaggagcucgacaaguacuucaagaaccacaccagccccgacgucgaccugggggacaucuccggcaucaacgccagcguggugaacauccagaaggagaucgaccgccugaacgaggucgccaagaaccucaacgagucccugaucgaccugcaggagcucgggaaguacgagcaguacaucaaguggccgugguacaucuggcugggcuucaucgccggccugaucgcgaucgugauggugaccaucaugcucugcugcaugaccagcugcugcuccugccugaaggggugcugcagcugcggcuccugcugcaaguucgacgaggacgacagcgagcccguccugaagggggugaagcuccacuacacgugaggacuaguuauaagacugacuagcccgaugggccucccaacgggcccuccuccccuccuugcaccgagauuaauaaaaaaaaaaaaaaaaaaaaaaaaaaaaaaaaaaaaaaaaaaaaaaaaaaaaaaaaaaaaaaaaaaaaaaaaaaaaaaaaaaaaaaaaaaaaaaaaaaaa

SEQ ID NO: 25503 - RNA, 4005 nt, Artificial Sequence
  SARS-CoV-2/Wuhan/WIV05/2019__EPI_ISL_402128 spike protein mRNA gc (1-1273)(K986P_V987P_H69del_V70del_D614G)
aggagaaagcuuaccauguucguguuccugguccuccugccccuggugagcucccagugcgugaaccucaccacccgcacgcagcugccgcccgccuacaccaacagcuucacccggggcgucuacuaccccgacaagguguuccgcuccagcgugcugcacuccacccaggaccucuuccugcccuucuucagcaacgucacgugguuccacgccaucuccgggaccaacggcaccaagcgguucgacaacccggugcugcccuucaacgacggggucuacuucgcgagcaccgagaaguccaacaucauccgcggcuggaucuucgggacgacccucgacagcaagacccagucccugcugaucgugaacaacgccaccaacguggucaucaaggugugcgaguuccaguucugcaacgaccccuuccucggcguguacuaccacaagaacaacaagagcuggauggaguccgaguuccgggucuacagcuccgccaacaacugcacguucgaguacgugagccagcccuuccugauggaccuggagggcaagcaggggaacuucaagaaccuccgcgaguucguguucaagaacaucgacggcuacuucaagaucuacuccaagcacaccccgaucaaccugguccgggaccugccccagggguucagcgcccucgagccccugguggaccugcccaucggcaucaacaucacccgcuuccagacccuccuggcccugcaccgguccuaccucacgccgggggacagcagcuccggcuggaccgcgggcgccgccgccuacuacgugggguaccugcagccccgcaccuuccugcucaaguacaacgagaacggcaccaucacggacgcggucgacugcgcccuggacccccugagcgagaccaagugcacccucaaguccuucaccguggagaaggggaucuaccagacgagcaacuuccgggugcagcccaccgaguccaucguccgcuucccgaacaucaccaaccugugccccuucggcgagguguucaacgccacccgguucgccagcgucuacgccuggaaccgcaagcggaucuccaacugcguggcggacuacagcgugcuguacaacuccgccagcuucuccacguucaagugcuacggcgucagccccaccaagcucaacgaccugugcuucaccaacguguacgccgacuccuucgugauccgcggggacgagguccggcagaucgcccccggccagaccgggaagaucgccgacuacaacuacaagcugccggacgacuucacgggcugcgugaucgcguggaacagcaacaaccucgacuccaaggucgggggcaacuacaacuaccuguaccgccuguuccgcaagagcaaccucaagcccuucgagcgggacaucuccaccgagaucuaccaggccggcagcacccccugcaacgggguggagggcuucaacugcuacuucccccugcaguccuacggguuccagccgaccaacggcgugggguaccagcccuaccggguggucgugcugagcuucgagcuccugcacgcccccgccacggugugcggccccaagaaguccaccaaccuggucaagaacaagugcgugaacuucaacuucaacggccucaccgggaccggcgugcugaccgagagcaacaagaaguuccugccguuccagcaguucgggcgcgacaucgccgacacgaccgacgcgguccgcgacccccagacccuggagauccucgacaucacccccugcagcuucggcgggguguccgugaucacgccgggcaccaacaccagcaaccaggucgccgugcuguaccagggcgugaacugcaccgagguccccguggccauccacgccgaccagcugacgcccaccuggcggguguacuccaccggcagcaacgucuuccagacccgcgccgggugccucaucggcgcggagcacgugaacaacuccuacgagugcgacauccccaucggggccggcaucugcgccagcuaccagacgcagaccaacuccccgcggcgcgcccggagcguggcgucccagagcaucaucgccuacaccaugucccugggcgccgagaacagcgucgccuacuccaacaacagcaucgccauccccaccaacuucacgaucuccgugaccaccgagauccugcccgugagcaugaccaagacgagcgucgacugcaccauguacaucugcggggacuccaccgagugcagcaaccuccugcugcaguacggcuccuucugcacccagcucaaccgcgcgcugacggggaucgccguggagcaggacaagaacacccaggagguguucgcccaggucaagcagaucuacaagacgcccccgaucaaggacuucggcggguucaacuucagccagauccugcccgaccccuccaagcccagcaagcgguccuucaucgaggaccuccuguucaacaaggugacccuggccgacgccggcuucaucaagcaguacggcgacugccucggggacaucgcggcccgcgaccugaucugcgcccagaaguucaacggccugaccgugcucccgccccugcugaccgacgagaugaucgcccaguacaccagcgcccuccuggcggggaccaucacguccggcuggaccuucggggccggcgccgcccugcagauccccuucgcgaugcagauggccuaccgguucaacggcaucggggucacccagaacgugcucuacgagaaccagaagcugaucgccaaccaguucaacagcgccaucggcaagauccaggacucccugagcuccaccgccagcgcgcucgggaagcugcaggacguggucaaccagaacgcccaggcccugaacacgcucgugaagcagcuguccagcaacuucggcgccaucuccagcgugcugaacgacauccucucccgccuggacccgcccgaggccgaggugcagaucgaccggcugaucaccgggcgccuccagagccugcagaccuacgugacccagcagcugauccgggcggccgagauccgcgccagcgccaaccucgccgcgaccaagauguccgagugcguccugggccagagcaagcggguggacuucugcggcaagggguaccaccugauguccuucccccagagcgccccgcacggcguggucuuccuccacgugacguacguccccgcccaggagaagaacuucaccaccgcccccgcgaucugccacgacgggaaggcccacuucccccgcgagggcguguucguguccaacgggacccacugguucgucacgcagcggaacuucuacgagccgcagaucaucaccaccgacaacaccuucgugagcggcaacugcgacguggucaucggcaucgugaacaacacgguguacgacccccugcagcccgagcuggacuccuucaaggaggagcucgacaaguacuucaagaaccacaccagccccgacgucgaccugggggacaucuccggcaucaacgccagcguggugaacauccagaaggagaucgaccgccugaacgaggucgccaagaaccucaacgagucccugaucgaccugcaggagcucgggaaguacgagcaguacaucaaguggccgugguacaucuggcugggcuucaucgccggccugaucgcgaucgugauggugaccaucaugcucugcugcaugaccagcugcugcuccugccugaaggggugcugcagcugcggcuccugcugcaaguucgacgaggacgacagcgagcccguccugaagggggugaagcuccacuacacgugaggacuaguuauaagacugacuagcccgaugggccucccaacgggcccuccuccccuccuugcaccgagauuaauaaaaaaaaaaaaaaaaaaaaaaaaaaaaaaaaaaaaaaaaaaaaaaaaaaaaaaaaaaaaaaaaaaaaaaaaaaaaaaaaaaaaaaaaaaaaaaaaaaaa

SEQ ID NO: 25504 - RNA, 4011 nt, Artificial Sequence
  SARS-CoV-2/Wuhan/WIV05/2019__EPI_ISL_402128 spike protein mRNA gc (1-1273)(K986P_V987P_Y453F_D614G)
aggagaaagcuuaccauguucguguuccugguccuccugccccuggugagcucccagugcgugaaccucaccacccgcacgcagcugccgcccgccuacaccaacagcuucacccggggcgucuacuaccccgacaagguguuccgcuccagcgugcugcacuccacccaggaccucuuccugcccuucuucagcaacgucacgugguuccacgccauccacguguccgggaccaacggcaccaagcgguucgacaacccggugcugcccuucaacgacggggucuacuucgcgagcaccgagaaguccaacaucauccgcggcuggaucuucgggacgacccucgacagcaagacccagucccugcugaucgugaacaacgccaccaacguggucaucaaggugugcgaguuccaguucugcaacgaccccuuccucggcguguacuaccacaagaacaacaagagcuggauggaguccgaguuccgggucuacagcuccgccaacaacugcacguucgaguacgugagccagcccuuccugauggaccuggagggcaagcaggggaacuucaagaaccuccgcgaguucguguucaagaacaucgacggcuacuucaagaucuacuccaagcacaccccgaucaaccugguccgggaccugccccagggguucagcgcccucgagccccugguggaccugcccaucggcaucaacaucacccgcuuccagacccuccuggcccugcaccgguccuaccucacgccgggggacagcagcuccggcuggaccgcgggcgccgccgccuacuacgugggguaccugcagccccgcaccuuccugcucaaguacaacgagaacggcaccaucacggacgcggucgacugcgcccuggacccccugagcgagaccaagugcacccucaaguccuucaccguggagaaggggaucuaccagacgagcaacuuccgggugcagcccaccgaguccaucguccgcuucccgaacaucaccaaccugugccccuucggcgagguguucaacgccacccgguucgccagcgucuacgccuggaaccgcaagcggaucuccaacugcguggcggacuacagcgugcuguacaacuccgccagcuucuccacguucaagugcuacggcgucagccccaccaagcucaacgaccugugcuucaccaacguguacgccgacuccuucgugauccgcggggacgagguccggcagaucgcccccggccagaccgggaagaucgccgacuacaacuacaagcugccggacgacuucacgggcugcgugaucgcguggaacagcaacaaccucgacuccaaggucgggggcaacuacaacuaccuguuccgccuguuccgcaagagcaaccucaagcccuucgagcgggacaucuccaccgagaucuaccaggccggcagcacccccugcaacgggguggagggcuucaacugcuacuucccccugcaguccuacggguuccagccgaccaacggcgugggguaccagcccuaccggguggucgugcugagcuucgagcuccugcacgcccccgccacggugugcggccccaagaaguccaccaaccuggucaagaacaagugcgugaacuucaacuucaacggccucaccgggaccggcgugcugaccgagagcaacaagaaguuccugccguuccagcaguucgggcgcgacaucgccgacacgaccgacgcgguccgcgacccccagacccuggagauccucgacaucacccccugcagcuucggcgggguguccgugaucacgccgggcaccaacaccagcaaccaggucgccgugcuguaccagggcgugaacugcaccgagguccccguggccauccacgccgaccagcugacgcccaccuggcggguguacuccaccggcagcaacgucuuccagacccgcgccgggugccucaucggcgcggagcacgugaacaacuccuacgagugcgacauccccaucggggccggcaucugcgccagcuaccagacgcagaccaacuccccgcggcgcgcccggagcguggcgucccagagcaucaucgccuacaccaugucccugggcgccgagaacagcgucgccuacuccaacaacagcaucgccauccccaccaacuucacgaucuccgugaccaccgagauccugcccgugagcaugaccaagacgagcgucgacugcaccauguacaucugcggggacuccaccgagugcagcaaccuccugcugcaguacggcuccuucugcacccagcucaaccgcgcgcugacggggaucgccguggagcaggacaagaacacccaggagguguucgcccaggucaagcagaucuacaagacgcccccgaucaaggacuucggcggguucaacuucagccagauccugcccgaccccuccaagcccagcaagcgguccuucaucgaggaccuccuguucaacaaggugacccuggccgacgccggcuucaucaagcaguacggcgacugccucggggacaucgcggcccgcgaccugaucugcgcccagaaguucaacggccugaccgugcucccgccccugcugaccgacgagaugaucgcccaguacaccagcgcccuccuggcggggaccaucacguccggcuggaccuucggggccggcgccgcccugcagauccccuucgcgaugcagauggccuaccgguucaacggcaucggggucacccagaacgugcucuacgagaaccagaagcugaucgccaaccaguucaacagcgccaucggcaagauccaggacucccugagcuccaccgccagcgcgcucgggaagcugcaggacguggucaaccagaacgcccaggcccugaacacgcucgugaagcagcuguccagcaacuucggcgccaucuccagcgugcugaacgacauccucucccgccuggacccgcccgaggccgaggugcagaucgaccggcugaucaccgggcgccuccagagccugcagaccuacgugacccagcagcugauccgggcggccgagauccgcgccagcgccaaccucgccgcgaccaagauguccgagugcguccugggccagagcaagcggguggacuucugcggcaagggguaccaccugauguccuucccccagagcgccccgcacggcguggucuuccuccacgugacguacguccccgcccaggagaagaacuucaccaccgcccccgcgaucugccacgacgggaaggcccacuucccccgcgagggcguguucguguccaacgggacccacugguucgucacgcagcggaacuucuacgagccgcagaucaucaccaccgacaacaccuucgugagcggcaacugcgacguggucaucggcaucgugaacaacacgguguacgacccccugcagcccgagcuggacuccuucaaggaggagcucgacaaguacuucaagaaccacaccagccccgacgucgaccugggggacaucuccggcaucaacgccagcguggugaacauccagaaggagaucgaccgccugaacgaggucgccaagaaccucaacgagucccugaucgaccugcaggagcucgggaaguacgagcaguacaucaaguggccgugguacaucuggcugggcuucaucgccggccugaucgcgaucgugauggugaccaucaugcucugcugcaugaccagcugcugcuccugccugaaggggugcugcagcugcggcuccugcugcaaguucgacgaggacgacagcgagcccguccugaagggggugaagcuccacuacacgugaggacuaguuauaagacugacuagcccgaugggccucccaacgggcccuccuccccuccuugcaccgagauuaauaaaaaaaaaaaaaaaaaaaaaaaaaaaaaaaaaaaaaaaaaaaaaaaaaaaaaaaaaaaaaaaaaaaaaaaaaaaaaaaaaaaaaaaaaaaaaaaaaaaa

SEQ ID NO: 25505 - RNA, 4011 nt, Artificial Sequence
  SARS-CoV-2/Wuhan/WIV05/2019__EPI_ISL_402128 spike protein mRNA gc (1-1273)(K986P_V987P_D614G_I692V)
aggagaaagcuuaccauguucguguuccugguccuccugccccuggugagcucccagugcgugaaccucaccacccgcacgcagcugccgcccgccuacaccaacagcuucacccggggcgucuacuaccccgacaagguguuccgcuccagcgugcugcacuccacccaggaccucuuccugcccuucuucagcaacgucacgugguuccacgccauccacguguccgggaccaacggcaccaagcgguucgacaacccggugcugcccuucaacgacggggucuacuucgcgagcaccgagaaguccaacaucauccgcggcuggaucuucgggacgacccucgacagcaagacccagucccugcugaucgugaacaacgccaccaacguggucaucaaggugugcgaguuccaguucugcaacgaccccuuccucggcguguacuaccacaagaacaacaagagcuggauggaguccgaguuccgggucuacagcuccgccaacaacugcacguucgaguacgugagccagcccuuccugauggaccuggagggcaagcaggggaacuucaagaaccuccgcgaguucguguucaagaacaucgacggcuacuucaagaucuacuccaagcacaccccgaucaaccugguccgggaccugccccagggguucagcgcccucgagccccugguggaccugcccaucggcaucaacaucacccgcuuccagacccuccuggcccugcaccgguccuaccucacgccgggggacagcagcuccggcuggaccgcgggcgccgccgccuacuacgugggguaccugcagccccgcaccuuccugcucaaguacaacgagaacggcaccaucacggacgcggucgacugcgcccuggacccccugagcgagaccaagugcacccucaaguccuucaccguggagaaggggaucuaccagacgagcaacuuccgggugcagcccaccgaguccaucguccgcuucccgaacaucaccaaccugugccccuucggcgagguguucaacgccacccgguucgccagcgucuacgccuggaaccgcaagcggaucuccaacugcguggcggacuacagcgugcuguacaacuccgccagcuucuccacguucaagugcuacggcgucagccccaccaagcucaacgaccugugcuucaccaacguguacgccgacuccuucgugauccgcggggacgagguccggcagaucgcccccggccagaccgggaagaucgccgacuacaacuacaagcugccggacgacuucacgggcugcgugaucgcguggaacagcaacaaccucgacuccaaggucgggggcaacuacaacuaccuguaccgccuguuccgcaagagcaaccucaagcccuucgagcgggacaucuccaccgagaucuaccaggccggcagcacccccugcaacgggguggagggcuucaacugcuacuucccccugcaguccuacggguuccagccgaccaacggcgugggguaccagcccuaccggguggucgugcugagcuucgagcuccugcacgcccccgccacggugugcggccccaagaaguccaccaaccuggucaagaacaagugcgugaacuucaacuucaacggccucaccgggaccggcgugcugaccgagagcaacaagaaguuccugccguuccagcaguucgggcgcgacaucgccgacacgaccgacgcgguccgcgacccccagacccuggagauccucgacaucacccccugcagcuucggcgggguguccgugaucacgccgggcaccaacaccagcaaccaggucgccgugcuguaccagggcgugaacugcaccgagguccccguggccauccacgccgaccagcugacgcccaccuggcggguguacuccaccggcagcaacgucuuccagacccgcgccgggugccucaucggcgcggagcacgugaacaacuccuacgagugcgacauccccaucggggccggcaucugcgccagcuaccagacgcagaccaacuccccgcggcgcgcccggagcguggcgucccagagcgucaucgccuacaccaugucccugggcgccgagaacagcgucgccuacuccaacaacagcaucgccauccccaccaacuucacgaucuccgugaccaccgagauccugcccgugagcaugaccaagacgagcgucgacugcaccauguacaucugcggggacuccaccgagugcagcaaccuccugcugcaguacggcuccuucugcacccagcucaaccgcgcgcugacggggaucgccguggagcaggacaagaacacccaggagguguucgcccaggucaagcagaucuacaagacgcccccgaucaaggacuucggcggguucaacuucagccagauccugcccgaccccuccaagcccagcaagcgguccuucaucgaggaccuccuguucaacaaggugacccuggccgacgccggcuucaucaagcaguacggcgacugccucggggacaucgcggcccgcgaccugaucugcgcccagaaguucaacggccugaccgugcucccgccccugcugaccgacgagaugaucgcccaguacaccagcgcccuccuggcggggaccaucacguccggcuggaccuucggggccggcgccgcccugcagauccccuucgcgaugcagauggccuaccgguucaacggcaucggggucacccagaacgugcucuacgagaaccagaagcugaucgccaaccaguucaacagcgccaucggcaagauccaggacucccugagcuccaccgccagcgcgcucgggaagcugcaggacguggucaaccagaacgcccaggcccugaacacgcucgugaagcagcuguccagcaacuucggcgccaucuccagcgugcugaacgacauccucucccgccuggacccgcccgaggccgaggugcagaucgaccggcugaucaccgggcgccuccagagccugcagaccuacgugacccagcagcugauccgggcggccgagauccgcgccagcgccaaccucgccgcgaccaagauguccgagugcguccugggccagagcaagcggguggacuucugcggcaagggguaccaccugauguccuucccccagagcgccccgcacggcguggucuuccuccacgugacguacguccccgcccaggagaagaacuucaccaccgcccccgcgaucugccacgacgggaaggcccacuucccccgcgagggcguguucguguccaacgggacccacugguucgucacgcagcggaacuucuacgagccgcagaucaucaccaccgacaacaccuucgugagcggcaacugcgacguggucaucggcaucgugaacaacacgguguacgacccccugcagcccgagcuggacuccuucaaggaggagcucgacaaguacuucaagaaccacaccagccccgacgucgaccugggggacaucuccggcaucaacgccagcguggugaacauccagaaggagaucgaccgccugaacgaggucgccaagaaccucaacgagucccugaucgaccugcaggagcucgggaaguacgagcaguacaucaaguggccgugguacaucuggcugggcuucaucgccggccugaucgcgaucgugauggugaccaucaugcucugcugcaugaccagcugcugcuccugccugaaggggugcugcagcugcggcuccugcugcaaguucgacgaggacgacagcgagcccguccugaagggggugaagcuccacuacacgugaggacuaguuauaagacugacuagcccgaugggccucccaacgggcccuccuccccuccuugcaccgagauuaauaaaaaaaaaaaaaaaaaaaaaaaaaaaaaaaaaaaaaaaaaaaaaaaaaaaaaaaaaaaaaaaaaaaaaaaaaaaaaaaaaaaaaaaaaaaaaaaaaaaa

SEQ ID NO: 25506 - RNA, 4011 nt, Artificial Sequence
  SARS-CoV-2/Wuhan/WIV05/2019__EPI_ISL_402128 spike protein mRNA gc (1-1273)(K986P_V987P_D614G_M1229I)
aggagaaagcuuaccauguucguguuccugguccuccugccccuggugagcucccagugcgugaaccucaccacccgcacgcagcugccgcccgccuacaccaacagcuucacccggggcgucuacuaccccgacaagguguuccgcuccagcgugcugcacuccacccaggaccucuuccugcccuucuucagcaacgucacgugguuccacgccauccacguguccgggaccaacggcaccaagcgguucgacaacccggugcugcccuucaacgacggggucuacuucgcgagcaccgagaaguccaacaucauccgcggcuggaucuucgggacgacccucgacagcaagacccagucccugcugaucgugaacaacgccaccaacguggucaucaaggugugcgaguuccaguucugcaacgaccccuuccucggcguguacuaccacaagaacaacaagagcuggauggaguccgaguuccgggucuacagcuccgccaacaacugcacguucgaguacgugagccagcccuuccugauggaccuggagggcaagcaggggaacuucaagaaccuccgcgaguucguguucaagaacaucgacggcuacuucaagaucuacuccaagcacaccccgaucaaccugguccgggaccugccccagggguucagcgcccucgagccccugguggaccugcccaucggcaucaacaucacccgcuuccagacccuccuggcccugcaccgguccuaccucacgccgggggacagcagcuccggcuggaccgcgggcgccgccgccuacuacgugggguaccugcagccccgcaccuuccugcucaaguacaacgagaacggcaccaucacggacgcggucgacugcgcccuggacccccugagcgagaccaagugcacccucaaguccuucaccguggagaaggggaucuaccagacgagcaacuuccgggugcagcccaccgaguccaucguccgcuucccgaacaucaccaaccugugccccuucggcgagguguucaacgccacccgguucgccagcgucuacgccuggaaccgcaagcggaucuccaacugcguggcggacuacagcgugcuguacaacuccgccagcuucuccacguucaagugcuacggcgucagccccaccaagcucaacgaccugugcuucaccaacguguacgccgacuccuucgugauccgcggggacgagguccggcagaucgcccccggccagaccgggaagaucgccgacuacaacuacaagcugccggacgacuucacgggcugcgugaucgcguggaacagcaacaaccucgacuccaaggucgggggcaacuacaacuaccuguaccgccuguuccgcaagagcaaccucaagcccuucgagcgggacaucuccaccgagaucuaccaggccggcagcacccccugcaacgggguggagggcuucaacugcuacuucccccugcaguccuacggguuccagccgaccaacggcgugggguaccagcccuaccggguggucgugcugagcuucgagcuccugcacgcccccgccacggugugcggccccaagaaguccaccaaccuggucaagaacaagugcgugaacuucaacuucaacggccucaccgggaccggcgugcugaccgagagcaacaagaaguuccugccguuccagcaguucgggcgcgacaucgccgacacgaccgacgcgguccgcgacccccagacccuggagauccucgacaucacccccugcagcuucggcgggguguccgugaucacgccgggcaccaacaccagcaaccaggucgccgugcuguaccagggcgugaacugcaccgagguccccguggccauccacgccgaccagcugacgcccaccuggcggguguacuccaccggcagcaacgucuuccagacccgcgccgggugccucaucggcgcggagcacgugaacaacuccuacgagugcgacauccccaucggggccggcaucugcgccagcuaccagacgcagaccaacuccccgcggcgcgcccggagcguggcgucccagagcaucaucgccuacaccaugucccugggcgccgagaacagcgucgccuacuccaacaacagcaucgccauccccaccaacuucacgaucuccgugaccaccgagauccugcccgugagcaugaccaagacgagcgucgacugcaccauguacaucugcggggacuccaccgagugcagcaaccuccugcugcaguacggcuccuucugcacccagcucaaccgcgcgcugacggggaucgccguggagcaggacaagaacacccaggagguguucgcccaggucaagcagaucuacaagacgcccccgaucaaggacuucggcggguucaacuucagccagauccugcccgaccccuccaagcccagcaagcgguccuucaucgaggaccuccuguucaacaaggugacccuggccgacgccggcuucaucaagcaguacggcgacugccucggggacaucgcggcccgcgaccugaucugcgcccagaaguucaacggccugaccgugcucccgccccugcugaccgacgagaugaucgcccaguacaccagcgcccuccuggcggggaccaucacguccggcuggaccuucggggccggcgccgcccugcagauccccuucgcgaugcagauggccuaccgguucaacggcaucggggucacccagaacgugcucuacgagaaccagaagcugaucgccaaccaguucaacagcgccaucggcaagauccaggacucccugagcuccaccgccagcgcgcucgggaagcugcaggacguggucaaccagaacgcccaggcccugaacacgcucgugaagcagcuguccagcaacuucggcgccaucuccagcgugcugaacgacauccucucccgccuggacccgcccgaggccgaggugcagaucgaccggcugaucaccgggcgccuccagagccugcagaccuacgugacccagcagcugauccgggcggccgagauccgcgccagcgccaaccucgccgcgaccaagauguccgagugcguccugggccagagcaagcggguggacuucugcggcaagggguaccaccugauguccuucccccagagcgccccgcacggcguggucuuccuccacgugacguacguccccgcccaggagaagaacuucaccaccgcccccgcgaucugccacgacgggaaggcccacuucccccgcgagggcguguucguguccaacgggacccacugguucgucacgcagcggaacuucuacgagccgcagaucaucaccaccgacaacaccuucgugagcggcaacugcgacguggucaucggcaucgugaacaacacgguguacgacccccugcagcccgagcuggacuccuucaaggaggagcucgacaaguacuucaagaaccacaccagccccgacgucgaccugggggacaucuccggcaucaacgccagcguggugaacauccagaaggagaucgaccgccugaacgaggucgccaagaaccucaacgagucccugaucgaccugcaggagcucgggaaguacgagcaguacaucaaguggccgugguacaucuggcugggcuucaucgccggccugaucgcgaucgugaucgugaccaucaugcucugcugcaugaccagcugcugcuccugccugaaggggugcugcagcugcggcuccugcugcaaguucgacgaggacgacagcgagcccguccugaagggggugaagcuccacuacacgugaggacuaguuauaagacugacuagcccgaugggccucccaacgggcccuccuccccuccuugcaccgagauuaauaaaaaaaaaaaaaaaaaaaaaaaaaaaaaaaaaaaaaaaaaaaaaaaaaaaaaaaaaaaaaaaaaaaaaaaaaaaaaaaaaaaaaaaaaaaaaaaaaaaa

SEQ ID NO: 25507 - RNA, 4005 nt, Artificial Sequence
  SARS-CoV-2/Wuhan/WIV05/2019__EPI_ISL_402128 spike protein mRNA gc (1-1273)(K986P_V987P_H69del_V70del_A222V_Y453F_S477N_D614G_I692V)
aggagaaagcuuaccauguucguguuccugguccuccugccccuggugagcucccagugcgugaaccucaccacccgcacgcagcugccgcccgccuacaccaacagcuucacccggggcgucuacuaccccgacaagguguuccgcuccagcgugcugcacuccacccaggaccucuuccugcccuucuucagcaacgucacgugguuccacgccaucuccgggaccaacggcaccaagcgguucgacaacccggugcugcccuucaacgacggggucuacuucgcgagcaccgagaaguccaacaucauccgcggcuggaucuucgggacgacccucgacagcaagacccagucccugcugaucgugaacaacgccaccaacguggucaucaaggugugcgaguuccaguucugcaacgaccccuuccucggcguguacuaccacaagaacaacaagagcuggauggaguccgaguuccgggucuacagcuccgccaacaacugcacguucgaguacgugagccagcccuuccugauggaccuggagggcaagcaggggaacuucaagaaccuccgcgaguucguguucaagaacaucgacggcuacuucaagaucuacuccaagcacaccccgaucaaccugguccgggaccugccccagggguucagcguccucgagccccugguggaccugcccaucggcaucaacaucacccgcuuccagacccuccuggcccugcaccgguccuaccucacgccgggggacagcagcuccggcuggaccgcgggcgccgccgccuacuacgugggguaccugcagccccgcaccuuccugcucaaguacaacgagaacggcaccaucacggacgcggucgacugcgcccuggacccccugagcgagaccaagugcacccucaaguccuucaccguggagaaggggaucuaccagacgagcaacuuccgggugcagcccaccgaguccaucguccgcuucccgaacaucaccaaccugugccccuucggcgagguguucaacgccacccgguucgccagcgucuacgccuggaaccgcaagcggaucuccaacugcguggcggacuacagcgugcuguacaacuccgccagcuucuccacguucaagugcuacggcgucagccccaccaagcucaacgaccugugcuucaccaacguguacgccgacuccuucgugauccgcggggacgagguccggcagaucgcccccggccagaccgggaagaucgccgacuacaacuacaagcugccggacgacuucacgggcugcgugaucgcguggaacagcaacaaccucgacuccaaggucgggggcaacuacaacuaccuguuccgccuguuccgcaagagcaaccucaagcccuucgagcgggacaucuccaccgagaucuaccaggccggcaacacccccugcaacgggguggagggcuucaacugcuacuucccccugcaguccuacggguuccagccgaccaacggcgugggguaccagcccuaccggguggucgugcugagcuucgagcuccugcacgcccccgccacggugugcggccccaagaaguccaccaaccuggucaagaacaagugcgugaacuucaacuucaacggccucaccgggaccggcgugcugaccgagagcaacaagaaguuccugccguuccagcaguucgggcgcgacaucgccgacacgaccgacgcgguccgcgacccccagacccuggagauccucgacaucacccccugcagcuucggcgggguguccgugaucacgccgggcaccaacaccagcaaccaggucgccgugcuguaccagggcgugaacugcaccgagguccccguggccauccacgccgaccagcugacgcccaccuggcggguguacuccaccggcagcaacgucuuccagacccgcgccgggugccucaucggcgcggagcacgugaacaacuccuacgagugcgacauccccaucggggccggcaucugcgccagcuaccagacgcagaccaacuccccgcggcgcgcccggagcguggcgucccagagcgucaucgccuacaccaugucccugggcgccgagaacagcgucgccuacuccaacaacagcaucgccauccccaccaacuucacgaucuccgugaccaccgagauccugcccgugagcaugaccaagacgagcgucgacugcaccauguacaucugcggggacuccaccgagugcagcaaccuccugcugcaguacggcuccuucugcacccagcucaaccgcgcgcugacggggaucgccguggagcaggacaagaacacccaggagguguucgcccaggucaagcagaucuacaagacgcccccgaucaaggacuucggcggguucaacuucagccagauccugcccgaccccuccaagcccagcaagcgguccuucaucgaggaccuccuguucaacaaggugacccuggccgacgccggcuucaucaagcaguacggcgacugccucggggacaucgcggcccgcgaccugaucugcgcccagaaguucaacggccugaccgugcucccgccccugcugaccgacgagaugaucgcccaguacaccagcgcccuccuggcggggaccaucacguccggcuggaccuucggggccggcgccgcccugcagauccccuucgcgaugcagauggccuaccgguucaacggcaucggggucacccagaacgugcucuacgagaaccagaagcugaucgccaaccaguucaacagcgccaucggcaagauccaggacucccugagcuccaccgccagcgcgcucgggaagcugcaggacguggucaaccagaacgcccaggcccugaacacgcucgugaagcagcuguccagcaacuucggcgccaucuccagcgugcugaacgacauccucucccgccuggacccgcccgaggccgaggugcagaucgaccggcugaucaccgggcgccuccagagccugcagaccuacgugacccagcagcugauccgggcggccgagauccgcgccagcgccaaccucgccgcgaccaagauguccgagugcguccugggccagagcaagcggguggacuucugcggcaagggguaccaccugauguccuucccccagagcgccccgcacggcguggucuuccuccacgugacguacguccccgcccaggagaagaacuucaccaccgcccccgcgaucugccacgacgggaaggcccacuucccccgcgagggcguguucguguccaacgggacccacugguucgucacgcagcggaacuucuacgagccgcagaucaucaccaccgacaacaccuucgugagcggcaacugcgacguggucaucggcaucgugaacaacacgguguacgacccccugcagcccgagcuggacuccuucaaggaggagcucgacaaguacuucaagaaccacaccagccccgacgucgaccugggggacaucuccggcaucaacgccagcguggugaacauccagaaggagaucgaccgccugaacgaggucgccaagaaccucaacgagucccugaucgaccugcaggagcucgggaaguacgagcaguacaucaaguggccgugguacaucuggcugggcuucaucgccggccugaucgcgaucgugauggugaccaucaugcucugcugcaugaccagcugcugcuccugccugaaggggugcugcagcugcggcuccugcugcaaguucgacgaggacgacagcgagcccguccugaagggggugaagcuccacuacacgugaggacuaguuauaagacugacuagcccgaugggccucccaacgggcccuccuccccuccuugcaccgagauuaauaaaaaaaaaaaaaaaaaaaaaaaaaaaaaaaaaaaaaaaaaaaaaaaaaaaaaaaaaaaaaaaaaaaaaaaaaaaaaaaaaaaaaaaaaaaaaaaaaaaa

SEQ ID NO: 25508 - RNA, 4005 nt, Artificial Sequence
  SARS-CoV-2/Wuhan/WIV05/2019__EPI_ISL_402128 spike protein mRNA gc (1-1273)(K986P_V987P_H69del_V70del_Y453F_D614G_I692V_M1229I)
aggagaaagcuuaccauguucguguuccugguccuccugccccuggugagcucccagugcgugaaccucaccacccgcacgcagcugccgcccgccuacaccaacagcuucacccggggcgucuacuaccccgacaagguguuccgcuccagcgugcugcacuccacccaggaccucuuccugcccuucuucagcaacgucacgugguuccacgccaucuccgggaccaacggcaccaagcgguucgacaacccggugcugcccuucaacgacggggucuacuucgcgagcaccgagaaguccaacaucauccgcggcuggaucuucgggacgacccucgacagcaagacccagucccugcugaucgugaacaacgccaccaacguggucaucaaggugugcgaguuccaguucugcaacgaccccuuccucggcguguacuaccacaagaacaacaagagcuggauggaguccgaguuccgggucuacagcuccgccaacaacugcacguucgaguacgugagccagcccuuccugauggaccuggagggcaagcaggggaacuucaagaaccuccgcgaguucguguucaagaacaucgacggcuacuucaagaucuacuccaagcacaccccgaucaaccugguccgggaccugccccagggguucagcgcccucgagccccugguggaccugcccaucggcaucaacaucacccgcuuccagacccuccuggcccugcaccgguccuaccucacgccgggggacagcagcuccggcuggaccgcgggcgccgccgccuacuacgugggguaccugcagccccgcaccuuccugcucaaguacaacgagaacggcaccaucacggacgcggucgacugcgcccuggacccccugagcgagaccaagugcacccucaaguccuucaccguggagaaggggaucuaccagacgagcaacuuccgggugcagcccaccgaguccaucguccgcuucccgaacaucaccaaccugugccccuucggcgagguguucaacgccacccgguucgccagcgucuacgccuggaaccgcaagcggaucuccaacugcguggcggacuacagcgugcuguacaacuccgccagcuucuccacguucaagugcuacggcgucagccccaccaagcucaacgaccugugcuucaccaacguguacgccgacuccuucgugauccgcggggacgagguccggcagaucgcccccggccagaccgggaagaucgccgacuacaacuacaagcugccggacgacuucacgggcugcgugaucgcguggaacagcaacaaccucgacuccaaggucgggggcaacuacaacuaccuguuccgccuguuccgcaagagcaaccucaagcccuucgagcgggacaucuccaccgagaucuaccaggccggcagcacccccugcaacgggguggagggcuucaacugcuacuucccccugcaguccuacggguuccagccgaccaacggcgugggguaccagcccuaccggguggucgugcugagcuucgagcuccugcacgcccccgccacggugugcggccccaagaaguccaccaaccuggucaagaacaagugcgugaacuucaacuucaacggccucaccgggaccggcgugcugaccgagagcaacaagaaguuccugccguuccagcaguucgggcgcgacaucgccgacacgaccgacgcgguccgcgacccccagacccuggagauccucgacaucacccccugcagcuucggcgggguguccgugaucacgccgggcaccaacaccagcaaccaggucgccgugcuguaccagggcgugaacugcaccgagguccccguggccauccacgccgaccagcugacgcccaccuggcggguguacuccaccggcagcaacgucuuccagacccgcgccgggugccucaucggcgcggagcacgugaacaacuccuacgagugcgacauccccaucggggccggcaucugcgccagcuaccagacgcagaccaacuccccgcggcgcgcccggagcguggcgucccagagcgugaucgccuacaccaugucccugggcgccgagaacagcgucgccuacuccaacaacagcaucgccauccccaccaacuucacgaucuccgugaccaccgagauccugcccgugagcaugaccaagacgagcgucgacugcaccauguacaucugcggggacuccaccgagugcagcaaccuccugcugcaguacggcuccuucugcacccagcucaaccgcgcgcugacggggaucgccguggagcaggacaagaacacccaggagguguucgcccaggucaagcagaucuacaagacgcccccgaucaaggacuucggcggguucaacuucagccagauccugcccgaccccuccaagcccagcaagcgguccuucaucgaggaccuccuguucaacaaggugacccuggccgacgccggcuucaucaagcaguacggcgacugccucggggacaucgcggcccgcgaccugaucugcgcccagaaguucaacggccugaccgugcucccgccccugcugaccgacgagaugaucgcccaguacaccagcgcccuccuggcggggaccaucacguccggcuggaccuucggggccggcgccgcccugcagauccccuucgcgaugcagauggccuaccgguucaacggcaucggggucacccagaacgugcucuacgagaaccagaagcugaucgccaaccaguucaacagcgccaucggcaagauccaggacucccugagcuccaccgccagcgcgcucgggaagcugcaggacguggucaaccagaacgcccaggcccugaacacgcucgugaagcagcuguccagcaacuucggcgccaucuccagcgugcugaacgacauccucucccgccuggacccgcccgaggccgaggugcagaucgaccggcugaucaccgggcgccuccagagccugcagaccuacgugacccagcagcugauccgggcggccgagauccgcgccagcgccaaccucgccgcgaccaagauguccgagugcguccugggccagagcaagcggguggacuucugcggcaagggguaccaccugauguccuucccccagagcgccccgcacggcguggucuuccuccacgugacguacguccccgcccaggagaagaacuucaccaccgcccccgcgaucugccacgacgggaaggcccacuucccccgcgagggcguguucguguccaacgggacccacugguucgucacgcagcggaacuucuacgagccgcagaucaucaccaccgacaacaccuucgugagcggcaacugcgacguggucaucggcaucgugaacaacacgguguacgacccccugcagcccgagcuggacuccuucaaggaggagcucgacaaguacuucaagaaccacaccagccccgacgucgaccugggggacaucuccggcaucaacgccagcguggugaacauccagaaggagaucgaccgccugaacgaggucgccaagaaccucaacgagucccugaucgaccugcaggagcucgggaaguacgagcaguacaucaaguggccgugguacaucuggcugggcuucaucgccggccugaucgcgaucgugaucgugaccaucaugcucugcugcaugaccagcugcugcuccugccugaaggggugcugcagcugcggcuccugcugcaaguucgacgaggacgacagcgagcccguccugaagggggugaagcuccacuacacgugaggacuaguuauaagacugacuagcccgaugggccucccaacgggcccuccuccccuccuugcaccgagauuaauaaaaaaaaaaaaaaaaaaaaaaaaaaaaaaaaaaaaaaaaaaaaaaaaaaaaaaaaaaaaaaaaaaaaaaaaaaaaaaaaaaaaaaaaaaaaaaaaaaaa

SEQ ID NO: 25509 - RNA, 4002 nt, Artificial Sequence
  SARS-CoV-2/Wuhan/WIV05/2019__EPI_ISL_402128 spike protein mRNA gc (1-1273)(K986P_V987P_K986P_V987P_H69del_V70del_Y144del_N501Y_A570 D_D614G_P681H_T716I_S982A_D1118H)
aggagaaagcuuaccauguucguguuccugguccuccugccccuggugagcucccagugcgugaaccucaccacccgcacgcagcugccgcccgccuacaccaacagcuucacccggggcgucuacuaccccgacaagguguuccgcuccagcgugcugcacuccacccaggaccucuuccugcccuucuucagcaacgucacgugguuccacgccaucuccgggaccaacggcaccaagcgguucgacaacccggugcugcccuucaacgacggggucuacuucgcgagcaccgagaaguccaacaucauccgcggcuggaucuucgggacgacccucgacagcaagacccagucccugcugaucgugaacaacgccaccaacguggucaucaaggugugcgaguuccaguucugcaacgaccccuuccucggcguguaccacaagaacaacaagagcuggauggaguccgaguuccgggucuacagcuccgccaacaacugcacguucgaguacgugagccagcccuuccugauggaccuggagggcaagcaggggaacuucaagaaccuccgcgaguucguguucaagaacaucgacggcuacuucaagaucuacuccaagcacaccccgaucaaccugguccgggaccugccccagggguucagcgcccucgagccccugguggaccugcccaucggcaucaacaucacccgcuuccagacccuccuggcccugcaccgguccuaccucacgccgggggacagcagcuccggcuggaccgcgggcgccgccgccuacuacgugggguaccugcagccccgcaccuuccugcucaaguacaacgagaacggcaccaucacggacgcggucgacugcgcccuggacccccugagcgagaccaagugcacccucaaguccuucaccguggagaaggggaucuaccagacgagcaacuuccgggugcagcccaccgaguccaucguccgcuucccgaacaucaccaaccugugccccuucggcgagguguucaacgccacccgguucgccagcgucuacgccuggaaccgcaagcggaucuccaacugcguggcggacuacagcgugcuguacaacuccgccagcuucuccacguucaagugcuacggcgucagccccaccaagcucaacgaccugugcuucaccaacguguacgccgacuccuucgugauccgcggggacgagguccggcagaucgcccccggccagaccgggaagaucgccgacuacaacuacaagcugccggacgacuucacgggcugcgugaucgcguggaacagcaacaaccucgacuccaaggucgggggcaacuacaacuaccuguaccgccuguuccgcaagagcaaccucaagcccuucgagcgggacaucuccaccgagaucuaccaggccggcagcacccccugcaacgggguggagggcuucaacugcuacuucccccugcaguccuacggguuccagccgaccuacggcgugggguaccagcccuaccggguggucgugcugagcuucgagcuccugcacgcccccgccacggugugcggccccaagaaguccaccaaccuggucaagaacaagugcgugaacuucaacuucaacggccucaccgggaccggcgugcugaccgagagcaacaagaaguuccugccguuccagcaguucgggcgcgacaucgacgacacgaccgacgcgguccgcgacccccagacccuggagauccucgacaucacccccugcagcuucggcgggguguccgugaucacgccgggcaccaacaccagcaaccaggucgccgugcuguaccagggcgugaacugcaccgagguccccguggccauccacgccgaccagcugacgcccaccuggcggguguacuccaccggcagcaacgucuuccagacccgcgccgggugccucaucggcgcggagcacgugaacaacuccuacgagugcgacauccccaucggggccggcaucugcgccagcuaccagacgcagaccaacucccaccggcgcgcccggagcguggcgucccagagcaucaucgccuacaccaugucccugggcgccgagaacagcgucgccuacuccaacaacagcaucgccauccccaucaacuucacgaucuccgugaccaccgagauccugcccgugagcaugaccaagacgagcgucgacugcaccauguacaucugcggggacuccaccgagugcagcaaccuccugcugcaguacggcuccuucugcacccagcucaaccgcgcgcugacggggaucgccguggagcaggacaagaacacccaggagguguucgcccaggucaagcagaucuacaagacgcccccgaucaaggacuucggcggguucaacuucagccagauccugcccgaccccuccaagcccagcaagcgguccuucaucgaggaccuccuguucaacaaggugacccuggccgacgccggcuucaucaagcaguacggcgacugccucggggacaucgcggcccgcgaccugaucugcgcccagaaguucaacggccugaccgugcucccgccccugcugaccgacgagaugaucgcccaguacaccagcgcccuccuggcggggaccaucacguccggcuggaccuucggggccggcgccgcccugcagauccccuucgcgaugcagauggccuaccgguucaacggcaucggggucacccagaacgugcucuacgagaaccagaagcugaucgccaaccaguucaacagcgccaucggcaagauccaggacucccugagcuccaccgccagcgcgcucgggaagcugcaggacguggucaaccagaacgcccaggcccugaacacgcucgugaagcagcuguccagcaacuucggcgccaucuccagcgugcugaacgacauccucgcccgccuggacccgcccgaggccgaggugcagaucgaccggcugaucaccgggcgccuccagagccugcagaccuacgugacccagcagcugauccgggcggccgagauccgcgccagcgccaaccucgccgcgaccaagauguccgagugcguccugggccagagcaagcggguggacuucugcggcaagggguaccaccugauguccuucccccagagcgccccgcacggcguggucuuccuccacgugacguacguccccgcccaggagaagaacuucaccaccgcccccgcgaucugccacgacgggaaggcccacuucccccgcgagggcguguucguguccaacgggacccacugguucgucacgcagcggaacuucuacgagccgcagaucaucaccacccacaacaccuucgugagcggcaacugcgacguggucaucggcaucgugaacaacacgguguacgacccccugcagcccgagcuggacuccuucaaggaggagcucgacaaguacuucaagaaccacaccagccccgacgucgaccugggggacaucuccggcaucaacgccagcguggugaacauccagaaggagaucgaccgccugaacgaggucgccaagaaccucaacgagucccugaucgaccugcaggagcucgggaaguacgagcaguacaucaaguggccgugguacaucuggcugggcuucaucgccggccugaucgcgaucgugauggugaccaucaugcucugcugcaugaccagcugcugcuccugccugaaggggugcugcagcugcggcuccugcugcaaguucgacgaggacgacagcgagcccguccugaagggggugaagcuccacuacacgugaggacuaguuauaagacugacuagcccgaugggccucccaacgggcccuccuccccuccuugcaccgagauuaauaaaaaaaaaaaaaaaaaaaaaaaaaaaaaaaaaaaaaaaaaaaaaaaaaaaaaaaaaaaaaaaaaaaaaaaaaaaaaaaaaaaaaaaaaaaaaaaaaaaa

SEQ ID NO: 25510 - RNA, 4011 nt, Artificial Sequence
  SARS-CoV-2/Wuhan/WIV05/2019__EPI_ISL_402128 spike protein mRNA gc (1-1273)(K986P_V987P_K986P_V987P_K417N_E484K_N501Y_D614G)
aggagaaagcuuaccauguucguguuccugguccuccugccccuggugagcucccagugcgugaaccucaccacccgcacgcagcugccgcccgccuacaccaacagcuucacccggggcgucuacuaccccgacaagguguuccgcuccagcgugcugcacuccacccaggaccucuuccugcccuucuucagcaacgucacgugguuccacgccauccacguguccgggaccaacggcaccaagcgguucgacaacccggugcugcccuucaacgacggggucuacuucgcgagcaccgagaaguccaacaucauccgcggcuggaucuucgggacgacccucgacagcaagacccagucccugcugaucgugaacaacgccaccaacguggucaucaaggugugcgaguuccaguucugcaacgaccccuuccucggcguguacuaccacaagaacaacaagagcuggauggaguccgaguuccgggucuacagcuccgccaacaacugcacguucgaguacgugagccagcccuuccugauggaccuggagggcaagcaggggaacuucaagaaccuccgcgaguucguguucaagaacaucgacggcuacuucaagaucuacuccaagcacaccccgaucaaccugguccgggaccugccccagggguucagcgcccucgagccccugguggaccugcccaucggcaucaacaucacccgcuuccagacccuccuggcccugcaccgguccuaccucacgccgggggacagcagcuccggcuggaccgcgggcgccgccgccuacuacgugggguaccugcagccccgcaccuuccugcucaaguacaacgagaacggcaccaucacggacgcggucgacugcgcccuggacccccugagcgagaccaagugcacccucaaguccuucaccguggagaaggggaucuaccagacgagcaacuuccgggugcagcccaccgaguccaucguccgcuucccgaacaucaccaaccugugccccuucggcgagguguucaacgccacccgguucgccagcgucuacgccuggaaccgcaagcggaucuccaacugcguggcggacuacagcgugcuguacaacuccgccagcuucuccacguucaagugcuacggcgucagccccaccaagcucaacgaccugugcuucaccaacguguacgccgacuccuucgugauccgcggggacgagguccggcagaucgcccccggccagaccgggaacaucgccgacuacaacuacaagcugccggacgacuucacgggcugcgugaucgcguggaacagcaacaaccucgacuccaaggucgggggcaacuacaacuaccuguaccgccuguuccgcaagagcaaccucaagcccuucgagcgggacaucuccaccgagaucuaccaggccggcagcacccccugcaacggggugaagggcuucaacugcuacuucccccugcaguccuacggguuccagccgaccuacggcgugggguaccagcccuaccggguggucgugcugagcuucgagcuccugcacgcccccgccacggugugcggccccaagaaguccaccaaccuggucaagaacaagugcgugaacuucaacuucaacggccucaccgggaccggcgugcugaccgagagcaacaagaaguuccugccguuccagcaguucgggcgcgacaucgccgacacgaccgacgcgguccgcgacccccagacccuggagauccucgacaucacccccugcagcuucggcgggguguccgugaucacgccgggcaccaacaccagcaaccaggucgccgugcuguaccagggcgugaacugcaccgagguccccguggccauccacgccgaccagcugacgcccaccuggcggguguacuccaccggcagcaacgucuuccagacccgcgccgggugccucaucggcgcggagcacgugaacaacuccuacgagugcgacauccccaucggggccggcaucugcgccagcuaccagacgcagaccaacuccccgcggcgcgcccggagcguggcgucccagagcaucaucgccuacaccaugucccugggcgccgagaacagcgucgccuacuccaacaacagcaucgccauccccaccaacuucacgaucuccgugaccaccgagauccugcccgugagcaugaccaagacgagcgucgacugcaccauguacaucugcggggacuccaccgagugcagcaaccuccugcugcaguacggcuccuucugcacccagcucaaccgcgcgcugacggggaucgccguggagcaggacaagaacacccaggagguguucgcccaggucaagcagaucuacaagacgcccccgaucaaggacuucggcggguucaacuucagccagauccugcccgaccccuccaagcccagcaagcgguccuucaucgaggaccuccuguucaacaaggugacccuggccgacgccggcuucaucaagcaguacggcgacugccucggggacaucgcggcccgcgaccugaucugcgcccagaaguucaacggccugaccgugcucccgccccugcugaccgacgagaugaucgcccaguacaccagcgcccuccuggcggggaccaucacguccggcuggaccuucggggccggcgccgcccugcagauccccuucgcgaugcagauggccuaccgguucaacggcaucggggucacccagaacgugcucuacgagaaccagaagcugaucgccaaccaguucaacagcgccaucggcaagauccaggacucccugagcuccaccgccagcgcgcucgggaagcugcaggacguggucaaccagaacgcccaggcccugaacacgcucgugaagcagcuguccagcaacuucggcgccaucuccagcgugcugaacgacauccucucccgccuggacccgcccgaggccgaggugcagaucgaccggcugaucaccgggcgccuccagagccugcagaccuacgugacccagcagcugauccgggcggccgagauccgcgccagcgccaaccucgccgcgaccaagauguccgagugcguccugggccagagcaagcggguggacuucugcggcaagggguaccaccugauguccuucccccagagcgccccgcacggcguggucuuccuccacgugacguacguccccgcccaggagaagaacuucaccaccgcccccgcgaucugccacgacgggaaggcccacuucccccgcgagggcguguucguguccaacgggacccacugguucgucacgcagcggaacuucuacgagccgcagaucaucaccaccgacaacaccuucgugagcggcaacugcgacguggucaucggcaucgugaacaacacgguguacgacccccugcagcccgagcuggacuccuucaaggaggagcucgacaaguacuucaagaaccacaccagccccgacgucgaccugggggacaucuccggcaucaacgccagcguggugaacauccagaaggagaucgaccgccugaacgaggucgccaagaaccucaacgagucccugaucgaccugcaggagcucgggaaguacgagcaguacaucaaguggccgugguacaucuggcugggcuucaucgccggccugaucgcgaucgugauggugaccaucaugcucugcugcaugaccagcugcugcuccugccugaaggggugcugcagcugcggcuccugcugcaaguucgacgaggacgacagcgagcccguccugaagggggugaagcuccacuacacgugaggacuaguuauaagacugacuagcccgaugggccucccaacgggcccuccuccccuccuugcaccgagauuaauaaaaaaaaaaaaaaaaaaaaaaaaaaaaaaaaaaaaaaaaaaaaaaaaaaaaaaaaaaaaaaaaaaaaaaaaaaaaaaaaaaaaaaaaaaaaaaaaaaaa

SEQ ID NO: 25511 - RNA, 4002 nt, Artificial Sequence
  SARS-CoV-2/Wuhan/WIV05/2019__EPI_ISL_402128 spike protein mRNA gc (1-1273)(K986P_V987P_K986P_V987P_L18F_D80A_D215G_L242del_A243del_ L244del_R246I_K417N_E484K_N501Y_D614G_A701V)
aggagaaagcuuaccauguucguguuccugguccuccugccccuggugagcucccagugcgugaacuucaccacccgcacgcagcugccgcccgccuacaccaacagcuucacccggggcgucuacuaccccgacaagguguuccgcuccagcgugcugcacuccacccaggaccucuuccugcccuucuucagcaacgucacgugguuccacgccauccacguguccgggaccaacggcaccaagcgguucgccaacccggugcugcccuucaacgacggggucuacuucgcgagcaccgagaaguccaacaucauccgcggcuggaucuucgggacgacccucgacagcaagacccagucccugcugaucgugaacaacgccaccaacguggucaucaaggugugcgaguuccaguucugcaacgaccccuuccucggcguguacuaccacaagaacaacaagagcuggauggaguccgaguuccgggucuacagcuccgccaacaacugcacguucgaguacgugagccagcccuuccugauggaccuggagggcaagcaggggaacuucaagaaccuccgcgaguucguguucaagaacaucgacggcuacuucaagaucuacuccaagcacaccccgaucaaccugguccggggccugccccagggguucagcgcccucgagccccugguggaccugcccaucggcaucaacaucacccgcuuccagacccuccacaucuccuaccucacgccgggggacagcagcuccggcuggaccgcgggcgccgccgccuacuacgugggguaccugcagccccgcaccuuccugcucaaguacaacgagaacggcaccaucacggacgcggucgacugcgcccuggacccccugagcgagaccaagugcacccucaaguccuucaccguggagaaggggaucuaccagacgagcaacuuccgggugcagcccaccgaguccaucguccgcuucccgaacaucaccaaccugugccccuucggcgagguguucaacgccacccgguucgccagcgucuacgccuggaaccgcaagcggaucuccaacugcguggcggacuacagcgugcuguacaacuccgccagcuucuccacguucaagugcuacggcgucagccccaccaagcucaacgaccugugcuucaccaacguguacgccgacuccuucgugauccgcggggacgagguccggcagaucgcccccggccagaccgggaacaucgccgacuacaacuacaagcugccggacgacuucacgggcugcgugaucgcguggaacagcaacaaccucgacuccaaggucgggggcaacuacaacuaccuguaccgccuguuccgcaagagcaaccucaagcccuucgagcgggacaucuccaccgagaucuaccaggccggcagcacccccugcaacggggugaagggcuucaacugcuacuucccccugcaguccuacggguuccagccgaccuacggcgugggguaccagcccuaccggguggucgugcugagcuucgagcuccugcacgcccccgccacggugugcggccccaagaaguccaccaaccuggucaagaacaagugcgugaacuucaacuucaacggccucaccgggaccggcgugcugaccgagagcaacaagaaguuccugccguuccagcaguucgggcgcgacaucgccgacacgaccgacgcgguccgcgacccccagacccuggagauccucgacaucacccccugcagcuucggcgggguguccgugaucacgccgggcaccaacaccagcaaccaggucgccgugcuguaccagggcgugaacugcaccgagguccccguggccauccacgccgaccagcugacgcccaccuggcggguguacuccaccggcagcaacgucuuccagacccgcgccgggugccucaucggcgcggagcacgugaacaacuccuacgagugcgacauccccaucggggccggcaucugcgccagcuaccagacgcagaccaacuccccgcggcgcgcccggagcguggcgucccagagcaucaucgccuacaccaugucccugggcguggagaacagcgucgccuacuccaacaacagcaucgccauccccaccaacuucacgaucuccgugaccaccgagauccugcccgugagcaugaccaagacgagcgucgacugcaccauguacaucugcggggacuccaccgagugcagcaaccuccugcugcaguacggcuccuucugcacccagcucaaccgcgcgcugacggggaucgccguggagcaggacaagaacacccaggagguguucgcccaggucaagcagaucuacaagacgcccccgaucaaggacuucggcggguucaacuucagccagauccugcccgaccccuccaagcccagcaagcgguccuucaucgaggaccuccuguucaacaaggugacccuggccgacgccggcuucaucaagcaguacggcgacugccucggggacaucgcggcccgcgaccugaucugcgcccagaaguucaacggccugaccgugcucccgccccugcugaccgacgagaugaucgcccaguacaccagcgcccuccuggcggggaccaucacguccggcuggaccuucggggccggcgccgcccugcagauccccuucgcgaugcagauggccuaccgguucaacggcaucggggucacccagaacgugcucuacgagaaccagaagcugaucgccaaccaguucaacagcgccaucggcaagauccaggacucccugagcuccaccgccagcgcgcucgggaagcugcaggacguggucaaccagaacgcccaggcccugaacacgcucgugaagcagcuguccagcaacuucggcgccaucuccagcgugcugaacgacauccucucccgccuggacccgcccgaggccgaggugcagaucgaccggcugaucaccgggcgccuccagagccugcagaccuacgugacccagcagcugauccgggcggccgagauccgcgccagcgccaaccucgccgcgaccaagauguccgagugcguccugggccagagcaagcggguggacuucugcggcaagggguaccaccugauguccuucccccagagcgccccgcacggcguggucuuccuccacgugacguacguccccgcccaggagaagaacuucaccaccgcccccgcgaucugccacgacgggaaggcccacuucccccgcgagggcguguucguguccaacgggacccacugguucgucacgcagcggaacuucuacgagccgcagaucaucaccaccgacaacaccuucgugagcggcaacugcgacguggucaucggcaucgugaacaacacgguguacgacccccugcagcccgagcuggacuccuucaaggaggagcucgacaaguacuucaagaaccacaccagccccgacgucgaccugggggacaucuccggcaucaacgccagcguggugaacauccagaaggagaucgaccgccugaacgaggucgccaagaaccucaacgagucccugaucgaccugcaggagcucgggaaguacgagcaguacaucaaguggccgugguacaucuggcugggcuucaucgccggccugaucgcgaucgugauggugaccaucaugcucugcugcaugaccagcugcugcuccugccugaaggggugcugcagcugcggcuccugcugcaaguucgacgaggacgacagcgagcccguccugaagggggugaagcuccacuacacgugaggacuaguuauaagacugacuagcccgaugggccucccaacgggcccuccuccccuccuugcaccgagauuaauaaaaaaaaaaaaaaaaaaaaaaaaaaaaaaaaaaaaaaaaaaaaaaaaaaaaaaaaaaaaaaaaaaaaaaaaaaaaaaaaaaaaaaaaaaaaaaaaaaaa

SEQ ID NO: 25512 - RNA, 4011 nt, Artificial Sequence
  SARS-CoV-2/Wuhan/WIV05/2019__EPI_ISL_402128 spike protein mRNA gc (1-1273)(K986P_V987P_K986P_V987P_E484K_D614G)
aggagaaagcuuaccauguucguguuccugguccuccugccccuggugagcucccagugcgugaaccucaccacccgcacgcagcugccgcccgccuacaccaacagcuucacccggggcgucuacuaccccgacaagguguuccgcuccagcgugcugcacuccacccaggaccucuuccugcccuucuucagcaacgucacgugguuccacgccauccacguguccgggaccaacggcaccaagcgguucgacaacccggugcugcccuucaacgacggggucuacuucgcgagcaccgagaaguccaacaucauccgcggcuggaucuucgggacgacccucgacagcaagacccagucccugcugaucgugaacaacgccaccaacguggucaucaaggugugcgaguuccaguucugcaacgaccccuuccucggcguguacuaccacaagaacaacaagagcuggauggaguccgaguuccgggucuacagcuccgccaacaacugcacguucgaguacgugagccagcccuuccugauggaccuggagggcaagcaggggaacuucaagaaccuccgcgaguucguguucaagaacaucgacggcuacuucaagaucuacuccaagcacaccccgaucaaccugguccgggaccugccccagggguucagcgcccucgagccccugguggaccugcccaucggcaucaacaucacccgcuuccagacccuccuggcccugcaccgguccuaccucacgccgggggacagcagcuccggcuggaccgcgggcgccgccgccuacuacgugggguaccugcagccccgcaccuuccugcucaaguacaacgagaacggcaccaucacggacgcggucgacugcgcccuggacccccugagcgagaccaagugcacccucaaguccuucaccguggagaaggggaucuaccagacgagcaacuuccgggugcagcccaccgaguccaucguccgcuucccgaacaucaccaaccugugccccuucggcgagguguucaacgccacccgguucgccagcgucuacgccuggaaccgcaagcggaucuccaacugcguggcggacuacagcgugcuguacaacuccgccagcuucuccacguucaagugcuacggcgucagccccaccaagcucaacgaccugugcuucaccaacguguacgccgacuccuucgugauccgcggggacgagguccggcagaucgcccccggccagaccgggaagaucgccgacuacaacuacaagcugccggacgacuucacgggcugcgugaucgcguggaacagcaacaaccucgacuccaaggucgggggcaacuacaacuaccuguaccgccuguuccgcaagagcaaccucaagcccuucgagcgggacaucuccaccgagaucuaccaggccggcagcacccccugcaacggggugaagggcuucaacugcuacuucccccugcaguccuacggguuccagccgaccaacggcgugggguaccagcccuaccggguggucgugcugagcuucgagcuccugcacgcccccgccacggugugcggccccaagaaguccaccaaccuggucaagaacaagugcgugaacuucaacuucaacggccucaccgggaccggcgugcugaccgagagcaacaagaaguuccugccguuccagcaguucgggcgcgacaucgccgacacgaccgacgcgguccgcgacccccagacccuggagauccucgacaucacccccugcagcuucggcgggguguccgugaucacgccgggcaccaacaccagcaaccaggucgccgugcuguaccagggcgugaacugcaccgagguccccguggccauccacgccgaccagcugacgcccaccuggcggguguacuccaccggcagcaacgucuuccagacccgcgccgggugccucaucggcgcggagcacgugaacaacuccuacgagugcgacauccccaucggggccggcaucugcgccagcuaccagacgcagaccaacuccccgcggcgcgcccggagcguggcgucccagagcaucaucgccuacaccaugucccugggcgccgagaacagcgucgccuacuccaacaacagcaucgccauccccaccaacuucacgaucuccgugaccaccgagauccugcccgugagcaugaccaagacgagcgucgacugcaccauguacaucugcggggacuccaccgagugcagcaaccuccugcugcaguacggcuccuucugcacccagcucaaccgcgcgcugacggggaucgccguggagcaggacaagaacacccaggagguguucgcccaggucaagcagaucuacaagacgcccccgaucaaggacuucggcggguucaacuucagccagauccugcccgaccccuccaagcccagcaagcgguccuucaucgaggaccuccuguucaacaaggugacccuggccgacgccggcuucaucaagcaguacggcgacugccucggggacaucgcggcccgcgaccugaucugcgcccagaaguucaacggccugaccgugcucccgccccugcugaccgacgagaugaucgcccaguacaccagcgcccuccuggcggggaccaucacguccggcuggaccuucggggccggcgccgcccugcagauccccuucgcgaugcagauggccuaccgguucaacggcaucggggucacccagaacgugcucuacgagaaccagaagcugaucgccaaccaguucaacagcgccaucggcaagauccaggacucccugagcuccaccgccagcgcgcucgggaagcugcaggacguggucaaccagaacgcccaggcccugaacacgcucgugaagcagcuguccagcaacuucggcgccaucuccagcgugcugaacgacauccucucccgccuggacccgcccgaggccgaggugcagaucgaccggcugaucaccgggcgccuccagagccugcagaccuacgugacccagcagcugauccgggcggccgagauccgcgccagcgccaaccucgccgcgaccaagauguccgagugcguccugggccagagcaagcggguggacuucugcggcaagggguaccaccugauguccuucccccagagcgccccgcacggcguggucuuccuccacgugacguacguccccgcccaggagaagaacuucaccaccgcccccgcgaucugccacgacgggaaggcccacuucccccgcgagggcguguucguguccaacgggacccacugguucgucacgcagcggaacuucuacgagccgcagaucaucaccaccgacaacaccuucgugagcggcaacugcgacguggucaucggcaucgugaacaacacgguguacgacccccugcagcccgagcuggacuccuucaaggaggagcucgacaaguacuucaagaaccacaccagccccgacgucgaccugggggacaucuccggcaucaacgccagcguggugaacauccagaaggagaucgaccgccugaacgaggucgccaagaaccucaacgagucccugaucgaccugcaggagcucgggaaguacgagcaguacaucaaguggccgugguacaucuggcugggcuucaucgccggccugaucgcgaucgugauggugaccaucaugcucugcugcaugaccagcugcugcuccugccugaaggggugcugcagcugcggcuccugcugcaaguucgacgaggacgacagcgagcccguccugaagggggugaagcuccacuacacgugaggacuaguuauaagacugacuagcccgaugggccucccaacgggcccuccuccccuccuugcaccgagauuaauaaaaaaaaaaaaaaaaaaaaaaaaaaaaaaaaaaaaaaaaaaaaaaaaaaaaaaaaaaaaaaaaaaaaaaaaaaaaaaaaaaaaaaaaaaaaaaaaaaaa

SEQ ID NO: 25513 - RNA, 4011 nt, Artificial Sequence
  SARS-CoV-2/Wuhan/WIV05/2019__EPI_ISL_402128 spike protein mRNA gc (1-1273)(K986P_V987P_K986P_V987P_L18F_T20N_P26S_D138Y_R190S_K417T _E484K_N501Y_D614G_H655Y_T1027I)
aggagaaagcuuaccauguucguguuccugguccuccugccccuggugagcucccagugcgugaacuucaccaaccgcacgcagcugccgagcgccuacaccaacagcuucacccggggcgucuacuaccccgacaagguguuccgcuccagcgugcugcacuccacccaggaccucuuccugcccuucuucagcaacgucacgugguuccacgccauccacguguccgggaccaacggcaccaagcgguucgacaacccggugcugcccuucaacgacggggucuacuucgcgagcaccgagaaguccaacaucauccgcggcuggaucuucgggacgacccucgacagcaagacccagucccugcugaucgugaacaacgccaccaacguggucaucaaggugugcgaguuccaguucugcaacuaccccuuccucggcguguacuaccacaagaacaacaagagcuggauggaguccgaguuccgggucuacagcuccgccaacaacugcacguucgaguacgugagccagcccuuccugauggaccuggagggcaagcaggggaacuucaagaaccucagcgaguucguguucaagaacaucgacggcuacuucaagaucuacuccaagcacaccccgaucaaccugguccgggaccugccccagggguucagcgcccucgagccccugguggaccugcccaucggcaucaacaucacccgcuuccagacccuccuggcccugcaccgguccuaccucacgccgggggacagcagcuccggcuggaccgcgggcgccgccgccuacuacgugggguaccugcagccccgcaccuuccugcucaaguacaacgagaacggcaccaucacggacgcggucgacugcgcccuggacccccugagcgagaccaagugcacccucaaguccuucaccguggagaaggggaucuaccagacgagcaacuuccgggugcagcccaccgaguccaucguccgcuucccgaacaucaccaaccugugccccuucggcgagguguucaacgccacccgguucgccagcgucuacgccuggaaccgcaagcggaucuccaacugcguggcggacuacagcgugcuguacaacuccgccagcuucuccacguucaagugcuacggcgucagccccaccaagcucaacgaccugugcuucaccaacguguacgccgacuccuucgugauccgcggggacgagguccggcagaucgcccccggccagaccgggaccaucgccgacuacaacuacaagcugccggacgacuucacgggcugcgugaucgcguggaacagcaacaaccucgacuccaaggucgggggcaacuacaacuaccuguaccgccuguuccgcaagagcaaccucaagcccuucgagcgggacaucuccaccgagaucuaccaggccggcagcacccccugcaacggggugaagggcuucaacugcuacuucccccugcaguccuacggguuccagccgaccuacggcgugggguaccagcccuaccggguggucgugcugagcuucgagcuccugcacgcccccgccacggugugcggccccaagaaguccaccaaccuggucaagaacaagugcgugaacuucaacuucaacggccucaccgggaccggcgugcugaccgagagcaacaagaaguuccugccguuccagcaguucgggcgcgacaucgccgacacgaccgacgcgguccgcgacccccagacccuggagauccucgacaucacccccugcagcuucggcgggguguccgugaucacgccgggcaccaacaccagcaaccaggucgccgugcuguaccagggcgugaacugcaccgagguccccguggccauccacgccgaccagcugacgcccaccuggcggguguacuccaccggcagcaacgucuuccagacccgcgccgggugccucaucggcgcggaguacgugaacaacuccuacgagugcgacauccccaucggggccggcaucugcgccagcuaccagacgcagaccaacuccccgcggcgcgcccggagcguggcgucccagagcaucaucgccuacaccaugucccugggcgccgagaacagcgucgccuacuccaacaacagcaucgccauccccaccaacuucacgaucuccgugaccaccgagauccugcccgugagcaugaccaagacgagcgucgacugcaccauguacaucugcggggacuccaccgagugcagcaaccuccugcugcaguacggcuccuucugcacccagcucaaccgcgcgcugacggggaucgccguggagcaggacaagaacacccaggagguguucgcccaggucaagcagaucuacaagacgcccccgaucaaggacuucggcggguucaacuucagccagauccugcccgaccccuccaagcccagcaagcgguccuucaucgaggaccuccuguucaacaaggugacccuggccgacgccggcuucaucaagcaguacggcgacugccucggggacaucgcggcccgcgaccugaucugcgcccagaaguucaacggccugaccgugcucccgccccugcugaccgacgagaugaucgcccaguacaccagcgcccuccuggcggggaccaucacguccggcuggaccuucggggccggcgccgcccugcagauccccuucgcgaugcagauggccuaccgguucaacggcaucggggucacccagaacgugcucuacgagaaccagaagcugaucgccaaccaguucaacagcgccaucggcaagauccaggacucccugagcuccaccgccagcgcgcucgggaagcugcaggacguggucaaccagaacgcccaggcccugaacacgcucgugaagcagcuguccagcaacuucggcgccaucuccagcgugcugaacgacauccucucccgccuggacccgcccgaggccgaggugcagaucgaccggcugaucaccgggcgccuccagagccugcagaccuacgugacccagcagcugauccgggcggccgagauccgcgccagcgccaaccucgccgcgaucaagauguccgagugcguccugggccagagcaagcggguggacuucugcggcaagggguaccaccugauguccuucccccagagcgccccgcacggcguggucuuccuccacgugacguacguccccgcccaggagaagaacuucaccaccgcccccgcgaucugccacgacgggaaggcccacuucccccgcgagggcguguucguguccaacgggacccacugguucgucacgcagcggaacuucuacgagccgcagaucaucaccaccgacaacaccuucgugagcggcaacugcgacguggucaucggcaucgugaacaacacgguguacgacccccugcagcccgagcuggacuccuucaaggaggagcucgacaaguacuucaagaaccacaccagccccgacgucgaccugggggacaucuccggcaucaacgccagcguggugaacauccagaaggagaucgaccgccugaacgaggucgccaagaaccucaacgagucccugaucgaccugcaggagcucgggaaguacgagcaguacaucaaguggccgugguacaucuggcugggcuucaucgccggccugaucgcgaucgugauggugaccaucaugcucugcugcaugaccagcugcugcuccugccugaaggggugcugcagcugcggcuccugcugcaaguucgacgaggacgacagcgagcccguccugaagggggugaagcuccacuacacgugaggacuaguuauaagacugacuagcccgaugggccucccaacgggcccuccuccccuccuugcaccgagauuaauaaaaaaaaaaaaaaaaaaaaaaaaaaaaaaaaaaaaaaaaaaaaaaaaaaaaaaaaaaaaaaaaaaaaaaaaaaaaaaaaaaaaaaaaaaaaaaaaaaaa

SEQ ID NO: 25514 - RNA, 4011 nt, Artificial Sequence
  SARS-CoV-2/Wuhan/WIV05/2019__EPI_ISL_402128 spike protein mRNA gc (1-1273)(K986P_V987P_K986P_V987P_S13I_W152C_L452R_D614G)
aggagaaagcuuaccauguucguguuccugguccuccugccccuggugagcauccagugcgugaaccucaccacccgcacgcagcugccgcccgccuacaccaacagcuucacccggggcgucuacuaccccgacaagguguuccgcuccagcgugcugcacuccacccaggaccucuuccugcccuucuucagcaacgucacgugguuccacgccauccacguguccgggaccaacggcaccaagcgguucgacaacccggugcugcccuucaacgacggggucuacuucgcgagcaccgagaaguccaacaucauccgcggcuggaucuucgggacgacccucgacagcaagacccagucccugcugaucgugaacaacgccaccaacguggucaucaaggugugcgaguuccaguucugcaacgaccccuuccucggcguguacuaccacaagaacaacaagagcugcauggaguccgaguuccgggucuacagcuccgccaacaacugcacguucgaguacgugagccagcccuuccugauggaccuggagggcaagcaggggaacuucaagaaccuccgcgaguucguguucaagaacaucgacggcuacuucaagaucuacuccaagcacaccccgaucaaccugguccgggaccugccccagggguucagcgcccucgagccccugguggaccugcccaucggcaucaacaucacccgcuuccagacccuccuggcccugcaccgguccuaccucacgccgggggacagcagcuccggcuggaccgcgggcgccgccgccuacuacgugggguaccugcagccccgcaccuuccugcucaaguacaacgagaacggcaccaucacggacgcggucgacugcgcccuggacccccugagcgagaccaagugcacccucaaguccuucaccguggagaaggggaucuaccagacgagcaacuuccgggugcagcccaccgaguccaucguccgcuucccgaacaucaccaaccugugccccuucggcgagguguucaacgccacccgguucgccagcgucuacgccuggaaccgcaagcggaucuccaacugcguggcggacuacagcgugcuguacaacuccgccagcuucuccacguucaagugcuacggcgucagccccaccaagcucaacgaccugugcuucaccaacguguacgccgacuccuucgugauccgcggggacgagguccggcagaucgcccccggccagaccgggaagaucgccgacuacaacuacaagcugccggacgacuucacgggcugcgugaucgcguggaacagcaacaaccucgacuccaaggucgggggcaacuacaacuaccgcuaccgccuguuccgcaagagcaaccucaagcccuucgagcgggacaucuccaccgagaucuaccaggccggcagcacccccugcaacgggguggagggcuucaacugcuacuucccccugcaguccuacggguuccagccgaccaacggcgugggguaccagcccuaccggguggucgugcugagcuucgagcuccugcacgcccccgccacggugugcggccccaagaaguccaccaaccuggucaagaacaagugcgugaacuucaacuucaacggccucaccgggaccggcgugcugaccgagagcaacaagaaguuccugccguuccagcaguucgggcgcgacaucgccgacacgaccgacgcgguccgcgacccccagacccuggagauccucgacaucacccccugcagcuucggcgggguguccgugaucacgccgggcaccaacaccagcaaccaggucgccgugcuguaccagggcgugaacugcaccgagguccccguggccauccacgccgaccagcugacgcccaccuggcggguguacuccaccggcagcaacgucuuccagacccgcgccgggugccucaucggcgcggagcacgugaacaacuccuacgagugcgacauccccaucggggccggcaucugcgccagcuaccagacgcagaccaacuccccgcggcgcgcccggagcguggcgucccagagcaucaucgccuacaccaugucccugggcgccgagaacagcgucgccuacuccaacaacagcaucgccauccccaccaacuucacgaucuccgugaccaccgagauccugcccgugagcaugaccaagacgagcgucgacugcaccauguacaucugcggggacuccaccgagugcagcaaccuccugcugcaguacggcuccuucugcacccagcucaaccgcgcgcugacggggaucgccguggagcaggacaagaacacccaggagguguucgcccaggucaagcagaucuacaagacgcccccgaucaaggacuucggcggguucaacuucagccagauccugcccgaccccuccaagcccagcaagcgguccuucaucgaggaccuccuguucaacaaggugacccuggccgacgccggcuucaucaagcaguacggcgacugccucggggacaucgcggcccgcgaccugaucugcgcccagaaguucaacggccugaccgugcucccgccccugcugaccgacgagaugaucgcccaguacaccagcgcccuccuggcggggaccaucacguccggcuggaccuucggggccggcgccgcccugcagauccccuucgcgaugcagauggccuaccgguucaacggcaucggggucacccagaacgugcucuacgagaaccagaagcugaucgccaaccaguucaacagcgccaucggcaagauccaggacucccugagcuccaccgccagcgcgcucgggaagcugcaggacguggucaaccagaacgcccaggcccugaacacgcucgugaagcagcuguccagcaacuucggcgccaucuccagcgugcugaacgacauccucucccgccuggacccgcccgaggccgaggugcagaucgaccggcugaucaccgggcgccuccagagccugcagaccuacgugacccagcagcugauccgggcggccgagauccgcgccagcgccaaccucgccgcgaccaagauguccgagugcguccugggccagagcaagcggguggacuucugcggcaagggguaccaccugauguccuucccccagagcgccccgcacggcguggucuuccuccacgugacguacguccccgcccaggagaagaacuucaccaccgcccccgcgaucugccacgacgggaaggcccacuucccccgcgagggcguguucguguccaacgggacccacugguucgucacgcagcggaacuucuacgagccgcagaucaucaccaccgacaacaccuucgugagcggcaacugcgacguggucaucggcaucgugaacaacacgguguacgacccccugcagcccgagcuggacuccuucaaggaggagcucgacaaguacuucaagaaccacaccagccccgacgucgaccugggggacaucuccggcaucaacgccagcguggugaacauccagaaggagaucgaccgccugaacgaggucgccaagaaccucaacgagucccugaucgaccugcaggagcucgggaaguacgagcaguacaucaaguggccgugguacaucuggcugggcuucaucgccggccugaucgcgaucgugauggugaccaucaugcucugcugcaugaccagcugcugcuccugccugaaggggugcugcagcugcggcuccugcugcaaguucgacgaggacgacagcgagcccguccugaagggggugaagcuccacuacacgugaggacuaguuauaagacugacuagcccgaugggccucccaacgggcccuccuccccuccuugcaccgagauuaauaaaaaaaaaaaaaaaaaaaaaaaaaaaaaaaaaaaaaaaaaaaaaaaaaaaaaaaaaaaaaaaaaaaaaaaaaaaaaaaaaaaaaaaaaaaaaaaaaaaa

SEQ ID NO: 25515 - RNA, 4011 nt, Artificial Sequence
  SARS-CoV-2/Wuhan/WIV05/2019__EPI_ISL_402128 spike protein mRNA gc (1-1273)(K986P_V987P)
aggagaaagcuuaccauguucguguuccugguccuccugccccuggugagcucccagugcgugaaccucaccacccgcacgcagcugccgcccgccuacaccaacagcuucacccggggcgucuacuaccccgacaagguguuccgcuccagcgugcugcacuccacccaggaccucuuccugcccuucuucagcaacgucacgugguuccacgccauccacguguccgggaccaacggcaccaagcgguucgacaacccggugcugcccuucaacgacggggucuacuucgcgagcaccgagaaguccaacaucauccgcggcuggaucuucgggacgacccucgacagcaagacccagucccugcugaucgugaacaacgccaccaacguggucaucaaggugugcgaguuccaguucugcaacgaccccuuccucggcguguacuaccacaagaacaacaagagcuggauggaguccgaguuccgggucuacagcuccgccaacaacugcacguucgaguacgugagccagcccuuccugauggaccuggagggcaagcaggggaacuucaagaaccuccgcgaguucguguucaagaacaucgacggcuacuucaagaucuacuccaagcacaccccgaucaaccugguccgggaccugccccagggguucagcgcccucgagccccugguggaccugcccaucggcaucaacaucacccgcuuccagacccuccuggcccugcaccgguccuaccucacgccgggggacagcagcuccggcuggaccgcgggcgccgccgccuacuacgugggguaccugcagccccgcaccuuccugcucaaguacaacgagaacggcaccaucacggacgcggucgacugcgcccuggacccccugagcgagaccaagugcacccucaaguccuucaccguggagaaggggaucuaccagacgagcaacuuccgggugcagcccaccgaguccaucguccgcuucccgaacaucaccaaccugugccccuucggcgagguguucaacgccacccgguucgccagcgucuacgccuggaaccgcaagcggaucuccaacugcguggcggacuacagcgugcuguacaacuccgccagcuucuccacguucaagugcuacggcgucagccccaccaagcucaacgaccugugcuucaccaacguguacgccgacuccuucgugauccgcggggacgagguccggcagaucgcccccggccagaccgggaagaucgccgacuacaacuacaagcugccggacgacuucacgggcugcgugaucgcguggaacagcaacaaccucgacuccaaggucgggggcaacuacaacuaccuguaccgccuguuccgcaagagcaaccucaagcccuucgagcgggacaucuccaccgagaucuaccaggccggcagcacccccugcaacgggguggagggcuucaacugcuacuucccccugcaguccuacggguuccagccgaccaacggcgugggguaccagcccuaccggguggucgugcugagcuucgagcuccugcacgcccccgccacggugugcggccccaagaaguccaccaaccuggucaagaacaagugcgugaacuucaacuucaacggccucaccgggaccggcgugcugaccgagagcaacaagaaguuccugccguuccagcaguucgggcgcgacaucgccgacacgaccgacgcgguccgcgacccccagacccuggagauccucgacaucacccccugcagcuucggcgggguguccgugaucacgccgggcaccaacaccagcaaccaggucgccgugcuguaccaggacgugaacugcaccgagguccccguggccauccacgccgaccagcugacgcccaccuggcggguguacuccaccggcagcaacgucuuccagacccgcgccgggugccucaucggcgcggagcacgugaacaacuccuacgagugcgacauccccaucggggccggcaucugcgccagcuaccagacgcagaccaacuccccgcggcgcgcccggagcguggcgucccagagcaucaucgccuacaccaugucccugggcgccgagaacagcgucgccuacuccaacaacagcaucgccauccccaccaacuucacgaucuccgugaccaccgagauccugcccgugagcaugaccaagacgagcgucgacugcaccauguacaucugcggggacuccaccgagugcagcaaccuccugcugcaguacggcuccuucugcacccagcucaaccgcgcgcugacggggaucgccguggagcaggacaagaacacccaggagguguucgcccaggucaagcagaucuacaagacgcccccgaucaaggacuucggcggguucaacuucagccagauccugcccgaccccuccaagcccagcaagcgguccuucaucgaggaccuccuguucaacaaggugacccuggccgacgccggcuucaucaagcaguacggcgacugccucggggacaucgcggcccgcgaccugaucugcgcccagaaguucaacggccugaccgugcucccgccccugcugaccgacgagaugaucgcccaguacaccagcgcccuccuggcggggaccaucacguccggcuggaccuucggggccggcgccgcccugcagauccccuucgcgaugcagauggccuaccgguucaacggcaucggggucacccagaacgugcucuacgagaaccagaagcugaucgccaaccaguucaacagcgccaucggcaagauccaggacucccugagcuccaccgccagcgcgcucgggaagcugcaggacguggucaaccagaacgcccaggcccugaacacgcucgugaagcagcuguccagcaacuucggcgccaucuccagcgugcugaacgacauccucucccgccuggacccgcccgaggccgagguccagaucgaccggcugaucaccgggcgccuccagagccugcagaccuacgugacccagcagcugauccgggcggccgagauccgcgccagcgccaaccucgccgcgaccaagauguccgagugcgugcugggccagagcaagcgggucgacuucugcggcaagggguaccaccugauguccuucccccagagcgcgccccacggcgugguguuccuccacgucacguacgugcccgcccaggagaagaacuucaccaccgccccggccaucugccacgacgggaaggcccacuucccccgcgagggcgucuucguguccaacgggacccacugguucgugacgcagcggaacuucuacgagccccagaucaucaccaccgacaacaccuucgucagcggcaacugcgacguggugaucggcaucgucaacaacacgguguacgacccccugcagccggagcuggacuccuucaaggaggagcucgacaaguacuucaagaaccacaccagccccgacguggaccugggggacaucuccggcaucaacgccagcgucgugaacauccagaaggagaucgaccgccugaacgagguggccaagaaccucaacgagucccugaucgaccugcaggagcucgggaaguacgagcaguacaucaaguggcccugguacaucuggcugggcuucaucgccggccugaucgcgaucgucauggugaccaucaugcucugcugcaugaccagcugcugcuccugccugaaggggugcugcagcugcggcuccugcugcaaguucgacgaggacgacagcgagccggugcugaagggggucaagcuccacuacacgugaggacuaguuauaagacugacuagcccgaugggccucccaacgggcccuccuccccuccuugcaccgagauuaauaaaaaaaaaaaaaaaaaaaaaaaaaaaaaaaaaaaaaaaaaaaaaaaaaaaaaaaaaaaaaaaaaaaaaaaaaaaaaaaaaaaaaaaaaaaaaaaaaaaa

SEQ ID NO: 25516 - RNA, 4011 nt, Artificial Sequence
  SARS-CoV-2/Wuhan/WIV05/2019__EPI_ISL_402128 spike protein mRNA gc (1-1273)(K986P_V987P_ D614G)
aggagaaagcuuaccauguucguguuccugguccuccugccccuggugagcucccagugcgugaaccucaccacccgcacgcagcugccgcccgccuacaccaacagcuucacccggggcgucuacuaccccgacaagguguuccgcuccagcgugcugcacuccacccaggaccucuuccugcccuucuucagcaacgucacgugguuccacgccauccacguguccgggaccaacggcaccaagcgguucgacaacccggugcugcccuucaacgacggggucuacuucgcgagcaccgagaaguccaacaucauccgcggcuggaucuucgggacgacccucgacagcaagacccagucccugcugaucgugaacaacgccaccaacguggucaucaaggugugcgaguuccaguucugcaacgaccccuuccucggcguguacuaccacaagaacaacaagagcuggauggaguccgaguuccgggucuacagcuccgccaacaacugcacguucgaguacgugagccagcccuuccugauggaccuggagggcaagcaggggaacuucaagaaccuccgcgaguucguguucaagaacaucgacggcuacuucaagaucuacuccaagcacaccccgaucaaccugguccgggaccugccccagggguucagcgcccucgagccccugguggaccugcccaucggcaucaacaucacccgcuuccagacccuccuggcccugcaccgguccuaccucacgccgggggacagcagcuccggcuggaccgcgggcgccgccgccuacuacgugggguaccugcagccccgcaccuuccugcucaaguacaacgagaacggcaccaucacggacgcggucgacugcgcccuggacccccugagcgagaccaagugcacccucaaguccuucaccguggagaaggggaucuaccagacgagcaacuuccgggugcagcccaccgaguccaucguccgcuucccgaacaucaccaaccugugccccuucggcgagguguucaacgccacccgguucgccagcgucuacgccuggaaccgcaagcggaucuccaacugcguggcggacuacagcgugcuguacaacuccgccagcuucuccacguucaagugcuacggcgucagccccaccaagcucaacgaccugugcuucaccaacguguacgccgacuccuucgugauccgcggggacgagguccggcagaucgcccccggccagaccgggaagaucgccgacuacaacuacaagcugccggacgacuucacgggcugcgugaucgcguggaacagcaacaaccucgacuccaaggucgggggcaacuacaacuaccuguaccgccuguuccgcaagagcaaccucaagcccuucgagcgggacaucuccaccgagaucuaccaggccggcagcacccccugcaacgggguggagggcuucaacugcuacuucccccugcaguccuacggguuccagccgaccaacggcgugggguaccagcccuaccggguggucgugcugagcuucgagcuccugcacgcccccgccacggugugcggccccaagaaguccaccaaccuggucaagaacaagugcgugaacuucaacuucaacggccucaccgggaccggcgugcugaccgagagcaacaagaaguuccugccguuccagcaguucgggcgcgacaucgccgacacgaccgacgcgguccgcgacccccagacccuggagauccucgacaucacccccugcagcuucggcgggguguccgugaucacgccgggcaccaacaccagcaaccaggucgccgugcuguaccagggcgugaacugcaccgagguccccguggccauccacgccgaccagcugacgcccaccuggcggguguacuccaccgggagcaacgucuuccagacccgcgccggcugccucaucggggcggagcacgugaacaacuccuacgagugcgacauccccaucggcgccggcaucugcgccagcuaccagacgcagaccaacuccccgcggcgcgcccggagcguggcgucccagagcaucaucgccuacaccaugucccugggggccgagaacagcgucgccuacuccaacaacagcaucgccauccccaccaacuucacgaucuccgugaccaccgagauccugcccgugagcaugaccaagacgagcgucgacugcaccauguacaucugcggcgacuccaccgagugcagcaaccuccugcugcaguacggguccuucugcacccagcucaaccgcgcgcugacgggcaucgccguggagcaggacaagaacacccaggagguguucgcccaggucaagcagaucuacaagacgcccccgaucaaggacuucgggggcuucaacuucagccagauccugcccgaccccuccaagcccagcaagcgguccuucaucgaggaccuccuguucaacaaggugacccuggccgacgccggcuucaucaagcaguacggggacugccucggcgacaucgcggcccgcgaccugaucugcgcccagaaguucaacgggcugaccgugcucccgccccugcugaccgacgagaugaucgcccaguacaccagcgcccuccuggcgggcaccaucacguccggguggaccuucggcgccggcgccgcccugcagauccccuucgcgaugcagauggccuaccgguucaacgggaucggcgucacccagaacgugcucuacgagaaccagaagcugaucgccaaccaguucaacagcgccaucgggaagauccaggacucccugagcuccaccgccagcgcgcucggcaagcugcaggacguggucaaccagaacgcccaggcccugaacacgcucgugaagcagcuguccagcaacuucggggccaucuccagcgugcugaacgacauccucucccgccuggacccgcccgaggccgagguccagaucgaccggcugaucaccggccgccuccagagccugcagaccuacgugacccagcagcugauccgggcggccgagauccgcgccagcgccaaccucgccgcgaccaagauguccgagugcgugcugggccagagcaagcgggucgacuucugcgggaagggcuaccaccugauguccuucccccagagcgcgccccacggggugguguuccuccacgucacguacgugcccgcccaggagaagaacuucaccaccgccccggccaucugccacgacggcaaggcccacuucccccgcgagggggucuucguguccaacggcacccacugguucgugacgcagcggaacuucuacgagccccagaucaucaccaccgacaacaccuucgucagcggcaacugcgacguggugaucgggaucgucaacaacacgguguacgacccccugcagccggagcuggacuccuucaaggaggagcucgacaaguacuucaagaaccacaccagccccgacguggaccugggcgacaucuccgggaucaacgccagcgucgugaacauccagaaggagaucgaccgccugaacgagguggccaagaaccucaacgagucccugaucgaccugcaggagcucggcaaguacgagcaguacaucaaguggcccugguacaucuggcugggcuucaucgccgggcugaucgcgaucgucauggugaccaucaugcucugcugcaugaccagcugcugcuccugccugaagggcugcugcagcugcggguccugcugcaaguucgacgaggacgacagcgagccggugcugaagggcgucaagcuccacuacacgugaggacuaguuauaagacugacuagcccgaugggccucccaacgggcccuccuccccuccuugcaccgagauuaauaaaaaaaaaaaaaaaaaaaaaaaaaaaaaaaaaaaaaaaaaaaaaaaaaaaaaaaaaaaaaaaaaaaaaaaaaaaaaaaaaaaaaaaaaaaaaaaaaaaa

SEQ ID NO: 25517 - RNA, 4011 nt, Artificial Sequence
  SARS-CoV-2/Wuhan/WIV05/2019__EPI_ISL_402128 spike protein mRNA gc (1-1273)(K986P_V987P_A222V_D614G)
aggagaaagcuuaccauguucguguuccugguccuccugccccuggugagcucccagugcgugaaccucaccacccgcacgcagcugccgcccgccuacaccaacagcuucacccggggcgucuacuaccccgacaagguguuccgcuccagcgugcugcacuccacccaggaccucuuccugcccuucuucagcaacgucacgugguuccacgccauccacguguccgggaccaacggcaccaagcgguucgacaacccggugcugcccuucaacgacggggucuacuucgcgagcaccgagaaguccaacaucauccgcggcuggaucuucgggacgacccucgacagcaagacccagucccugcugaucgugaacaacgccaccaacguggucaucaaggugugcgaguuccaguucugcaacgaccccuuccucggcguguacuaccacaagaacaacaagagcuggauggaguccgaguuccgggucuacagcuccgccaacaacugcacguucgaguacgugagccagcccuuccugauggaccuggagggcaagcaggggaacuucaagaaccuccgcgaguucguguucaagaacaucgacggcuacuucaagaucuacuccaagcacaccccgaucaaccugguccgggaccugccccagggguucagcgugcucgagccccugguggaccugcccaucggcaucaacaucacccgcuuccagacccuccuggcccugcaccgguccuaccucacgccgggggacagcagcuccggcuggaccgccggcgcggccgccuacuacgucggguaccugcagccccgcaccuuccugcucaaguacaacgagaacggcaccaucacggacgccguggacugcgcgcuggacccccugagcgagaccaagugcacccucaaguccuucaccguggagaaggggaucuaccagacgagcaacuuccggguccagcccaccgaguccaucgugcgcuucccgaacaucaccaaccugugccccuucggcgaggucuucaacgccacccgguucgccagcguguacgccuggaaccgcaagcggaucuccaacugcguggccgacuacagcguccuguacaacuccgcgagcuucuccacguucaagugcuacggcgugagccccaccaagcucaacgaccugugcuucaccaacguguacgccgacuccuucgucauccgcggggacgaggugcggcagaucgcccccggccagaccgggaagaucgccgacuacaacuacaagcugccggacgacuucacgggcugcgugaucgccuggaacagcaacaaccucgacuccaaggucgggggcaacuacaacuaccuguaccgccuguuccgcaagagcaaccucaagcccuucgagcgggacaucuccaccgagaucuaccaggcgggcagcacccccugcaacgggguggagggcuucaacugcuacuucccccugcaguccuacggguuccagccgaccaacggcgugggguaccagcccuaccgggucguggugcugagcuucgagcuccugcacgcccccgccacggucugcggccccaagaaguccaccaaccuggugaagaacaagugcgugaacuucaacuucaacggccucaccgggaccggcguccugaccgagagcaacaagaaguuccugccguuccagcaguucgggcgcgacaucgccgacacgaccgacgccgugcgcgacccccagacccuggagauccucgacaucacccccugcagcuucggcgggguguccgucaucacgccgggcaccaacaccagcaaccagguggcggugcuguaccagggcgucaacugcaccgaggugcccguggccauccacgccgaccagcugacgcccaccuggcgggucuacuccaccgggagcaacguguuccagacccgcgccggcugccucaucggggccgagcacgugaacaacuccuacgagugcgacauccccaucggcgcgggcaucugcgccagcuaccagacgcagaccaacuccccgcggcgcgcccggagcgucgccucccagagcaucaucgcguacaccaugucccugggggccgagaacagcguggccuacuccaacaacagcaucgccauccccaccaacuucacgaucuccgugaccaccgagauccugcccgucagcaugaccaagacgagcguggacugcaccauguacaucugcggcgacuccaccgagugcagcaaccuccugcugcaguacggguccuucugcacccagcucaaccgcgcccugacgggcaucgcgguggagcaggacaagaacacccaggaggucuucgcccaggugaagcagaucuacaagacgcccccgaucaaggacuucgggggcuucaacuucagccagauccugcccgaccccuccaagcccagcaagcgguccuucaucgaggaccuccuguucaacaaggugacccuggccgacgccggcuucaucaagcaguacggggacugccucggcgacaucgccgcgcgcgaccugaucugcgcccagaaguucaacgggcugaccguccucccgccccugcugaccgacgagaugaucgcccaguacaccagcgcccuccuggccggcaccaucacguccggguggaccuucggcgcgggcgccgcccugcagauccccuucgccaugcagauggcguaccgguucaacgggaucggcgugacccagaacgugcucuacgagaaccagaagcugaucgccaaccaguucaacagcgccaucgggaagauccaggacucccugagcuccaccgccagcgcccucggcaagcugcaggacgucgugaaccagaacgcgcaggcccugaacacgcucgugaagcagcuguccagcaacuucggggccaucuccagcguccugaacgacauccucucccgccuggacccgcccgaggccgaggugcagaucgaccggcugaucaccggccgccuccagagccugcagaccuacgugacccagcagcugauccgggccgcggagauccgcgccagcgccaaccucgccgccaccaagauguccgagugcguccugggccagagcaagcggguggacuucugcgggaagggcuaccaccugauguccuucccccagagcgcgccccacgggguggucuuccuccacgugacguacguccccgcccaggagaagaacuucaccaccgccccggccaucugccacgacggcaaggcgcacuucccccgcgaggggguguucguguccaacggcacccacugguucgucacgcagcggaacuucuacgagccccagaucaucaccaccgacaacaccuucgugagcggcaacugcgacguggucaucgggaucgugaacaacacgguguacgacccccugcagccggagcuggacuccuucaaggaggagcucgacaaguacuucaagaaccacaccagccccgacgucgaccugggcgacaucuccgggaucaacgccagcguggugaacauccagaaggagaucgaccgccugaacgaggucgccaagaaccucaacgagucccugaucgaccugcaggagcucggcaaguacgagcaguacaucaaguggcccugguacaucuggcugggcuucaucgccgggcugaucgccaucgugauggugaccaucaugcucugcugcaugaccagcugcugcuccugccugaagggcugcugcagcugcggguccugcugcaaguucgacgaggacgacagcgagccgguccugaagggcgugaagcuccacuacacgugaggacuaguuauaagacugacuagcccgaugggccucccaacgggcccuccuccccuccuugcaccgagauuaauaaaaaaaaaaaaaaaaaaaaaaaaaaaaaaaaaaaaaaaaaaaaaaaaaaaaaaaaaaaaaaaaaaaaaaaaaaaaaaaaaaaaaaaaaaaaaaaaaaaa

SEQ ID NO: 25518 - RNA, 4011 nt, Artificial Sequence
  SARS-CoV-2/Wuhan/WIV05/2019__EPI_ISL_402128 spike protein mRNA gc (1-1273)(K986P_V987P_N439K_D614G)
aggagaaagcuuaccauguucguguuccugguccuccugccccuggugagcucccagugcgugaaccucaccacccgcacgcagcugccgcccgccuacaccaacagcuucacccggggcgucuacuaccccgacaagguguuccgcuccagcgugcugcacuccacccaggaccucuuccugcccuucuucagcaacgucacgugguuccacgccauccacguguccgggaccaacggcaccaagcgguucgacaacccggugcugcccuucaacgacggggucuacuucgcgagcaccgagaaguccaacaucauccgcggcuggaucuucgggacgacccucgacagcaagacccagucccugcugaucgugaacaacgccaccaacguggucaucaaggugugcgaguuccaguucugcaacgaccccuuccucggcguguacuaccacaagaacaacaagagcuggauggaguccgaguuccgggucuacagcuccgccaacaacugcacguucgaguacgugagccagcccuuccugauggaccuggagggcaagcaggggaacuucaagaaccuccgcgaguucguguucaagaacaucgacggcuacuucaagaucuacuccaagcacaccccgaucaaccugguccgggaccugccccagggguucagcgcccucgagccccugguggaccugcccaucggcaucaacaucacccgcuuccagacccuccuggcccugcaccgguccuaccucacgccgggggacagcagcuccggcuggaccgcgggcgccgccgccuacuacgugggguaccugcagccccgcaccuuccugcucaaguacaacgagaacggcaccaucacggacgcggucgacugcgcccuggacccccugagcgagaccaagugcacccucaaguccuucaccguggagaaggggaucuaccagacgagcaacuuccgggugcagcccaccgaguccaucguccgcuucccgaacaucaccaaccugugccccuucggcgagguguucaacgccacccgguucgccagcgucuacgccuggaaccgcaagcggaucuccaacugcguggcggacuacagcgugcuguacaacuccgccagcuucuccacguucaagugcuacggcgucagccccaccaagcucaacgaccugugcuucaccaacguguacgccgacuccuucgugauccgcggggacgagguccggcagaucgcccccggccagaccgggaagaucgccgacuacaacuacaagcugccggacgacuucacgggcugcgugaucgcguggaacagcaagaaccucgacuccaaggucgggggcaacuacaacuaccuguaccgccuguuccgcaagagcaaccucaagcccuucgagcgggacaucuccaccgagaucuaccaggccggcagcacccccugcaacgggguggagggcuucaacugcuacuucccccugcaguccuacggguuccagccgaccaacggcgugggguaccagcccuaccggguggucgugcugagcuucgagcuccugcacgcccccgccacggugugcggccccaagaaguccaccaaccuggucaagaacaagugcgugaacuucaacuucaacggccucaccgggaccggcgugcugaccgagagcaacaagaaguuccugccguuccagcaguucgggcgcgacaucgccgacacgaccgacgcgguccgcgacccccagacccuggagauccucgacaucacccccugcagcuucggcgggguguccgugaucacgccgggcaccaacaccagcaaccaggucgccgugcuguaccagggcgugaacugcaccgagguccccguggccauccacgccgaccagcugacgcccaccuggcggguguacuccaccgggagcaacgucuuccagacccgcgccggcugccucaucggggcggagcacgugaacaacuccuacgagugcgacauccccaucggcgccggcaucugcgccagcuaccagacgcagaccaacuccccgcggcgcgcccggagcguggcgucccagagcaucaucgccuacaccaugucccugggggccgagaacagcgucgccuacuccaacaacagcaucgccauccccaccaacuucacgaucuccgugaccaccgagauccugcccgugagcaugaccaagacgagcgucgacugcaccauguacaucugcggcgacuccaccgagugcagcaaccuccugcugcaguacggguccuucugcacccagcucaaccgcgcgcugacgggcaucgccguggagcaggacaagaacacccaggagguguucgcccaggucaagcagaucuacaagacgcccccgaucaaggacuucgggggcuucaacuucagccagauccugcccgaccccuccaagcccagcaagcgguccuucaucgaggaccuccuguucaacaaggugacccuggccgacgccggcuucaucaagcaguacggggacugccucggcgacaucgcggcccgcgaccugaucugcgcccagaaguucaacgggcugaccgugcucccgccccugcugaccgacgagaugaucgcccaguacaccagcgcccuccuggcgggcaccaucacguccggguggaccuucggcgccggcgccgcccugcagauccccuucgcgaugcagauggccuaccgguucaacgggaucggcgucacccagaacgugcucuacgagaaccagaagcugaucgccaaccaguucaacagcgccaucgggaagauccaggacucccugagcuccaccgccagcgcgcucggcaagcugcaggacguggucaaccagaacgcccaggcccugaacacgcucgugaagcagcuguccagcaacuucggggccaucuccagcgugcugaacgacauccucucccgccuggacccgcccgaggccgagguccagaucgaccggcugaucaccggccgccuccagagccugcagaccuacgugacccagcagcugauccgggcggccgagauccgcgccagcgccaaccucgccgcgaccaagauguccgagugcgugcugggccagagcaagcgggucgacuucugcgggaagggcuaccaccugauguccuucccccagagcgcgccccacggggugguguuccuccacgucacguacgugcccgcccaggagaagaacuucaccaccgccccggccaucugccacgacggcaaggcccacuucccccgcgagggggucuucguguccaacggcacccacugguucgugacgcagcggaacuucuacgagccccagaucaucaccaccgacaacaccuucgucagcggcaacugcgacguggugaucgggaucgucaacaacacgguguacgacccccugcagccggagcuggacuccuucaaggaggagcucgacaaguacuucaagaaccacaccagccccgacguggaccugggcgacaucuccgggaucaacgccagcgucgugaacauccagaaggagaucgaccgccugaacgagguggccaagaaccucaacgagucccugaucgaccugcaggagcucggcaaguacgagcaguacaucaaguggcccugguacaucuggcugggcuucaucgccgggcugaucgcgaucgucauggugaccaucaugcucugcugcaugaccagcugcugcuccugccugaagggcugcugcagcugcggguccugcugcaaguucgacgaggacgacagcgagccggugcugaagggcgucaagcuccacuacacgugaggacuaguuauaagacugacuagcccgaugggccucccaacgggcccuccuccccuccuugcaccgagauuaauaaaaaaaaaaaaaaaaaaaaaaaaaaaaaaaaaaaaaaaaaaaaaaaaaaaaaaaaaaaaaaaaaaaaaaaaaaaaaaaaaaaaaaaaaaaaaaaaaaaa

SEQ ID NO: 25519 - RNA, 4011 nt, Artificial Sequence
  SARS-CoV-2/Wuhan/WIV05/2019__EPI_ISL_402128 spike protein mRNA gc (1-1273)(K986P_V987P_S477N_D614G)
aggagaaagcuuaccauguucguguuccugguccuccugccccuggugagcucccagugcgugaaccucaccacccgcacgcagcugccgcccgccuacaccaacagcuucacccggggcgucuacuaccccgacaagguguuccgcuccagcgugcugcacuccacccaggaccucuuccugcccuucuucagcaacgucacgugguuccacgccauccacguguccgggaccaacggcaccaagcgguucgacaacccggugcugcccuucaacgacggggucuacuucgcgagcaccgagaaguccaacaucauccgcggcuggaucuucgggacgacccucgacagcaagacccagucccugcugaucgugaacaacgccaccaacguggucaucaaggugugcgaguuccaguucugcaacgaccccuuccucggcguguacuaccacaagaacaacaagagcuggauggaguccgaguuccgggucuacagcuccgccaacaacugcacguucgaguacgugagccagcccuuccugauggaccuggagggcaagcaggggaacuucaagaaccuccgcgaguucguguucaagaacaucgacggcuacuucaagaucuacuccaagcacaccccgaucaaccugguccgggaccugccccagggguucagcgcccucgagccccugguggaccugcccaucggcaucaacaucacccgcuuccagacccuccuggcccugcaccgguccuaccucacgccgggggacagcagcuccggcuggaccgcgggcgccgccgccuacuacgugggguaccugcagccccgcaccuuccugcucaaguacaacgagaacggcaccaucacggacgcggucgacugcgcccuggacccccugagcgagaccaagugcacccucaaguccuucaccguggagaaggggaucuaccagacgagcaacuuccgggugcagcccaccgaguccaucguccgcuucccgaacaucaccaaccugugccccuucggcgagguguucaacgccacccgguucgccagcgucuacgccuggaaccgcaagcggaucuccaacugcguggcggacuacagcgugcuguacaacuccgccagcuucuccacguucaagugcuacggcgucagccccaccaagcucaacgaccugugcuucaccaacguguacgccgacuccuucgugauccgcggggacgagguccggcagaucgcccccggccagaccgggaagaucgccgacuacaacuacaagcugccggacgacuucacgggcugcgugaucgcguggaacagcaacaaccucgacuccaaggucgggggcaacuacaacuaccuguaccgccuguuccgcaagagcaaccucaagcccuucgagcgggacaucuccaccgagaucuaccaggccggcaacacccccugcaacgggguggagggcuucaacugcuacuucccccugcagagcuacggguuccagccgaccaacggcgugggguaccagcccuaccggguggucgugcuguccuucgagcuccugcacgcccccgccacggugugcggccccaagaaguccaccaaccuggucaagaacaagugcgugaacuucaacuucaacggccucaccgggaccggcgugcugaccgagagcaacaagaaguuccugccguuccagcaguucgggcgcgacaucgccgacacgaccgacgcgguccgcgacccccagacccuggagauccucgacaucacccccugcagcuucggcggggugagcgugaucacgccgggcaccaacaccuccaaccaggucgccgugcuguaccagggcgugaacugcaccgagguccccguggccauccacgccgaccagcugacgcccaccuggcggguguacagcaccggguccaacgucuuccagacccgcgccggcugccucaucggggcggagcacgugaacaacagcuacgagugcgacauccccaucggcgccggcaucugcgccuccuaccagacgcagaccaacagcccgcggcgcgcccgguccguggcgagccaguccaucaucgccuacaccaugagccugggggccgagaacuccgucgccuacagcaacaacuccaucgccauccccaccaacuucacgaucagcgugaccaccgagauccugcccguguccaugaccaagacgagcgucgacugcaccauguacaucugcggcgacagcaccgagugcuccaaccuccugcugcaguacgggagcuucugcacccagcucaaccgcgcgcugacgggcaucgccguggagcaggacaagaacacccaggagguguucgcccaggucaagcagaucuacaagacgcccccgaucaaggacuucgggggcuucaacuucucccagauccugcccgaccccagcaagcccuccaagcggagcuucaucgaggaccuccuguucaacaaggugacccuggccgacgccggcuucaucaagcaguacggggacugccucggcgacaucgcggcccgcgaccugaucugcgcccagaaguucaacgggcugaccgugcucccgccccugcugaccgacgagaugaucgcccaguacaccuccgcccuccuggcgggcaccaucacgagcggguggaccuucggcgccggcgccgcccugcagauccccuucgcgaugcagauggccuaccgguucaacgggaucggcgucacccagaacgugcucuacgagaaccagaagcugaucgccaaccaguucaacuccgccaucgggaagauccaggacagccuguccagcaccgccuccgcgcucggcaagcugcaggacguggucaaccagaacgcccaggcccugaacacgcucgugaagcagcugagcuccaacuucggggccaucagcuccgugcugaacgacauccucagccgccuggacccgcccgaggccgagguccagaucgaccggcugaucaccggccgccuccagucccugcagaccuacgugacccagcagcugauccgggcggccgagauccgcgccagcgccaaccucgccgcgaccaagaugagcgagugcgugcugggccaguccaagcgggucgacuucugcgggaagggcuaccaccugaugagcuucccccaguccgcgccccacggggugguguuccuccacgucacguacgugcccgcccaggagaagaacuucaccaccgccccggccaucugccacgacggcaaggcccacuucccccgcgagggggucuucgugagcaacggcacccacugguucgugacgcagcggaacuucuacgagccccagaucaucaccaccgacaacaccuucgucuccggcaacugcgacguggugaucgggaucgucaacaacacgguguacgacccccugcagccggagcuggacagcuucaaggaggagcucgacaaguacuucaagaaccacaccucccccgacguggaccugggcgacaucagcgggaucaacgccuccgucgugaacauccagaaggagaucgaccgccugaacgagguggccaagaaccucaacgagagccugaucgaccugcaggagcucggcaaguacgagcaguacaucaaguggcccugguacaucuggcugggcuucaucgccgggcugaucgcgaucgucauggugaccaucaugcucugcugcaugaccuccugcugcagcugccugaagggcugcugcuccugcgggagcugcugcaaguucgacgaggacgacuccgagccggugcugaagggcgucaagcuccacuacacgugaggacuaguuauaagacugacuagcccgaugggccucccaacgggcccuccuccccuccuugcaccgagauuaauaaaaaaaaaaaaaaaaaaaaaaaaaaaaaaaaaaaaaaaaaaaaaaaaaaaaaaaaaaaaaaaaaaaaaaaaaaaaaaaaaaaaaaaaaaaaaaaaaaaa

SEQ ID NO: 25520 - RNA, 4011 nt, Artificial Sequence
  SARS-CoV-2/Wuhan/WIV05/2019__EPI_ISL_402128 spike protein mRNA gc (1-1273)(K986P_V987P_N501Y_D614G)
aggagaaagcuuaccauguucguguuccugguccuccugccccuggugagcucccagugcgugaaccucaccacccgcacgcagcugccgcccgccuacaccaacagcuucacccggggcgucuacuaccccgacaagguguuccgcuccagcgugcugcacuccacccaggaccucuuccugcccuucuucagcaacgucacgugguuccacgccauccacguguccgggaccaacggcaccaagcgguucgacaacccggugcugcccuucaacgacggggucuacuucgcgagcaccgagaaguccaacaucauccgcggcuggaucuucgggacgacccucgacagcaagacccagucccugcugaucgugaacaacgccaccaacguggucaucaaggugugcgaguuccaguucugcaacgaccccuuccucggcguguacuaccacaagaacaacaagagcuggauggaguccgaguuccgggucuacagcuccgccaacaacugcacguucgaguacgugagccagcccuuccugauggaccuggagggcaagcaggggaacuucaagaaccuccgcgaguucguguucaagaacaucgacggcuacuucaagaucuacuccaagcacaccccgaucaaccugguccgggaccugccccagggguucagcgcccucgagccccugguggaccugcccaucggcaucaacaucacccgcuuccagacccuccuggcccugcaccgguccuaccucacgccgggggacagcagcuccggcuggaccgcgggcgccgccgccuacuacgugggguaccugcagccccgcaccuuccugcucaaguacaacgagaacggcaccaucacggacgcggucgacugcgcccuggacccccugagcgagaccaagugcacccucaaguccuucaccguggagaaggggaucuaccagacgagcaacuuccgggugcagcccaccgaguccaucguccgcuucccgaacaucaccaaccugugccccuucggcgagguguucaacgccacccgguucgccagcgucuacgccuggaaccgcaagcggaucuccaacugcguggcggacuacagcgugcuguacaacuccgccagcuucuccacguucaagugcuacggcgucagccccaccaagcucaacgaccugugcuucaccaacguguacgccgacuccuucgugauccgcggggacgagguccggcagaucgcccccggccagaccgggaagaucgccgacuacaacuacaagcugccggacgacuucacgggcugcgugaucgcguggaacagcaacaaccucgacuccaaggucgggggcaacuacaacuaccuguaccgccuguuccgcaagagcaaccucaagcccuucgagcgggacaucuccaccgagaucuaccaggccggcagcacccccugcaacgggguggagggcuucaacugcuacuucccccugcaguccuacggguuccagccgaccuacggcgugggguaccagcccuaccggguggucgugcugagcuucgagcuccugcacgcccccgccacggugugcggccccaagaaguccaccaaccuggucaagaacaagugcgugaacuucaacuucaacggccucaccgggaccggcgugcugaccgagagcaacaagaaguuccugccguuccagcaguucgggcgcgacaucgccgacacgaccgacgcgguccgcgacccccagacccuggagauccucgacaucacccccugcagcuucggcgggguguccgugaucacgccgggcaccaacaccagcaaccaggucgccgugcuguaccagggcgugaacugcaccgagguccccguggccauccacgccgaccagcugacgcccaccuggcggguguacuccaccgggagcaacgucuuccagacccgcgccggcugccucaucggggcggagcacgugaacaacuccuacgagugcgacauccccaucggcgccggcaucugcgccagcuaccagacgcagaccaacuccccgcggcgcgcccggagcguggcgucccagagcaucaucgccuacaccaugucccugggggccgagaacagcgucgccuacuccaacaacagcaucgccauccccaccaacuucacgaucuccgugaccaccgagauccugcccgugagcaugaccaagacgagcgucgacugcaccauguacaucugcggcgacuccaccgagugcagcaaccuccugcugcaguacggguccuucugcacccagcucaaccgcgcgcugacgggcaucgccguggagcaggacaagaacacccaggagguguucgcccaggucaagcagaucuacaagacgcccccgaucaaggacuucgggggcuucaacuucagccagauccugcccgaccccuccaagcccagcaagcgguccuucaucgaggaccuccuguucaacaaggugacccuggccgacgccggcuucaucaagcaguacggggacugccucggcgacaucgcggcccgcgaccugaucugcgcccagaaguucaacgggcugaccgugcucccgccccugcugaccgacgagaugaucgcccaguacaccagcgcccuccuggcgggcaccaucacguccggguggaccuucggcgccggcgccgcccugcagauccccuucgcgaugcagauggccuaccgguucaacgggaucggcgucacccagaacgugcucuacgagaaccagaagcugaucgccaaccaguucaacagcgccaucgggaagauccaggacucccugagcuccaccgccagcgcgcucggcaagcugcaggacguggucaaccagaacgcccaggcccugaacacgcucgugaagcagcuguccagcaacuucggggccaucuccagcgugcugaacgacauccucucccgccuggacccgcccgaggccgagguccagaucgaccggcugaucaccggccgccuccagagccugcagaccuacgugacccagcagcugauccgggcggccgagauccgcgccagcgccaaccucgccgcgaccaagauguccgagugcgugcugggccagagcaagcgggucgacuucugcgggaagggcuaccaccugauguccuucccccagagcgcgccccacggggugguguuccuccacgucacguacgugcccgcccaggagaagaacuucaccaccgccccggccaucugccacgacggcaaggcccacuucccccgcgagggggucuucguguccaacggcacccacugguucgugacgcagcggaacuucuacgagccccagaucaucaccaccgacaacaccuucgucagcggcaacugcgacguggugaucgggaucgucaacaacacgguguacgacccccugcagccggagcuggacuccuucaaggaggagcucgacaaguacuucaagaaccacaccagccccgacguggaccugggcgacaucuccgggaucaacgccagcgucgugaacauccagaaggagaucgaccgccugaacgagguggccaagaaccucaacgagucccugaucgaccugcaggagcucggcaaguacgagcaguacaucaaguggcccugguacaucuggcugggcuucaucgccgggcugaucgcgaucgucauggugaccaucaugcucugcugcaugaccagcugcugcuccugccugaagggcugcugcagcugcggguccugcugcaaguucgacgaggacgacagcgagccggugcugaagggcgucaagcuccacuacacgugaggacuaguuauaagacugacuagcccgaugggccucccaacgggcccuccuccccuccuugcaccgagauuaauaaaaaaaaaaaaaaaaaaaaaaaaaaaaaaaaaaaaaaaaaaaaaaaaaaaaaaaaaaaaaaaaaaaaaaaaaaaaaaaaaaaaaaaaaaaaaaaaaaaa

SEQ ID NO: 25521 - RNA, 4005 nt, Artificial Sequence
  SARS-CoV-2/Wuhan/WIV05/2019__EPI_ISL_402128 spike protein mRNA gc (1-1273)(K986P_V987P_H69del_V70del_D614G)
aggagaaagcuuaccauguucguguuccugguccuccugccccuggugagcucccagugcgugaaccucaccacccgcacgcagcugccgcccgccuacaccaacagcuucacccggggcgucuacuaccccgacaagguguuccgcuccagcgugcugcacuccacccaggaccucuuccugcccuucuucagcaacgucacgugguuccacgccaucuccgggaccaacggcaccaagcgguucgacaacccggugcugcccuucaacgacgggguguacuucgcgagcaccgagaaguccaacaucauccgcggcuggaucuucgggacgacccucgacagcaagacccagucccugcugaucgucaacaacgccaccaacguggugaucaaggucugcgaguuccaguucugcaacgaccccuuccucggcguguacuaccacaagaacaacaagagcuggauggaguccgaguuccggguguacagcuccgccaacaacugcacguucgaguacgucagccagcccuuccugauggaccuggagggcaagcaggggaacuucaagaaccuccgcgaguucguguucaagaacaucgacggcuacuucaagaucuacuccaagcacaccccgaucaaccuggugcgggaccugccccagggguucagcgcccucgagccccuggucgaccugcccaucggcaucaacaucacccgcuuccagacccuccuggcccugcaccgguccuaccucacgccgggggacagcagcuccggcuggaccgcgggcgccgccgccuacuacgugggguaccugcagccccgcaccuuccugcucaaguacaacgagaacggcaccaucacggacgcgguggacugcgcccuggacccccugagcgagaccaagugcacccucaaguccuucaccgucgagaaggggaucuaccagacgagcaacuuccgggugcagcccaccgaguccaucgugcgcuucccgaacaucaccaaccugugccccuucggcgaggucuucaacgccacccgguucgccagcguguacgccuggaaccgcaagcggaucuccaacugcgucgcggacuacagcgugcuguacaacuccgccagcuucuccacguucaagugcuacggcgugagccccaccaagcucaacgaccugugcuucaccaacgucuacgccgacuccuucgugauccgcggggacgaggugcggcagaucgcccccggccagaccgggaagaucgccgacuacaacuacaagcugccggacgacuucacgggcugcgucaucgcguggaacagcaacaaccucgacuccaaggucgggggcaacuacaacuaccuguaccgccuguuccgcaagagcaaccucaagcccuucgagcgggacaucuccaccgagaucuaccaggccggcagcacccccugcaacgggguggagggcuucaacugcuacuucccccugcaguccuacggguuccagccgaccaacggcgugggguaccagcccuaccggguggugguccugagcuucgagcuccugcacgcccccgccacggugugcggccccaagaaguccaccaaccuggugaagaacaagugcgucaacuucaacuucaacggccucaccgggaccggcgugcugaccgagagcaacaagaaguuccugccguuccagcaguucgggcgcgacaucgccgacacgaccgacgcggugcgcgacccccagacccuggagauccucgacaucacccccugcagcuucggcggggucuccgugaucacgccgggcaccaacaccagcaaccagguggccguccuguaccagggcgugaacugcaccgaggugcccgucgccauccacgccgaccagcugacgcccaccuggcggguguacuccaccgggagcaacguguuccagacccgcgccggcugccucaucggggcggagcacgucaacaacuccuacgagugcgacauccccaucggcgccggcaucugcgccagcuaccagacgcagaccaacuccccgcggcgcgcccggagcguggcgucccagagcaucaucgccuacaccaugucccugggggccgagaacagcguggccuacuccaacaacagcaucgccauccccaccaacuucacgaucuccgucaccaccgagauccugcccgugagcaugaccaagacgagcguggacugcaccauguacaucugcggcgacuccaccgagugcagcaaccuccugcugcaguacggguccuucugcacccagcucaaccgcgcgcugacgggcaucgccgucgagcaggacaagaacacccaggagguguucgcccaggugaagcagaucuacaagacgcccccgaucaaggacuucgggggcuucaacuucagccagauccugcccgaccccuccaagcccagcaagcgguccuucaucgaggaccuccuguucaacaaggucacccuggccgacgccggcuucaucaagcaguacggggacugccucggcgacaucgcggcccgcgaccugaucugcgcccagaaguucaacgggcugaccgugcucccgccccugcugaccgacgagaugaucgcccaguacaccagcgcccuccuggcgggcaccaucacguccggguggaccuucggcgccggcgccgcccugcagauccccuucgcgaugcagauggccuaccgguucaacgggaucggcgugacccagaacguccucuacgagaaccagaagcugaucgccaaccaguucaacagcgccaucgggaagauccaggacucccugagcuccaccgccagcgcgcucggcaagcugcaggacguggugaaccagaacgcccaggcccugaacacgcucgucaagcagcuguccagcaacuucggggccaucuccagcgugcugaacgacauccucucccgccuggacccgcccgaggccgaggugcagaucgaccggcugaucaccggccgccuccagagccugcagaccuacgucacccagcagcugauccgggcggccgagauccgcgccagcgccaaccucgccgcgaccaagauguccgagugcgugcugggccagagcaagcggguggacuucugcgggaagggcuaccaccugauguccuucccccagagcgcgccccacggggucguguuccuccacgugacguacguccccgcccaggagaagaacuucaccaccgccccggccaucugccacgacggcaaggcccacuucccccgcgaggggguguucgucuccaacggcacccacugguucgugacgcagcggaacuucuacgagccccagaucaucaccaccgacaacaccuucgugagcggcaacugcgacgucgugaucgggaucgugaacaacacggucuacgacccccugcagccggagcuggacuccuucaaggaggagcucgacaaguacuucaagaaccacaccagccccgacguggaccugggcgacaucuccgggaucaacgccagcguggucaacauccagaaggagaucgaccgccugaacgagguggccaagaaccucaacgagucccugaucgaccugcaggagcucggcaaguacgagcaguacaucaaguggcccugguacaucuggcugggcuucaucgccgggcugaucgcgaucgugauggucaccaucaugcucugcugcaugaccagcugcugcuccugccugaagggcugcugcagcugcggguccugcugcaaguucgacgaggacgacagcgagccggugcugaagggcgugaagcuccacuacacgugaggacuaguuauaagacugacuagcccgaugggccucccaacgggcccuccuccccuccuugcaccgagauuaauaaaaaaaaaaaaaaaaaaaaaaaaaaaaaaaaaaaaaaaaaaaaaaaaaaaaaaaaaaaaaaaaaaaaaaaaaaaaaaaaaaaaaaaaaaaaaaaaaaaa

SEQ ID NO: 25522 - RNA, 4011 nt, Artificial Sequence
  SARS-CoV-2/Wuhan/WIV05/2019__EPI_ISL_402128 spike protein mRNA gc (1-1273)(K986P_V987P_Y453F_D614G)
aggagaaagcuuaccauguucguguuccugguccuccugccccuggugagcucccagugcgugaaccucaccacccgcacgcagcugccgcccgccuacaccaacagcuucacccggggcgucuacuaccccgacaagguguuccgcuccagcgugcugcacuccacccaggaccucuuccugcccuucuucagcaacgucacgugguuccacgccauccacguguccgggaccaacggcaccaagcgguucgacaacccggugcugcccuucaacgacggggucuacuucgcgagcaccgagaaguccaacaucauccgcggcuggaucuucgggacgacccucgacagcaagacccagucccugcugaucgugaacaacgccaccaacguggucaucaaggugugcgaguuccaguucugcaacgaccccuuccucggcguguacuaccacaagaacaacaagagcuggauggaguccgaguuccgggucuacagcuccgccaacaacugcacguucgaguacgugagccagcccuuccugauggaccuggagggcaagcaggggaacuucaagaaccuccgcgaguucguguucaagaacaucgacggcuacuucaagaucuacuccaagcacaccccgaucaaccugguccgggaccugccccagggguucagcgcccucgagccccugguggaccugcccaucggcaucaacaucacccgcuuccagacccuccuggcccugcaccgguccuaccucacgccgggggacagcagcuccggcuggaccgcgggcgccgccgccuacuacgugggguaccugcagccccgcaccuuccugcucaaguacaacgagaacggcaccaucacggacgcggucgacugcgcccuggacccccugagcgagaccaagugcacccucaaguccuucaccguggagaaggggaucuaccagacgagcaacuuccgggugcagcccaccgaguccaucguccgcuucccgaacaucaccaaccugugccccuucggcgagguguucaacgccacccgguucgccagcgucuacgccuggaaccgcaagcggaucuccaacugcguggcggacuacagcgugcuguacaacuccgccagcuucuccacguucaagugcuacggcgucagccccaccaagcucaacgaccugugcuucaccaacguguacgccgacuccuucgugauccgcggggacgagguccggcagaucgcccccggccagaccgggaagaucgccgacuacaacuacaagcugccggacgacuucacgggcugcgugaucgcguggaacagcaacaaccucgacuccaaggucgggggcaacuacaacuaccuguuccgccuguuccgcaagagcaaccucaagcccuucgagcgggacaucuccaccgagaucuaccaggccggcagcacccccugcaacgggguggagggcuucaacugcuacuucccccugcaguccuacggguuccagccgaccaacggcgugggguaccagcccuaccggguggucgugcugagcuucgagcuccugcacgcccccgccacggugugcggccccaagaaguccaccaaccuggucaagaacaagugcgugaacuucaacuucaacggccucaccgggaccggcgugcugaccgagagcaacaagaaguuccugccguuccagcaguucgggcgcgacaucgccgacacgaccgacgcgguccgcgacccccagacccuggagauccucgacaucacccccugcagcuucggcgggguguccgugaucacgccgggcaccaacaccagcaaccaggucgccgugcuguaccagggcgugaacugcaccgagguccccguggccauccacgccgaccagcugacgcccaccuggcggguguacuccaccgggagcaacgucuuccagacccgcgccggcugccucaucggggcggagcacgugaacaacuccuacgagugcgacauccccaucggcgccggcaucugcgccagcuaccagacgcagaccaacuccccgcggcgcgcccggagcguggcgucccagagcaucaucgccuacaccaugucccugggggccgagaacagcgucgccuacuccaacaacagcaucgccauccccaccaacuucacgaucuccgugaccaccgagauccugcccgugagcaugaccaagacgagcgucgacugcaccauguacaucugcggcgacuccaccgagugcagcaaccuccugcugcaguacggguccuucugcacccagcucaaccgcgcgcugacgggcaucgccguggagcaggacaagaacacccaggagguguucgcccaggucaagcagaucuacaagacgcccccgaucaaggacuucgggggcuucaacuucagccagauccugcccgaccccuccaagcccagcaagcgguccuucaucgaggaccuccuguucaacaaggugacccuggccgacgccggcuucaucaagcaguacggggacugccucggcgacaucgcggcccgcgaccugaucugcgcccagaaguucaacgggcugaccgugcucccgccccugcugaccgacgagaugaucgcccaguacaccagcgcccuccuggcgggcaccaucacguccggguggaccuucggcgccggcgccgcccugcagauccccuucgcgaugcagauggccuaccgguucaacgggaucggcgucacccagaacgugcucuacgagaaccagaagcugaucgccaaccaguucaacagcgccaucgggaagauccaggacucccugagcuccaccgccagcgcgcucggcaagcugcaggacguggucaaccagaacgcccaggcccugaacacgcucgugaagcagcuguccagcaacuucggggccaucuccagcgugcugaacgacauccucucccgccuggacccgcccgaggccgagguccagaucgaccggcugaucaccggccgccuccagagccugcagaccuacgugacccagcagcugauccgggcggccgagauccgcgccagcgccaaccucgccgcgaccaagauguccgagugcgugcugggccagagcaagcgggucgacuucugcgggaagggcuaccaccugauguccuucccccagagcgcgccccacggggugguguuccuccacgucacguacgugcccgcccaggagaagaacuucaccaccgccccggccaucugccacgacggcaaggcccacuucccccgcgagggggucuucguguccaacggcacccacugguucgugacgcagcggaacuucuacgagccccagaucaucaccaccgacaacaccuucgucagcggcaacugcgacguggugaucgggaucgucaacaacacgguguacgacccccugcagccggagcuggacuccuucaaggaggagcucgacaaguacuucaagaaccacaccagccccgacguggaccugggcgacaucuccgggaucaacgccagcgucgugaacauccagaaggagaucgaccgccugaacgagguggccaagaaccucaacgagucccugaucgaccugcaggagcucggcaaguacgagcaguacaucaaguggcccugguacaucuggcugggcuucaucgccgggcugaucgcgaucgucauggugaccaucaugcucugcugcaugaccagcugcugcuccugccugaagggcugcugcagcugcggguccugcugcaaguucgacgaggacgacagcgagccggugcugaagggcgucaagcuccacuacacgugaggacuaguuauaagacugacuagcccgaugggccucccaacgggcccuccuccccuccuugcaccgagauuaauaaaaaaaaaaaaaaaaaaaaaaaaaaaaaaaaaaaaaaaaaaaaaaaaaaaaaaaaaaaaaaaaaaaaaaaaaaaaaaaaaaaaaaaaaaaaaaaaaaaa

SEQ ID NO: 25523 - RNA, 4011 nt, Artificial Sequence
  SARS-CoV-2/Wuhan/WIV05/2019__EPI_ISL_402128 spike protein mRNA gc (1-1273)(K986P_V987P_D614G_I692V)
aggagaaagcuuaccauguucguguuccugguccuccugccccuggugagcucccagugcgugaaccucaccacccgcacgcagcugccgcccgccuacaccaacagcuucacccggggcgucuacuaccccgacaagguguuccgcuccagcgugcugcacuccacccaggaccucuuccugcccuucuucagcaacgucacgugguuccacgccauccacguguccgggaccaacggcaccaagcgguucgacaacccggugcugcccuucaacgacggggucuacuucgcgagcaccgagaaguccaacaucauccgcggcuggaucuucgggacgacccucgacagcaagacccagucccugcugaucgugaacaacgccaccaacguggucaucaaggugugcgaguuccaguucugcaacgaccccuuccucggcguguacuaccacaagaacaacaagagcuggauggaguccgaguuccgggucuacagcuccgccaacaacugcacguucgaguacgugagccagcccuuccugauggaccuggagggcaagcaggggaacuucaagaaccuccgcgaguucguguucaagaacaucgacggcuacuucaagaucuacuccaagcacaccccgaucaaccugguccgggaccugccccagggguucagcgcccucgagccccugguggaccugcccaucggcaucaacaucacccgcuuccagacccuccuggcccugcaccgguccuaccucacgccgggggacagcagcuccggcuggaccgcgggcgccgccgccuacuacgugggguaccugcagccccgcaccuuccugcucaaguacaacgagaacggcaccaucacggacgcggucgacugcgcccuggacccccugagcgagaccaagugcacccucaaguccuucaccguggagaaggggaucuaccagacgagcaacuuccgggugcagcccaccgaguccaucguccgcuucccgaacaucaccaaccugugccccuucggcgagguguucaacgccacccgguucgccagcgucuacgccuggaaccgcaagcggaucuccaacugcguggcggacuacagcgugcuguacaacuccgccagcuucuccacguucaagugcuacggcgucagccccaccaagcucaacgaccugugcuucaccaacguguacgccgacuccuucgugauccgcggggacgagguccggcagaucgcccccggccagaccgggaagaucgccgacuacaacuacaagcugccggacgacuucacgggcugcgugaucgcguggaacagcaacaaccucgacuccaaggucgggggcaacuacaacuaccuguaccgccuguuccgcaagagcaaccucaagcccuucgagcgggacaucuccaccgagaucuaccaggccggcagcacccccugcaacgggguggagggcuucaacugcuacuucccccugcaguccuacggguuccagccgaccaacggcgugggguaccagcccuaccggguggucgugcugagcuucgagcuccugcacgcccccgccacggugugcggccccaagaaguccaccaaccuggucaagaacaagugcgugaacuucaacuucaacggccucaccgggaccggcgugcugaccgagagcaacaagaaguuccugccguuccagcaguucgggcgcgacaucgccgacacgaccgacgcgguccgcgacccccagacccuggagauccucgacaucacccccugcagcuucggcgggguguccgugaucacgccgggcaccaacaccagcaaccaggucgccgugcuguaccagggcgugaacugcaccgagguccccguggccauccacgccgaccagcugacgcccaccuggcggguguacuccaccgggagcaacgucuuccagacccgcgccggcugccucaucggggcggagcacgugaacaacuccuacgagugcgacauccccaucggcgccggcaucugcgccagcuaccagacgcagaccaacuccccgcggcgcgcccggagcguggcgucccagagcgucaucgccuacaccaugucccugggggccgagaacagcguggccuacuccaacaacagcaucgccauccccaccaacuucacgaucuccgugaccaccgagauccugcccgucagcaugaccaagacgagcguggacugcaccauguacaucugcggcgacuccaccgagugcagcaaccuccugcugcaguacggguccuucugcacccagcucaaccgcgcgcugacgggcaucgccguggagcaggacaagaacacccaggaggucuucgcccaggugaagcagaucuacaagacgcccccgaucaaggacuucgggggcuucaacuucagccagauccugcccgaccccuccaagcccagcaagcgguccuucaucgaggaccuccuguucaacaaggugacccuggccgacgccggcuucaucaagcaguacggggacugccucggcgacaucgcggcccgcgaccugaucugcgcccagaaguucaacgggcugaccguccucccgccccugcugaccgacgagaugaucgcccaguacaccagcgcccuccuggcgggcaccaucacguccggguggaccuucggcgccggcgccgcccugcagauccccuucgcgaugcagauggccuaccgguucaacgggaucggcgugacccagaacgugcucuacgagaaccagaagcugaucgccaaccaguucaacagcgccaucgggaagauccaggacucccugagcuccaccgccagcgcgcucggcaagcugcaggacgucgugaaccagaacgcccaggcccugaacacgcucgugaagcagcuguccagcaacuucggggccaucuccagcguccugaacgacauccucucccgccuggacccgcccgaggccgaggugcagaucgaccggcugaucaccggccgccuccagagccugcagaccuacgugacccagcagcugauccgggcggccgagauccgcgccagcgccaaccucgccgcgaccaagauguccgagugcguccugggccagagcaagcggguggacuucugcgggaagggcuaccaccugauguccuucccccagagcgcgccccacgggguggucuuccuccacgugacguacguccccgcccaggagaagaacuucaccaccgccccggccaucugccacgacggcaaggcccacuucccccgcgaggggguguucguguccaacggcacccacugguucgucacgcagcggaacuucuacgagccccagaucaucaccaccgacaacaccuucgugagcggcaacugcgacguggucaucgggaucgugaacaacacgguguacgacccccugcagccggagcuggacuccuucaaggaggagcucgacaaguacuucaagaaccacaccagccccgacgucgaccugggcgacaucuccgggaucaacgccagcguggugaacauccagaaggagaucgaccgccugaacgaggucgccaagaaccucaacgagucccugaucgaccugcaggagcucggcaaguacgagcaguacaucaaguggcccugguacaucuggcugggcuucaucgccgggcugaucgcgaucgugauggugaccaucaugcucugcugcaugaccagcugcugcuccugccugaagggcugcugcagcugcggguccugcugcaaguucgacgaggacgacagcgagccgguccugaagggcgugaagcuccacuacacgugaggacuaguuauaagacugacuagcccgaugggccucccaacgggcccuccuccccuccuugcaccgagauuaauaaaaaaaaaaaaaaaaaaaaaaaaaaaaaaaaaaaaaaaaaaaaaaaaaaaaaaaaaaaaaaaaaaaaaaaaaaaaaaaaaaaaaaaaaaaaaaaaaaaa

SEQ ID NO: 25524 - RNA, 4011 nt, Artificial Sequence
  SARS-CoV-2/Wuhan/WIV05/2019__EPI_ISL_402128 spike protein mRNA gc (1-1273)(K986P_V987P_D614G_M1229I)
aggagaaagcuuaccauguucguguuccugguccuccugccccuggugagcucccagugcgugaaccucaccacccgcacgcagcugccgcccgccuacaccaacagcuucacccggggcgucuacuaccccgacaagguguuccgcuccagcgugcugcacuccacccaggaccucuuccugcccuucuucagcaacgucacgugguuccacgccauccacguguccgggaccaacggcaccaagcgguucgacaacccggugcugcccuucaacgacggggucuacuucgcgagcaccgagaaguccaacaucauccgcggcuggaucuucgggacgacccucgacagcaagacccagucccugcugaucgugaacaacgccaccaacguggucaucaaggugugcgaguuccaguucugcaacgaccccuuccucggcguguacuaccacaagaacaacaagagcuggauggaguccgaguuccgggucuacagcuccgccaacaacugcacguucgaguacgugagccagcccuuccugauggaccuggagggcaagcaggggaacuucaagaaccuccgcgaguucguguucaagaacaucgacggcuacuucaagaucuacuccaagcacaccccgaucaaccugguccgggaccugccccagggguucagcgcccucgagccccugguggaccugcccaucggcaucaacaucacccgcuuccagacccuccuggcccugcaccgguccuaccucacgccgggggacagcagcuccggcuggaccgcgggcgccgccgccuacuacgugggguaccugcagccccgcaccuuccugcucaaguacaacgagaacggcaccaucacggacgcggucgacugcgcccuggacccccugagcgagaccaagugcacccucaaguccuucaccguggagaaggggaucuaccagacgagcaacuuccgggugcagcccaccgaguccaucguccgcuucccgaacaucaccaaccugugccccuucggcgagguguucaacgccacccgguucgccagcgucuacgccuggaaccgcaagcggaucuccaacugcguggcggacuacagcgugcuguacaacuccgccagcuucuccacguucaagugcuacggcgucagccccaccaagcucaacgaccugugcuucaccaacguguacgccgacuccuucgugauccgcggggacgagguccggcagaucgcccccggccagaccgggaagaucgccgacuacaacuacaagcugccggacgacuucacgggcugcgugaucgcguggaacagcaacaaccucgacuccaaggucgggggcaacuacaacuaccuguaccgccuguuccgcaagagcaaccucaagcccuucgagcgggacaucuccaccgagaucuaccaggccggcagcacccccugcaacgggguggagggcuucaacugcuacuucccccugcaguccuacggguuccagccgaccaacggcgugggguaccagcccuaccggguggucgugcugagcuucgagcuccugcacgcccccgccacggugugcggccccaagaaguccaccaaccuggucaagaacaagugcgugaacuucaacuucaacggccucaccgggaccggcgugcugaccgagagcaacaagaaguuccugccguuccagcaguucgggcgcgacaucgccgacacgaccgacgcgguccgcgacccccagacccuggagauccucgacaucacccccugcagcuucggcgggguguccgugaucacgccgggcaccaacaccagcaaccaggucgccgugcuguaccagggcgugaacugcaccgagguccccguggccauccacgccgaccagcugacgcccaccuggcggguguacuccaccgggagcaacgucuuccagacccgcgccggcugccucaucggggcggagcacgugaacaacuccuacgagugcgacauccccaucggcgccggcaucugcgccagcuaccagacgcagaccaacuccccgcggcgcgcccggagcguggcgucccagagcaucaucgccuacaccaugucccugggggccgagaacagcgucgccuacuccaacaacagcaucgccauccccaccaacuucacgaucuccgugaccaccgagauccugcccgugagcaugaccaagacgagcgucgacugcaccauguacaucugcggcgacuccaccgagugcagcaaccuccugcugcaguacggguccuucugcacccagcucaaccgcgcgcugacgggcaucgccguggagcaggacaagaacacccaggagguguucgcccaggucaagcagaucuacaagacgcccccgaucaaggacuucgggggcuucaacuucagccagauccugcccgaccccuccaagcccagcaagcgguccuucaucgaggaccuccuguucaacaaggugacccuggccgacgccggcuucaucaagcaguacggggacugccucggcgacaucgcggcccgcgaccugaucugcgcccagaaguucaacgggcugaccgugcucccgccccugcugaccgacgagaugaucgcccaguacaccagcgcccuccuggcgggcaccaucacguccggguggaccuucggcgccggcgccgcccugcagauccccuucgcgaugcagauggccuaccgguucaacgggaucggcgucacccagaacgugcucuacgagaaccagaagcugaucgccaaccaguucaacagcgccaucgggaagauccaggacucccugagcuccaccgccagcgcgcucggcaagcugcaggacguggucaaccagaacgcccaggcccugaacacgcucgugaagcagcuguccagcaacuucggggccaucuccagcgugcugaacgacauccucucccgccuggacccgcccgaggccgagguccagaucgaccggcugaucaccggccgccuccagagccugcagaccuacgugacccagcagcugauccgggcggccgagauccgcgccagcgccaaccucgccgcgaccaagauguccgagugcgugcugggccagagcaagcgggucgacuucugcgggaagggcuaccaccugauguccuucccccagagcgcgccccacggggugguguuccuccacgucacguacgugcccgcccaggagaagaacuucaccaccgccccggccaucugccacgacggcaaggcccacuucccccgcgagggggucuucguguccaacggcacccacugguucgugacgcagcggaacuucuacgagccccagaucaucaccaccgacaacaccuucgucagcggcaacugcgacguggugaucgggaucgucaacaacacgguguacgacccccugcagccggagcuggacuccuucaaggaggagcucgacaaguacuucaagaaccacaccagccccgacguggaccugggcgacaucuccgggaucaacgccagcgucgugaacauccagaaggagaucgaccgccugaacgagguggccaagaaccucaacgagucccugaucgaccugcaggagcucggcaaguacgagcaguacaucaaguggcccugguacaucuggcugggcuucaucgccgggcugaucgcgaucgucaucgugaccaucaugcucugcugcaugaccagcugcugcuccugccugaagggcugcugcagcugcggguccugcugcaaguucgacgaggacgacagcgagccggugcugaagggcgucaagcuccacuacacgugaggacuaguuauaagacugacuagcccgaugggccucccaacgggcccuccuccccuccuugcaccgagauuaauaaaaaaaaaaaaaaaaaaaaaaaaaaaaaaaaaaaaaaaaaaaaaaaaaaaaaaaaaaaaaaaaaaaaaaaaaaaaaaaaaaaaaaaaaaaaaaaaaaaa

SEQ ID NO: 25525 - RNA, 4005 nt, Artificial Sequence
  SARS-CoV-2/Wuhan/WIV05/2019__EPI_ISL_402128 spike protein mRNA gc (1-1273)(K986P_V987P_H69del_V70del_A222V_Y453F_S477N_D614G_I692V)
aggagaaagcuuaccauguucguguuccugguccuccugccccuggugagcucccagugcgugaaccucaccacccgcacgcagcugccgcccgccuacaccaacagcuucacccggggcgucuacuaccccgacaagguguuccgcuccagcgugcugcacuccacccaggaccucuuccugcccuucuucagcaacgucacgugguuccacgccaucuccgggaccaacggcaccaagcgguucgacaacccggugcugcccuucaacgacgggguguacuucgcgagcaccgagaaguccaacaucauccgcggcuggaucuucgggacgacccucgacagcaagacccagucccugcugaucgucaacaacgccaccaacguggugaucaaggucugcgaguuccaguucugcaacgaccccuuccucggcguguacuaccacaagaacaacaagagcuggauggaguccgaguuccggguguacagcuccgccaacaacugcacguucgaguacgucagccagcccuuccugauggaccuggagggcaagcaggggaacuucaagaaccuccgcgaguucguguucaagaacaucgacggcuacuucaagaucuacuccaagcacaccccgaucaaccuggugcgggaccugccccagggguucagcguccucgagccccugguggaccugcccaucggcaucaacaucacccgcuuccagacccuccuggcccugcaccgguccuaccucacgccgggggacagcagcuccggcuggaccgccggcgcggccgccuacuacgugggguaccugcagccccgcaccuuccugcucaaguacaacgagaacggcaccaucacggacgccgucgacugcgcgcuggacccccugagcgagaccaagugcacccucaaguccuucaccguggagaaggggaucuaccagacgagcaacuuccgggugcagcccaccgaguccaucguccgcuucccgaacaucaccaaccugugccccuucggcgagguguucaacgccacccgguucgccagcgucuacgccuggaaccgcaagcggaucuccaacugcguggccgacuacagcgugcuguacaacuccgcgagcuucuccacguucaagugcuacggcgucagccccaccaagcucaacgaccugugcuucaccaacguguacgccgacuccuucgugauccgcggggacgagguccggcagaucgcccccggccagaccgggaagaucgccgacuacaacuacaagcugccggacgacuucacgggcugcgugaucgccuggaacagcaacaaccucgacuccaaggucgggggcaacuacaacuaccuguuccgccuguuccgcaagagcaaccucaagcccuucgagcgggacaucuccaccgagaucuaccaggcgggcaacacccccugcaacgggguggagggcuucaacugcuacuucccccugcagagcuacggguuccagccgaccaacggcgugggguaccagcccuaccggguggucgugcuguccuucgagcuccugcacgcccccgccacggugugcggccccaagaaguccaccaaccuggucaagaacaagugcgugaacuucaacuucaacggccucaccgggaccggcgugcugaccgagagcaacaagaaguuccugccguuccagcaguucgggcgcgacaucgccgacacgaccgacgccguccgcgacccccagacccuggagauccucgacaucacccccugcagcuucggcggggugagcgugaucacgccgggcaccaacaccuccaaccaggucgcggugcuguaccagggcgugaacugcaccgagguccccguggccauccacgccgaccagcugacgcccaccuggcggguguacagcaccggguccaacgucuuccagacccgcgccggcugccucaucggggccgagcacgugaacaacagcuacgagugcgacauccccaucggcgcgggcaucugcgccuccuaccagacgcagaccaacagcccgcggcgcgcccgguccguggccagccaguccgucaucgcguacaccaugagccugggggccgagaacuccguggccuacagcaacaacuccaucgccauccccaccaacuucacgaucagcgugaccaccgagauccugcccgucuccaugaccaagacgagcguggacugcaccauguacaucugcggcgacagcaccgagugcuccaaccuccugcugcaguacgggagcuucugcacccagcucaaccgcgcccugacgggcaucgcgguggagcaggacaagaacacccaggaggucuucgcccaggugaagcagaucuacaagacgcccccgaucaaggacuucgggggcuucaacuucucccagauccugcccgaccccagcaagcccuccaagcggagcuucaucgaggaccuccuguucaacaaggugacccuggccgacgccggcuucaucaagcaguacggggacugccucggcgacaucgccgcgcgcgaccugaucugcgcccagaaguucaacgggcugaccguccucccgccccugcugaccgacgagaugaucgcccaguacaccuccgcccuccuggccggcaccaucacgagcggguggaccuucggcgcgggcgccgcccugcagauccccuucgccaugcagauggcguaccgguucaacgggaucggcgugacccagaacgugcucuacgagaaccagaagcugaucgccaaccaguucaacuccgccaucgggaagauccaggacagccuguccagcaccgccuccgcccucggcaagcugcaggacgucgugaaccagaacgcgcaggcccugaacacgcucgugaagcagcugagcuccaacuucggggccaucagcuccguccugaacgacauccucagccgccuggacccgcccgaggccgaggugcagaucgaccggcugaucaccggccgccuccagucccugcagaccuacgugacccagcagcugauccgggccgcggagauccgcgccagcgccaaccucgccgccaccaagaugagcgagugcguccugggccaguccaagcggguggacuucugcgggaagggcuaccaccugaugagcuucccccaguccgcgccccacgggguggucuuccuccacgugacguacguccccgcccaggagaagaacuucaccaccgccccggccaucugccacgacggcaaggcgcacuucccccgcgaggggguguucgugagcaacggcacccacugguucgucacgcagcggaacuucuacgagccccagaucaucaccaccgacaacaccuucguguccggcaacugcgacguggucaucgggaucgugaacaacacgguguacgacccccugcagccggagcuggacagcuucaaggaggagcucgacaaguacuucaagaaccacaccucccccgacgucgaccugggcgacaucagcgggaucaacgccuccguggugaacauccagaaggagaucgaccgccugaacgaggucgccaagaaccucaacgagagccugaucgaccugcaggagcucggcaaguacgagcaguacaucaaguggcccugguacaucuggcugggcuucaucgccgggcugaucgccaucgugauggugaccaucaugcucugcugcaugaccuccugcugcagcugccugaagggcugcugcuccugcgggagcugcugcaaguucgacgaggacgacuccgagccgguccugaagggcgugaagcuccacuacacgugaggacuaguuauaagacugacuagcccgaugggccucccaacgggcccuccuccccuccuugcaccgagauuaauaaaaaaaaaaaaaaaaaaaaaaaaaaaaaaaaaaaaaaaaaaaaaaaaaaaaaaaaaaaaaaaaaaaaaaaaaaaaaaaaaaaaaaaaaaaaaaaaaaaa

SEQ ID NO: 25526 - RNA, 4005 nt, Artificial Sequence
  SARS-CoV-2/Wuhan/WIV05/2019__EPI_ISL_402128 spike protein mRNA gc (1-1273)(K986P_V987P_H69del_V70del_Y453F_D614G_I692V_M1229I)
aggagaaagcuuaccauguucguguuccugguccuccugccccuggugagcucccagugcgugaaccucaccacccgcacgcagcugccgcccgccuacaccaacagcuucacccggggcgucuacuaccccgacaagguguuccgcuccagcgugcugcacuccacccaggaccucuuccugcccuucuucagcaacgucacgugguuccacgccaucuccgggaccaacggcaccaagcgguucgacaacccggugcugcccuucaacgacgggguguacuucgcgagcaccgagaaguccaacaucauccgcggcuggaucuucgggacgacccucgacagcaagacccagucccugcugaucgucaacaacgccaccaacguggugaucaaggucugcgaguuccaguucugcaacgaccccuuccucggcguguacuaccacaagaacaacaagagcuggauggaguccgaguuccggguguacagcuccgccaacaacugcacguucgaguacgucagccagcccuuccugauggaccuggagggcaagcaggggaacuucaagaaccuccgcgaguucguguucaagaacaucgacggcuacuucaagaucuacuccaagcacaccccgaucaaccuggugcgggaccugccccagggguucagcgcccucgagccccuggucgaccugcccaucggcaucaacaucacccgcuuccagacccuccuggcccugcaccgguccuaccucacgccgggggacagcagcuccggcuggaccgcgggcgccgccgccuacuacgugggguaccugcagccccgcaccuuccugcucaaguacaacgagaacggcaccaucacggacgcgguggacugcgcccuggacccccugagcgagaccaagugcacccucaaguccuucaccgucgagaaggggaucuaccagacgagcaacuuccgggugcagcccaccgaguccaucgugcgcuucccgaacaucaccaaccugugccccuucggcgaggucuucaacgccacccgguucgccagcguguacgccuggaaccgcaagcggaucuccaacugcgucgcggacuacagcgugcuguacaacuccgccagcuucuccacguucaagugcuacggcgugagccccaccaagcucaacgaccugugcuucaccaacgucuacgccgacuccuucgugauccgcggggacgaggugcggcagaucgcccccggccagaccgggaagaucgccgacuacaacuacaagcugccggacgacuucacgggcugcgucaucgcguggaacagcaacaaccucgacuccaaggucgggggcaacuacaacuaccuguuccgccuguuccgcaagagcaaccucaagcccuucgagcgggacaucuccaccgagaucuaccaggccggcagcacccccugcaacgggguggagggcuucaacugcuacuucccccugcaguccuacggguuccagccgaccaacggcgugggguaccagcccuaccggguggugguccugagcuucgagcuccugcacgcccccgccacggugugcggccccaagaaguccaccaaccuggugaagaacaagugcgucaacuucaacuucaacggccucaccgggaccggcgugcugaccgagagcaacaagaaguuccugccguuccagcaguucgggcgcgacaucgccgacacgaccgacgcggugcgcgacccccagacccuggagauccucgacaucacccccugcagcuucggcggggucuccgugaucacgccgggcaccaacaccagcaaccagguggccguccuguaccagggcgugaacugcaccgaggugcccgucgccauccacgccgaccagcugacgcccaccuggcggguguacuccaccgggagcaacguguuccagacccgcgccggcugccucaucggggcggagcacgucaacaacuccuacgagugcgacauccccaucggcgccggcaucugcgccagcuaccagacgcagaccaacuccccgcggcgcgcccggagcguggcgucccagagcgugaucgccuacaccaugucccugggggccgagaacagcgucgccuacuccaacaacagcaucgccauccccaccaacuucacgaucuccgugaccaccgagauccugcccgugagcaugaccaagacgagcgucgacugcaccauguacaucugcggcgacuccaccgagugcagcaaccuccugcugcaguacggguccuucugcacccagcucaaccgcgcgcugacgggcaucgccguggagcaggacaagaacacccaggagguguucgcccaggucaagcagaucuacaagacgcccccgaucaaggacuucgggggcuucaacuucagccagauccugcccgaccccuccaagcccagcaagcgguccuucaucgaggaccuccuguucaacaaggugacccuggccgacgccggcuucaucaagcaguacggggacugccucggcgacaucgcggcccgcgaccugaucugcgcccagaaguucaacgggcugaccgugcucccgccccugcugaccgacgagaugaucgcccaguacaccagcgcccuccuggcgggcaccaucacguccggguggaccuucggcgccggcgccgcccugcagauccccuucgcgaugcagauggccuaccgguucaacgggaucggcgucacccagaacgugcucuacgagaaccagaagcugaucgccaaccaguucaacagcgccaucgggaagauccaggacucccugagcuccaccgccagcgcgcucggcaagcugcaggacguggucaaccagaacgcccaggcccugaacacgcucgugaagcagcuguccagcaacuucggggccaucuccagcgugcugaacgacauccucucccgccuggacccgcccgaggccgagguccagaucgaccggcugaucaccggccgccuccagagccugcagaccuacgugacccagcagcugauccgggcggccgagauccgcgccagcgccaaccucgccgcgaccaagauguccgagugcgugcugggccagagcaagcgggucgacuucugcgggaagggcuaccaccugauguccuucccccagagcgcgccccacggggugguguuccuccacgucacguacgugcccgcccaggagaagaacuucaccaccgccccggccaucugccacgacggcaaggcccacuucccccgcgagggggucuucguguccaacggcacccacugguucgugacgcagcggaacuucuacgagccccagaucaucaccaccgacaacaccuucgucagcggcaacugcgacguggugaucgggaucgucaacaacacgguguacgacccccugcagccggagcuggacuccuucaaggaggagcucgacaaguacuucaagaaccacaccagccccgacguggaccugggcgacaucuccgggaucaacgccagcgucgugaacauccagaaggagaucgaccgccugaacgagguggccaagaaccucaacgagucccugaucgaccugcaggagcucggcaaguacgagcaguacaucaaguggcccugguacaucuggcugggcuucaucgccgggcugaucgcgaucgucaucgugaccaucaugcucugcugcaugaccagcugcugcuccugccugaagggcugcugcagcugcggguccugcugcaaguucgacgaggacgacagcgagccggugcugaagggcgucaagcuccacuacacgugaggacuaguuauaagacugacuagcccgaugggccucccaacgggcccuccuccccuccuugcaccgagauuaauaaaaaaaaaaaaaaaaaaaaaaaaaaaaaaaaaaaaaaaaaaaaaaaaaaaaaaaaaaaaaaaaaaaaaaaaaaaaaaaaaaaaaaaaaaaaaaaaaaaa

SEQ ID NO: 25527 - RNA, 4002 nt, Artificial Sequence
  SARS-CoV-2/Wuhan/WIV05/2019__EPI_ISL_402128 spike protein mRNA gc (1-1273)(K986P_V987P_K986P_V987P_H69del_V70del_Y144del_N501Y_A570 D_D614G_P681H_T716I_S982A_D1118H)
aggagaaagcuuaccauguucguguuccugguccuccugccccuggugagcucccagugcgugaaccucaccacccgcacgcagcugccgcccgccuacaccaacagcuucacccggggcgucuacuaccccgacaagguguuccgcuccagcgugcugcacuccacccaggaccucuuccugcccuucuucagcaacgucacgugguuccacgccaucuccgggaccaacggcaccaagcgguucgacaacccggugcugcccuucaacgacgggguguacuucgcgagcaccgagaaguccaacaucauccgcggcuggaucuucgggacgacccucgacagcaagacccagucccugcugaucgucaacaacgccaccaacguggugaucaaggucugcgaguuccaguucugcaacgaccccuuccucggcguguaccacaagaacaacaagagcuggauggaguccgaguuccggguguacagcuccgccaacaacugcacguucgaguacgucagccagcccuuccugauggaccuggagggcaagcaggggaacuucaagaaccuccgcgaguucguguucaagaacaucgacggcuacuucaagaucuacuccaagcacaccccgaucaaccuggugcgggaccugccccagggguucagcgcccucgagccccuggucgaccugcccaucggcaucaacaucacccgcuuccagacccuccuggcccugcaccgguccuaccucacgccgggggacagcagcuccggcuggaccgcgggcgccgccgccuacuacgugggguaccugcagccccgcaccuuccugcucaaguacaacgagaacggcaccaucacggacgcgguggacugcgcccuggacccccugagcgagaccaagugcacccucaaguccuucaccgucgagaaggggaucuaccagacgagcaacuuccgggugcagcccaccgaguccaucgugcgcuucccgaacaucaccaaccugugccccuucggcgaggucuucaacgccacccgguucgccagcguguacgccuggaaccgcaagcggaucuccaacugcgucgcggacuacagcgugcuguacaacuccgccagcuucuccacguucaagugcuacggcgugagccccaccaagcucaacgaccugugcuucaccaacgucuacgccgacuccuucgugauccgcggggacgaggugcggcagaucgcccccggccagaccgggaagaucgccgacuacaacuacaagcugccggacgacuucacgggcugcgucaucgcguggaacagcaacaaccucgacuccaaggucgggggcaacuacaacuaccuguaccgccuguuccgcaagagcaaccucaagcccuucgagcgggacaucuccaccgagaucuaccaggccggcagcacccccugcaacgggguggagggcuucaacugcuacuucccccugcaguccuacggguuccagccgaccuacggcgugggguaccagcccuaccggguggugguccugagcuucgagcuccugcacgcccccgccacggugugcggccccaagaaguccaccaaccuggugaagaacaagugcgucaacuucaacuucaacggccucaccgggaccggcgugcugaccgagagcaacaagaaguuccugccguuccagcaguucgggcgcgacaucgacgacacgaccgacgccgugcgcgacccccagacccuggagauccucgacaucacccccugcagcuucggcggggucuccgugaucacgccgggcaccaacaccagcaaccagguggcgguccuguaccagggcgugaacugcaccgaggugcccgucgccauccacgccgaccagcugacgcccaccuggcggguguacuccaccgggagcaacguguuccagacccgcgccggcugccucaucggggccgagcacgucaacaacuccuacgagugcgacauccccaucggcgcgggcaucugcgccagcuaccagacgcagaccaacucccaccggcgcgcccggagcguggccucccagagcaucaucgcguacaccaugucccugggggccgagaacagcguggccuacuccaacaacagcaucgccaucccgaucaacuucaccaucuccgucacgaccgagauccugcccgugagcaugaccaagaccagcguggacugcacgauguacaucugcggcgacuccaccgagugcagcaaccuccugcugcaguacggguccuucugcacccagcucaaccgcgcccugaccggcaucgcggucgagcaggacaagaacacgcaggagguguucgcccaggugaagcagaucuacaagaccccgcccaucaaggacuucgggggcuucaacuucagccagauccugcccgaccccuccaagcccagcaagcgguccuucaucgaggaccuccuguucaacaaggucacccuggccgacgccggcuucaucaagcaguacggggacugccucggcgacaucgccgcgcgcgaccugaucugcgcccagaaguucaacgggcugaccgugcugcccccgcuccugacggacgagaugaucgcccaguacaccagcgcccuccuggccggcaccaucaccuccggguggacguucggcgcgggcgccgcccugcagauccccuucgccaugcagauggcguaccgguucaacgggaucggcgugacccagaacguccucuacgagaaccagaagcugaucgccaaccaguucaacagcgccaucgggaagauccaggacucccugagcuccaccgccagcgcccucggcaagcugcaggacguggugaaccagaacgcgcaggcccugaacacccucgucaagcagcuguccagcaacuucggggccaucuccagcgugcugaacgacauccucgcccgccuggacccgcccgaggccgaggugcagaucgaccggcugaucacgggccgccuccagucccugcagaccuacgucacccagcagcugauccgggcggccgagauccgcgccagcgccaaccucgccgcgaccaagaugagcgagugcgugcugggccaguccaagcggguggacuucugcgggaagggcuaccaccugaugagcuucccccaguccgcgccccacggggucguguuccuccacgugaccuacguccccgcccaggagaagaacuucacgaccgcccccgccaucugccacgacggcaaggcccacuucccgcgcgaggggguguucgucagcaacggcacccacugguucgugacccagcggaacuucuacgagccccagaucaucacgacccacaacaccuucguguccggcaacugcgacgucgugaucgggaucgugaacaacaccgucuacgacccccugcagcccgagcuggacagcuucaaggaggagcucgacaaguacuucaagaaccacacguccccggacguggaccugggcgacaucagcgggaucaacgccuccguggucaacauccagaaggagaucgaccgccugaacgagguggccaagaaccucaacgagagccugaucgaccugcaggagcucggcaaguacgagcaguacaucaaguggcccugguacaucuggcugggcuucaucgccgggcugaucgcgaucgugauggucaccaucaugcucugcugcaugaccuccugcugcagcugccugaagggcugcugcuccugcgggagcugcugcaaguucgacgaggacgacuccgagcccgugcugaagggcgugaagcuccacuacaccugaggacuaguuauaagacugacuagcccgaugggccucccaacgggcccuccuccccuccuugcaccgagauuaauaaaaaaaaaaaaaaaaaaaaaaaaaaaaaaaaaaaaaaaaaaaaaaaaaaaaaaaaaaaaaaaaaaaaaaaaaaaaaaaaaaaaaaaaaaaaaaaaaaaa

SEQ ID NO: 25528 - RNA, 4011 nt, Artificial Sequence
  SARS-CoV-2/Wuhan/WIV05/2019__EPI_ISL_402128 spike protein mRNA gc (1-1273)(K986P_V987P_K986P_V987P_K417N_E484K_N501Y_D614G)
aggagaaagcuuaccauguucguguuccugguccuccugccccuggugagcucccagugcgugaaccucaccacccgcacgcagcugccgcccgccuacaccaacagcuucacccggggcgucuacuaccccgacaagguguuccgcuccagcgugcugcacuccacccaggaccucuuccugcccuucuucagcaacgucacgugguuccacgccauccacguguccgggaccaacggcaccaagcgguucgacaacccggugcugcccuucaacgacggggucuacuucgcgagcaccgagaaguccaacaucauccgcggcuggaucuucgggacgacccucgacagcaagacccagucccugcugaucgugaacaacgccaccaacguggucaucaaggugugcgaguuccaguucugcaacgaccccuuccucggcguguacuaccacaagaacaacaagagcuggauggaguccgaguuccgggucuacagcuccgccaacaacugcacguucgaguacgugagccagcccuuccugauggaccuggagggcaagcaggggaacuucaagaaccuccgcgaguucguguucaagaacaucgacggcuacuucaagaucuacuccaagcacaccccgaucaaccugguccgggaccugccccagggguucagcgcccucgagccccugguggaccugcccaucggcaucaacaucacccgcuuccagacccuccuggcccugcaccgguccuaccucacgccgggggacagcagcuccggcuggaccgcgggcgccgccgccuacuacgugggguaccugcagccccgcaccuuccugcucaaguacaacgagaacggcaccaucacggacgcggucgacugcgcccuggacccccugagcgagaccaagugcacccucaaguccuucaccguggagaaggggaucuaccagacgagcaacuuccgggugcagcccaccgaguccaucguccgcuucccgaacaucaccaaccugugccccuucggcgagguguucaacgccacccgguucgccagcgucuacgccuggaaccgcaagcggaucuccaacugcguggcggacuacagcgugcuguacaacuccgccagcuucuccacguucaagugcuacggcgucagccccaccaagcucaacgaccugugcuucaccaacguguacgccgacuccuucgugauccgcggggacgagguccggcagaucgcccccggccagaccgggaacaucgccgacuacaacuacaagcugccggacgacuucacgggcugcgugaucgcguggaacagcaacaaccucgacuccaaggucgggggcaacuacaacuaccuguaccgccuguuccgcaagagcaaccucaagcccuucgagcgggacaucuccaccgagaucuaccaggccggcagcacccccugcaacggggugaagggcuucaacugcuacuucccccugcaguccuacggguuccagccgaccuacggcgugggguaccagcccuaccggguggucgugcugagcuucgagcuccugcacgcccccgccacggugugcggccccaagaaguccaccaaccuggucaagaacaagugcgugaacuucaacuucaacggccucaccgggaccggcgugcugaccgagagcaacaagaaguuccugccguuccagcaguucgggcgcgacaucgccgacacgaccgacgcgguccgcgacccccagacccuggagauccucgacaucacccccugcagcuucggcgggguguccgugaucacgccgggcaccaacaccagcaaccaggucgccgugcuguaccagggcgugaacugcaccgagguccccguggccauccacgccgaccagcugacgcccaccuggcggguguacuccaccgggagcaacgucuuccagacccgcgccggcugccucaucggggcggagcacgugaacaacuccuacgagugcgacauccccaucggcgccggcaucugcgccagcuaccagacgcagaccaacuccccgcggcgcgcccggagcguggcgucccagagcaucaucgccuacaccaugucccugggggccgagaacagcgucgccuacuccaacaacagcaucgccauccccaccaacuucacgaucuccgugaccaccgagauccugcccgugagcaugaccaagacgagcgucgacugcaccauguacaucugcggcgacuccaccgagugcagcaaccuccugcugcaguacggguccuucugcacccagcucaaccgcgcgcugacgggcaucgccguggagcaggacaagaacacccaggagguguucgcccaggucaagcagaucuacaagacgcccccgaucaaggacuucgggggcuucaacuucagccagauccugcccgaccccuccaagcccagcaagcgguccuucaucgaggaccuccuguucaacaaggugacccuggccgacgccggcuucaucaagcaguacggggacugccucggcgacaucgcggcccgcgaccugaucugcgcccagaaguucaacgggcugaccgugcucccgccccugcugaccgacgagaugaucgcccaguacaccagcgcccuccuggcgggcaccaucacguccggguggaccuucggcgccggcgccgcccugcagauccccuucgcgaugcagauggccuaccgguucaacgggaucggcgucacccagaacgugcucuacgagaaccagaagcugaucgccaaccaguucaacagcgccaucgggaagauccaggacucccugagcuccaccgccagcgcgcucggcaagcugcaggacguggucaaccagaacgcccaggcccugaacacgcucgugaagcagcuguccagcaacuucggggccaucuccagcgugcugaacgacauccucucccgccuggacccgcccgaggccgagguccagaucgaccggcugaucaccggccgccuccagagccugcagaccuacgugacccagcagcugauccgggcggccgagauccgcgccagcgccaaccucgccgcgaccaagauguccgagugcgugcugggccagagcaagcgggucgacuucugcgggaagggcuaccaccugauguccuucccccagagcgcgccccacggggugguguuccuccacgucacguacgugcccgcccaggagaagaacuucaccaccgccccggccaucugccacgacggcaaggcccacuucccccgcgagggggucuucguguccaacggcacccacugguucgugacgcagcggaacuucuacgagccccagaucaucaccaccgacaacaccuucgucagcggcaacugcgacguggugaucgggaucgucaacaacacgguguacgacccccugcagccggagcuggacuccuucaaggaggagcucgacaaguacuucaagaaccacaccagccccgacguggaccugggcgacaucuccgggaucaacgccagcgucgugaacauccagaaggagaucgaccgccugaacgagguggccaagaaccucaacgagucccugaucgaccugcaggagcucggcaaguacgagcaguacaucaaguggcccugguacaucuggcugggcuucaucgccgggcugaucgcgaucgucauggugaccaucaugcucugcugcaugaccagcugcugcuccugccugaagggcugcugcagcugcggguccugcugcaaguucgacgaggacgacagcgagccggugcugaagggcgucaagcuccacuacacgugaggacuaguuauaagacugacuagcccgaugggccucccaacgggcccuccuccccuccuugcaccgagauuaauaaaaaaaaaaaaaaaaaaaaaaaaaaaaaaaaaaaaaaaaaaaaaaaaaaaaaaaaaaaaaaaaaaaaaaaaaaaaaaaaaaaaaaaaaaaaaaaaaaaa

SEQ ID NO: 25529 - RNA, 4002 nt, Artificial Sequence
  SARS-CoV-2/Wuhan/WIV05/2019__EPI_ISL_402128 spike protein mRNA gc (1-1273)(K986P_V987P_K986P_V987P_L18F_D80A_D215G_L242del_A243del_ L244del_R246I_K417N_E484K_N501Y_D614G_A701V)
aggagaaagcuuaccauguucguguuccugguccuccugccccuggugagcucccagugcgugaacuucaccacccgcacgcagcucccgcccgccuacaccaacagcuucacccggggcgucuacuaccccgacaagguguuccgcuccagcgugcugcacuccacccaggaccuguuccuccccuucuucagcaacgucacgugguuccacgccauccacguguccgggaccaacggcaccaagcgguucgcgaacccggugcugcccuucaacgacggggucuacuucgccagcaccgagaaguccaacaucauccgcggcuggaucuucgggacgacccuggacagcaagacccagucccuccugaucgugaacaacgccaccaacguggucaucaaggugugcgaguuccaguucugcaacgaccccuuccugggcguguacuaccacaagaacaacaagagcuggauggaguccgaguuccgggucuacagcuccgccaacaacugcacguucgaguacgugagccagcccuuccucauggaccuggagggcaagcaggggaacuucaagaaccugcgcgaguucguguucaagaacaucgacggcuacuucaagaucuacuccaagcacaccccgaucaaccucguccgggggcugccccagggcuucagcgcccuggagccccucguggaccugcccaucgggaucaacaucacccgcuuccagacccugcacaucuccuaccucacgccgggcgacagcagcuccggcuggaccgcgggggccgccgccuacuacgugggcuaccugcagccccggaccuuccugcucaaguacaacgagaacgggaccaucacggacgcggucgacugcgcccuggacccccugagcgagaccaagugcacccucaaguccuucaccguggagaagggcaucuaccagacgagcaacuuccgcgugcagcccaccgaguccaucguccgguucccgaacaucaccaaccugugccccuucggcgagguguucaacgccacccgcuucgccagcgucuacgccuggaaccggaagcgcaucuccaacugcguggcggacuacagcgugcuguacaacuccgccagcuucuccacguucaagugcuacggggucagccccaccaagcucaacgaccugugcuucaccaacguguacgccgacuccuucgugauccggggcgacgagguccgccagaucgcccccgggcagaccggcaacaucgccgacuacaacuacaagcugccggacgacuucacggggugcgugaucgcguggaacagcaacaaccucgacuccaaggugggcggcaacuacaacuaccuguaccggcuguuccgcaagagcaaccucaagcccuucgagcgggacaucuccaccgagaucuaccaggccgggagcacccccugcaacggcgucaagggguucaacugcuacuucccccugcaguccuacggcuuccagccgaccuacggggugggcuaccagcccuaccgcguggucgugcugagcuucgagcuccugcacgcccccgccacggugugcggccccaagaaguccaccaaccuggucaagaacaagugcgugaacuucaacuucaacgggcucaccggcaccggggugcugaccgagagcaacaagaaguuccugccguuccagcaguucggccgggacaucgccgacacgaccgacgcgguccgcgacccccagacccucgagauccuggacaucacccccugcagcuucgggggcguguccgugaucacgccgggcaccaacaccagcaaccaggucgccgugcuguaccagggggugaacugcaccgagguccccguggccauccacgccgaccagcugacgcccaccuggcgcguguacuccaccggcagcaacgucuuccagacccgggccgggugccucaucggcgcggagcacgugaacaacuccuacgagugcgacauccccaucggcgccgggaucugcgccagcuaccagacgcagaccaacuccccgcgccgggcccgcagcguggcgucccagagcaucaucgccuacaccaugucccugggcgucgagaacagcguggccuacuccaacaacagcaucgccauccccaccaacuucacgaucuccgugaccaccgagauccugcccgucagcaugaccaagacgagcguggacugcaccauguacaucugcggggacuccaccgagugcagcaaccuccugcugcaguacggcuccuucugcacccagcucaaccgggcccugacggggaucgcgguggagcaggacaagaacacccaggaggucuucgcccaggugaagcagaucuacaagacgcccccgaucaaggacuucggcggcuucaacuucagccagauccugcccgaccccuccaagcccagcaagcgcuccuucaucgaggaccuccuguucaacaaggugacccuggccgacgccggguucaucaagcaguacggcgacugccucggggacaucgccgcgcgggaccugaucugcgcccagaaguucaacggccugaccguccucccgccccugcugaccgacgagaugaucgcccaguacaccagcgcccuccuggccgggaccaucacguccggcuggaccuucggcgcgggggccgcccugcagauccccuucgccaugcagauggcguaccgcuucaacggcaucggggugacccagaacgugcucuacgagaaccagaagcugaucgccaaccaguucaacagcgccaucggcaagauccaggacucccugagcuccaccgccagcgcccucgggaagcugcaggacgucgugaaccagaacgcgcaggcccugaacacgcucgugaagcagcuguccagcaacuucggcgccaucuccagcguccugaacgacauccucucccggcuggacccgcccgaggccgaggugcagaucgaccgccugaucaccggccggcuccagagccugcagaccuacgugacccagcagcugauccgcgccgcggagauccgggccagcgccaaccucgccgccaccaagauguccgagugcguccuggggcagagcaagcgcguggacuucugcggcaagggguaccaccugauguccuucccccagagcgcgccccacggcguggucuuccuccacgugacguacguccccgcccaggagaagaacuucaccaccgccccggccaucugccacgacgggaaggcgcacuucccccgggagggcguguucguguccaacggcacccacugguucgucacgcagcgcaacuucuacgagccccagaucaucaccaccgacaacaccuucgugagcgggaacugcgacguggucaucggcaucgugaacaacacgguguacgacccccugcagccggagcuggacuccuucaaggaggagcucgacaaguacuucaagaaccacaccagccccgacgucgaccugggggacaucuccggcaucaacgccagcguggugaacauccagaaggagaucgaccggcugaacgaggucgccaagaaccucaacgagucccugaucgaccugcaggagcucggcaaguacgagcaguacaucaaguggcccugguacaucuggcugggguucaucgccggccugaucgccaucgugauggugaccaucaugcucugcugcaugaccagcugcugcuccugccugaaggggugcugcagcugcggcuccugcugcaaguucgacgaggacgacagcgagccgguccugaagggggugaagcuccacuacacgugaggacuaguuauaagacugacuagcccgaugggccucccaacgggcccuccuccccuccuugcaccgagauuaauaaaaaaaaaaaaaaaaaaaaaaaaaaaaaaaaaaaaaaaaaaaaaaaaaaaaaaaaaaaaaaaaaaaaaaaaaaaaaaaaaaaaaaaaaaaaaaaaaaaa

SEQ ID NO: 25530 - RNA, 4011 nt, Artificial Sequence
  SARS-CoV-2/Wuhan/WIV05/2019__EPI_ISL_402128 spike protein mRNA gc (1-1273)(K986P_V987P_K986P_V987P_E484K_D614G)
aggagaaagcuuaccauguucguguuccugguccuccugccccuggugagcucccagugcgugaaccucaccacccgcacgcagcugccgcccgccuacaccaacagcuucacccggggcgucuacuaccccgacaagguguuccgcuccagcgugcugcacuccacccaggaccucuuccugcccuucuucagcaacgucacgugguuccacgccauccacguguccgggaccaacggcaccaagcgguucgacaacccggugcugcccuucaacgacggggucuacuucgcgagcaccgagaaguccaacaucauccgcggcuggaucuucgggacgacccucgacagcaagacccagucccugcugaucgugaacaacgccaccaacguggucaucaaggugugcgaguuccaguucugcaacgaccccuuccucggcguguacuaccacaagaacaacaagagcuggauggaguccgaguuccgggucuacagcuccgccaacaacugcacguucgaguacgugagccagcccuuccugauggaccuggagggcaagcaggggaacuucaagaaccuccgcgaguucguguucaagaacaucgacggcuacuucaagaucuacuccaagcacaccccgaucaaccugguccgggaccugccccagggguucagcgcccucgagccccugguggaccugcccaucggcaucaacaucacccgcuuccagacccuccuggcccugcaccgguccuaccucacgccgggggacagcagcuccggcuggaccgcgggcgccgccgccuacuacgugggguaccugcagccccgcaccuuccugcucaaguacaacgagaacggcaccaucacggacgcggucgacugcgcccuggacccccugagcgagaccaagugcacccucaaguccuucaccguggagaaggggaucuaccagacgagcaacuuccgggugcagcccaccgaguccaucguccgcuucccgaacaucaccaaccugugccccuucggcgagguguucaacgccacccgguucgccagcgucuacgccuggaaccgcaagcggaucuccaacugcguggcggacuacagcgugcuguacaacuccgccagcuucuccacguucaagugcuacggcgucagccccaccaagcucaacgaccugugcuucaccaacguguacgccgacuccuucgugauccgcggggacgagguccggcagaucgcccccggccagaccgggaagaucgccgacuacaacuacaagcugccggacgacuucacgggcugcgugaucgcguggaacagcaacaaccucgacuccaaggucgggggcaacuacaacuaccuguaccgccuguuccgcaagagcaaccucaagcccuucgagcgggacaucuccaccgagaucuaccaggccggcagcacccccugcaacggggugaagggcuucaacugcuacuucccccugcaguccuacggguuccagccgaccaacggcgugggguaccagcccuaccggguggucgugcugagcuucgagcuccugcacgcccccgccacggugugcggccccaagaaguccaccaaccuggucaagaacaagugcgugaacuucaacuucaacggccucaccgggaccggcgugcugaccgagagcaacaagaaguuccugccguuccagcaguucgggcgcgacaucgccgacacgaccgacgcgguccgcgacccccagacccuggagauccucgacaucacccccugcagcuucggcgggguguccgugaucacgccgggcaccaacaccagcaaccaggucgccgugcuguaccagggcgugaacugcaccgagguccccguggccauccacgccgaccagcugacgcccaccuggcggguguacuccaccgggagcaacgucuuccagacccgcgccggcugccucaucggggcggagcacgugaacaacuccuacgagugcgacauccccaucggcgccggcaucugcgccagcuaccagacgcagaccaacuccccgcggcgcgcccggagcguggcgucccagagcaucaucgccuacaccaugucccugggggccgagaacagcgucgccuacuccaacaacagcaucgccauccccaccaacuucacgaucuccgugaccaccgagauccugcccgugagcaugaccaagacgagcgucgacugcaccauguacaucugcggcgacuccaccgagugcagcaaccuccugcugcaguacggguccuucugcacccagcucaaccgcgcgcugacgggcaucgccguggagcaggacaagaacacccaggagguguucgcccaggucaagcagaucuacaagacgcccccgaucaaggacuucgggggcuucaacuucagccagauccugcccgaccccuccaagcccagcaagcgguccuucaucgaggaccuccuguucaacaaggugacccuggccgacgccggcuucaucaagcaguacggggacugccucggcgacaucgcggcccgcgaccugaucugcgcccagaaguucaacgggcugaccgugcucccgccccugcugaccgacgagaugaucgcccaguacaccagcgcccuccuggcgggcaccaucacguccggguggaccuucggcgccggcgccgcccugcagauccccuucgcgaugcagauggccuaccgguucaacgggaucggcgucacccagaacgugcucuacgagaaccagaagcugaucgccaaccaguucaacagcgccaucgggaagauccaggacucccugagcuccaccgccagcgcgcucggcaagcugcaggacguggucaaccagaacgcccaggcccugaacacgcucgugaagcagcuguccagcaacuucggggccaucuccagcgugcugaacgacauccucucccgccuggacccgcccgaggccgagguccagaucgaccggcugaucaccggccgccuccagagccugcagaccuacgugacccagcagcugauccgggcggccgagauccgcgccagcgccaaccucgccgcgaccaagauguccgagugcgugcugggccagagcaagcgggucgacuucugcgggaagggcuaccaccugauguccuucccccagagcgcgccccacggggugguguuccuccacgucacguacgugcccgcccaggagaagaacuucaccaccgccccggccaucugccacgacggcaaggcccacuucccccgcgagggggucuucguguccaacggcacccacugguucgugacgcagcggaacuucuacgagccccagaucaucaccaccgacaacaccuucgucagcggcaacugcgacguggugaucgggaucgucaacaacacgguguacgacccccugcagccggagcuggacuccuucaaggaggagcucgacaaguacuucaagaaccacaccagccccgacguggaccugggcgacaucuccgggaucaacgccagcgucgugaacauccagaaggagaucgaccgccugaacgagguggccaagaaccucaacgagucccugaucgaccugcaggagcucggcaaguacgagcaguacaucaaguggcccugguacaucuggcugggcuucaucgccgggcugaucgcgaucgucauggugaccaucaugcucugcugcaugaccagcugcugcuccugccugaagggcugcugcagcugcggguccugcugcaaguucgacgaggacgacagcgagccggugcugaagggcgucaagcuccacuacacgugaggacuaguuauaagacugacuagcccgaugggccucccaacgggcccuccuccccuccuugcaccgagauuaauaaaaaaaaaaaaaaaaaaaaaaaaaaaaaaaaaaaaaaaaaaaaaaaaaaaaaaaaaaaaaaaaaaaaaaaaaaaaaaaaaaaaaaaaaaaaaaaaaaaa

SEQ ID NO: 25531 - RNA, 4011 nt, Artificial Sequence
  SARS-CoV-2/Wuhan/WIV05/2019__EPI_ISL_402128 spike protein mRNA gc (1-1273)(K986P_V987P_K986P_V987P_L18F_T20N_P26S_D138Y_R190S_K417T _E484K_N501Y_D614G_H655Y_T1027I)
aggagaaagcuuaccauguucguguuccugguccuccugccccuggugagcucccagugcgugaacuucaccaaccgcacccagcucccgagcgccuacacgaacuccuucacccggggcgucuacuaccccgacaagguguuccgcagcuccgugcugcacagcacccaggaccuguuccuccccuucuucuccaacgucaccugguuccacgccauccacgugagcgggacgaacggcaccaagcgguucgacaaccccgugcugccguucaacgacggggucuacuucgcguccaccgagaaguccaacaucauccgcggcuggaucuucgggaccacgcuggacuccaagacccagagccuccugaucgugaacaacgccaccaacguggucaucaaggugugcgaguuccaguucugcaacuaccccuuccugggcguguacuaccacaagaacaacaaguccuggauggagagcgaguuccgggucuacuccagcgccaacaacugcaccuucgaguacgugucccagcccuuccucauggaccuggagggcaagcaggggaacuucaagaaccugagcgaguucguguucaagaacaucgacggcuacuucaagaucuacuccaagcacacgcccaucaaccucguccgcgaccugccgcagggguucagcgcccuggagccccucguggaccugcccaucggcaucaacaucacccgguuccagacccugcucgcccugcaccgcagcuaccugacccccggggacuccagcuccggcuggacggcgggcgccgccgccuacuacgugggguaccuccagccgcggaccuuccugcugaaguacaacgagaacggcaccaucaccgacgcggucgacugcgcccucgacccccugagcgagacgaagugcacccugaaguccuucaccguggagaaggggaucuaccagaccagcaacuuccgcgugcagcccacggaguccaucguccgguuccccaacaucaccaaccucugcccguucggcgagguguucaacgccacccgcuucgccagcgucuacgccuggaaccggaagcgcaucuccaacugcguggcggacuacagcgugcuguacaacuccgccagcuucuccaccuucaagugcuacggcgucagccccacgaagcugaacgaccucugcuucaccaacguguacgccgacuccuucgugauccgcggggacgagguccggcagaucgcccccggccagaccgggaccaucgccgacuacaacuacaagcugcccgacgacuucacgggcugcgugaucgcguggaacagcaacaaccuggacuccaaggucgggggcaacuacaacuaccucuaccggcuguuccgcaagagcaaccugaagccguucgagcgggacaucuccaccgagaucuaccaggccggcagcacccccugcaacggggugaagggcuucaacugcuacuucccccuccagagcuacggguuccagcccaccuacggcgugggguaccagccguaccgcguggucgugcuguccuucgagcugcuccacgcccccgccacggugugcggccccaagaaguccaccaaccuggucaagaacaagugcgugaacuucaacuucaacggccugaccgggaccggcgugcucaccgagagcaacaagaaguuccugcccuuccagcaguucgggcgggacaucgccgacacgaccgacgcgguccgcgacccgcagacccuggagauccuggacaucacccccugcagcuucggcgggguguccgugaucacgcccggcaccaacaccagcaaccaggucgccgugcucuaccagggcgugaacugcaccgaggucccgguggccauccacgccgaccagcugacgcccaccuggcgcguguacuccaccgggagcaacgucuuccagacccgggccggcugccugaucggggcggaguacgugaacaacuccuacgagugcgacauccccaucggcgccggcaucugcgccagcuaccagacgcagaccaacagcccccgccgggcccgcagcguggcgucccagagcaucaucgccuacaccaugucccucggggccgagaacagcgucgccuacuccaacaacagcaucgccaucccgaccaacuucacgaucagcgugaccaccgagauccugcccguguccaugaccaagacgagcgucgacugcaccauguacaucugcggcgacuccaccgagugcagcaaccugcuccugcaguacggguccuucugcacccagcugaaccgggcgcucacgggcaucgccguggagcaggacaagaacacccaggagguguucgcccaggucaagcagaucuacaagaccccgcccaucaaggacuucgggggcuucaacuucagccagauccugcccgaccccuccaagcccagcaagcgcuccuucaucgaggaccuccuguucaacaaggugacccuggccgacgccggcuucaucaagcaguacggggacugccugggcgacaucgcggcccgggaccucaucugcgcccagaaguucaacgggcugacggugcugcccccgcuccugaccgacgagaugaucgcccaguacaccagcgcccugcucgcgggcaccaucacguccggguggaccuucggcgccggcgccgcccugcagauccccuucgcgaugcagauggccuaccgcuucaacgggaucggcgucacccagaacgugcuguacgagaaccagaagcucaucgccaaccaguucaacagcgccaucgggaagauccaggacucccugagcuccaccgccagcgcgcugggcaagcuccaggacguggucaaccagaacgcccaggcccugaacacgcuggugaagcagcucuccagcaacuucggggccaucuccagcgugcugaacgacauccugagccggcucgacccgcccgaggccgagguccagaucgaccgccugaucaccggccggcugcagucccuccagaccuacgugacccagcagcugauccgcgcggccgagauccgggccagcgccaaccuggccgcgaucaagauguccgagugcgugcucggccagagcaagcgcgucgacuucugcgggaagggcuaccaccugauguccuucccccagagcgcgccccacggggugguguuccugcacgucaccuacgugcccgcccaggagaagaacuucacgaccgcccccgccaucugccacgacggcaaggcccacuucccgcgggagggggucuucguguccaacggcacccacugguucgugacccagcgcaacuucuacgagccccagaucaucacgaccgacaacaccuucgucagcggcaacugcgacguggugaucgggaucgucaacaacaccguguacgacccccuccagcccgagcuggacuccuucaaggaggagcuggacaaguacuucaagaaccacacgagcccggacguggaccucggcgacaucuccgggaucaacgccagcgucgugaacauccagaaggagaucgaccggcugaacgagguggccaagaaccugaacgagucccucaucgaccugcaggagcugggcaaguacgagcaguacaucaaguggcccugguacaucuggcucggcuucaucgccgggcugaucgcgaucgucauggugaccaucaugcugugcugcaugaccagcugcugcuccugccucaagggcugcugcagcugcggguccugcugcaaguucgacgaggacgacagcgagcccgugcugaagggcgucaagcugcacuacaccugaggacuaguuauaagacugacuagcccgaugggccucccaacgggcccuccuccccuccuugcaccgagauuaauaaaaaaaaaaaaaaaaaaaaaaaaaaaaaaaaaaaaaaaaaaaaaaaaaaaaaaaaaaaaaaaaaaaaaaaaaaaaaaaaaaaaaaaaaaaaaaaaaaaa

SEQ ID NO: 25532 - RNA, 4011 nt, Artificial Sequence
  SARS-CoV-2/Wuhan/WIV05/2019__EPI_ISL_402128 spike protein mRNA gc (1-1273)(K986P_V987P_K986P_V987P_S13I_W152C_L452R_D614G)
aggagaaagcuuaccauguucguguuccugguccuccugccccuggugagcauccagugcgugaaccucaccacccgcacgcagcugccgcccgccuacaccaacuccuucacccggggcgucuacuaccccgacaagguguuccgcagcuccgugcugcacagcacccaggaccucuuccugcccuucuucuccaacgucacgugguuccacgccauccacgugagcgggaccaacggcaccaagcgguucgacaacccggugcugcccuucaacgacggggucuacuucgcguccaccgagaaguccaacaucauccgcggcuggaucuucgggacgacccucgacagcaagacccagagccugcugaucgugaacaacgccaccaacguggucaucaaggugugcgaguuccaguucugcaacgaccccuuccucggcguguacuaccacaagaacaacaaguccugcauggagagcgaguuccgggucuacuccagcgccaacaacugcacguucgaguacgugucccagcccuuccugauggaccuggagggcaagcaggggaacuucaagaaccuccgcgaguucguguucaagaacaucgacggcuacuucaagaucuacagcaagcacaccccgaucaaccugguccgggaccugccccagggguucuccgcccucgagccccugguggaccugcccaucggcaucaacaucacccgcuuccagacccuccuggcccugcaccggagcuaccucacgccgggggacuccagcagcggcuggaccgcgggcgccgccgccuacuacgugggguaccugcagccccgcaccuuccugcucaaguacaacgagaacggcaccaucacggacgcggucgacugcgcccuggacccccuguccgagaccaagugcacccucaagagcuucaccguggagaaggggaucuaccagacguccaacuuccgggugcagcccaccgagagcaucguccgcuucccgaacaucaccaaccugugccccuucggcgagguguucaacgccacccgguucgccuccgucuacgccuggaaccgcaagcggaucagcaacugcguggcggacuacuccgugcuguacaacagcgccuccuucagcacguucaagugcuacggcgucucccccaccaagcucaacgaccugugcuucaccaacguguacgccgacagcuucgugauccgcggggacgagguccggcagaucgcccccggccagaccgggaagaucgccgacuacaacuacaagcugccggacgacuucacgggcugcgugaucgcguggaacuccaacaaccucgacagcaaggucgggggcaacuacaacuaccgcuaccggcuguuccgcaaguccaaccugaagcccuucgagcgggacaucagcaccgagaucuaccaggccggcuccacccccugcaacgggguggagggcuucaacugcuacuucccccuccagagcuacggguuccagccgaccaacggcgugggguaccagcccuaccgcguggucgugcuguccuucgagcugcuccacgcccccgccacggugugcggccccaagaaguccaccaaccuggucaagaacaagugcgugaacuucaacuucaacggccugaccgggaccggcgugcucaccgagagcaacaagaaguuccugccguuccagcaguucgggcgcgacaucgccgacacgaccgacgcgguccgggacccccagacccuggagauccuggacaucacccccugcagcuucggcggggugagcgugaucacgccgggcaccaacaccuccaaccaggucgccgugcucuaccagggcgugaacugcaccgagguccccguggccauccacgccgaccagcugacgcccaccuggcgcguguacagcaccggguccaacgucuuccagacccgggccggcugccugaucggggcggagcacgugaacaacagcuacgagugcgacauccccaucggcgccggcaucugcgccuccuaccagacgcagaccaacagcccgcgccgggcccgcuccguggcgagccaguccaucaucgccuacaccaugagccucggggccgagaacuccgucgccuacagcaacaacuccaucgccauccccaccaacuucacgaucagcgugaccaccgagauccugcccguguccaugaccaagacgagcgucgacugcaccauguacaucugcggcgacagcaccgagugcuccaaccugcuccugcaguacgggagcuucugcacccagcugaaccgggcgcucacgggcaucgccguggagcaggacaagaacacccaggagguguucgcccaggucaagcagaucuacaagacgcccccgaucaaggacuucgggggcuucaacuucucccagauccugcccgaccccagcaagcccuccaagcgcagcuucaucgaggaccuccuguucaacaaggugacccuggccgacgccggcuucaucaagcaguacggggacugccugggcgacaucgcggcccgggaccucaucugcgcccagaaguucaacgggcugaccgugcugccgccccuccugaccgacgagaugaucgcccaguacaccuccgcccugcucgcgggcaccaucacgagcggguggaccuucggcgccggcgccgcccugcagauccccuucgcgaugcagauggccuaccgcuucaacgggaucggcgucacccagaacgugcuguacgagaaccagaagcucaucgccaaccaguucaacuccgccaucgggaagauccaggacagccuguccagcaccgccuccgcgcugggcaagcuccaggacguggucaaccagaacgcccaggcccugaacacgcuggugaagcagcucagcuccaacuucggggccaucagcuccgugcugaacgacauccugagccggcucgacccgcccgaggccgagguccagaucgaccgccugaucaccggccggcugcagucccuccagaccuacgugacccagcagcugauccgcgcggccgagauccgggccagcgccaaccuggccgcgaccaagaugagcgagugcgugcucggccaguccaagcgcgucgacuucugcgggaagggcuaccaccugaugagcuucccccaguccgcgccccacggggugguguuccugcacgucacguacgugcccgcccaggagaagaacuucaccaccgccccggccaucugccacgacggcaaggcccacuucccccgggagggggucuucgugagcaacggcacccacugguucgugacgcagcgcaacuucuacgagccccagaucaucaccaccgacaacaccuucgucuccggcaacugcgacguggugaucgggaucgucaacaacacgguguacgacccccuccagccggagcuggacagcuucaaggaggagcuggacaaguacuucaagaaccacaccucccccgacguggaccucggcgacaucagcgggaucaacgccuccgucgugaacauccagaaggagaucgaccggcugaacgagguggccaagaaccugaacgagagccucaucgaccugcaggagcugggcaaguacgagcaguacaucaaguggcccugguacaucuggcucggcuucaucgccgggcugaucgcgaucgucauggugaccaucaugcugugcugcaugaccuccugcugcagcugccucaagggcugcugcuccugcgggagcugcugcaaguucgacgaggacgacuccgagccggugcugaagggcgucaagcugcacuacacgugaggacuaguuauaagacugacuagcccgaugggccucccaacgggcccuccuccccuccuugcaccgagauuaauaaaaaaaaaaaaaaaaaaaaaaaaaaaaaaaaaaaaaaaaaaaaaaaaaaaaaaaaaaaaaaaaaaaaaaaaaaaaaaaaaaaaaaaaaaaaaaaaaaaa

SEQ ID NO: 25533 - RNA, 4011 nt, Artificial Sequence
  SARS-CoV-2/Wuhan/WIV05/2019__EPI_ISL_402128 spike protein mRNA gc (1-1273)(K986P_V987P)
aggagaaagcuuaccauguucguguuccuggugcugcugccccuggugagcagccagugcgugaaccugaccacccggacccagcugccaccagccuacaccaacagcuucacccggggcgucuacuaccccgacaagguguuccggagcagcguccugcacagcacccaggaccuguuccugcccuucuucagcaacgugaccugguuccacgccauccacgugagcggcaccaacggcaccaagcgguucgacaaccccgugcugcccuucaacgacggcguguacuucgccagcaccgagaagagcaacaucauccggggcuggaucuucggcaccacccuggacagcaagacccagagccugcugaucgugaauaacgccaccaacguggugaucaaggugugcgaguuccaguucugcaacgaccccuuccugggcguguacuaccacaagaacaacaagagcuggauggagagcgaguuccggguguacagcagcgccaacaacugcaccuucgaguacgugagccagcccuuccugauggaccuggagggcaagcagggcaacuucaagaaccugcgggaguucguguucaagaacaucgacggcuacuucaagaucuacagcaagcacaccccaaucaaccuggugcgggaucugccccagggcuucucagcccuggagccccugguggaccugcccaucggcaucaacaucacccgguuccagacccugcuggcccugcaccggagcuaccugaccccaggcgacagcagcagcggguggacagcaggcgcggcugcuuacuacgugggcuaccugcagccccggaccuuccugcugaaguacaacgagaacggcaccaucaccgacgccguggacugcgcccuggacccucugagcgagaccaagugcacccugaagagcuucaccguggagaagggcaucuaccagaccagcaacuuccgggugcagcccaccgagagcaucgugcgguuccccaacaucaccaaccugugccccuucggcgagguguucaacgccacccgguucgccagcguguacgccuggaaccggaagcggaucagcaacugcguggccgacuacagcgugcuguacaacagcgccagcuucagcaccuucaagugcuacggcgugagccccaccaagcugaacgaccugugcuucaccaacguguacgccgacagcuucgugauccguggcgacgaggugcggcagaucgcacccggccagacaggcaagaucgccgacuacaacuacaagcugcccgacgacuucaccggcugcgugaucgccuggaacagcaacaaccucgacagcaaggugggcggcaacuacaacuaccuguaccggcuguuccggaagagcaaccugaagcccuucgagcgggacaucagcaccgagaucuaccaagccggcuccaccccuugcaacggcguggagggcuucaacugcuacuucccucugcagagcuacggcuuccagcccaccaacggcgugggcuaccagcccuaccgggugguggugcugagcuucgagcugcugcacgccccagccaccguguguggccccaagaagagcaccaaccuggugaagaacaagugcgugaacuucaacuucaacggccuuaccggcaccggcgugcugaccgagagcaacaagaaauuccugcccuuucagcaguucggccgggacaucgccgacaccaccgacgcugugcgggauccccagacccuggagauccuggacaucaccccuugcagcuucggcggcgugagcgugaucaccccaggcaccaacaccagcaaccagguggccgugcuguaccaggacgugaacugcaccgaggugcccguggccauccacgccgaccagcugacacccaccuggcgggucuacagcaccggcagcaacguguuccagacccgggccgguugccugaucggcgccgagcacgugaacaacagcuacgagugcgacauccccaucggcgccggcaucugugccagcuaccagacccagaccaauucaccccggagggcaaggagcguggccagccagagcaucaucgccuacaccaugagccugggcgccgagaacagcguggccuacagcaacaacagcaucgccauccccaccaacuucaccaucagcgugaccaccgagauucugcccgugagcaugaccaagaccagcguggacugcaccauguacaucugcggcgacagcaccgagugcagcaaccugcugcugcaguacggcagcuucugcacccagcugaaccgggcccugaccggcaucgccguggagcaggacaagaacacccaggagguguucgcccaggugaagcagaucuacaagaccccucccaucaaggacuucggcggcuucaacuucagccagauccugcccgaccccagcaagcccagcaagcggagcuucaucgaggaccugcuguucaacaaggugacccuagccgacgccggcuucaucaagcaguacggcgacugccucggcgacauagccgcccgggaccugaucugcgcccagaaguucaacggccugaccgugcugccuccccugcugaccgacgagaugaucgcccaguacaccagcgcccuguuagccggaaccaucaccagcggcuggacuuucggcgcuggagccgcucugcagauccccuucgccaugcagauggccuaccgguucaacggcaucggcgugacccagaacgugcuguacgagaaccagaagcugaucgccaaccaguucaacagcgccaucggcaagauccaggacagccugagcagcaccgcuagcgcccugggcaagcugcaggacguggugaaccagaacgcccaggcccugaacacccuggugaagcagcugagcagcaacuucggcgccaucagcagcgugcugaacgacauccugagccggcuggacccucccgaggccgaggugcagaucgaccggcugaucacuggccggcugcagagccugcagaccuacgugacccagcagcugauccgggccgccgagauucgggccagcgccaaccuggccgccaccaagaugagcgagugcgugcugggccagagcaagcggguggacuucugcggcaagggcuaccaccugaugagcuuuccccagagcgcaccccacggagugguguuccugcacgugaccuacgugcccgcccaggagaagaacuucaccaccgccccagccaucugccacgacggcaaggcccacuuuccccgggagggcguguucgugagcaacggcacccacugguucgugacccagcggaacuucuacgagccccagaucaucaccaccgacaacaccuucgugagcggcaacugcgacguggugaucggcaucgugaacaacaccguguacgauccccugcagcccgagcuggacagcuucaaggaggagcuggacaaguacuucaagaaucacaccagccccgacguggaccugggcgacaucagcggcaucaacgccagcguggugaacauccagaaggagaucgaucggcugaacgagguggccaagaaccugaacgagagccugaucgaccugcaggagcugggcaaguacgagcaguacaucaaguggcccugguacaucuggcugggcuucaucgccggccugaucgccaucgugauggugaccaucaugcugugcugcaugaccagcugcugcagcugccugaagggcuguugcagcugcggcagcugcugcaaguucgacgaggacgacagcgagcccgugcugaagggcgugaagcugcacuacaccugaggacuaguuauaagacugacuagcccgaugggccucccaacgggcccuccuccccuccuugcaccgagauuaauaaaaaaaaaaaaaaaaaaaaaaaaaaaaaaaaaaaaaaaaaaaaaaaaaaaaaaaaaaaaaaaaaaaaaaaaaaaaaaaaaaaaaaaaaaaaaaaaaaaa

SEQ ID NO: 25534 - RNA, 4011 nt, Artificial Sequence
  SARS-CoV-2/Wuhan/WIV05/2019__EPI_ISL_402128 spike protein mRNA gc (1-1273)(K986P_V987P_ D614G)
aggagaaagcuuaccauguucguguuccuggugcugcugccccuggugagcagccagugcgugaaccugaccacccggacccagcugccaccagccuacaccaacagcuucacccggggcgucuacuaccccgacaagguguuccggagcagcguccugcacagcacccaggaccuguuccugcccuucuucagcaacgugaccugguuccacgccauccacgugagcggcaccaacggcaccaagcgguucgacaaccccgugcugcccuucaacgacggcguguacuucgccagcaccgagaagagcaacaucauccggggcuggaucuucggcaccacccuggacagcaagacccagagccugcugaucgugaauaacgccaccaacguggugaucaaggugugcgaguuccaguucugcaacgaccccuuccugggcguguacuaccacaagaacaacaagagcuggauggagagcgaguuccggguguacagcagcgccaacaacugcaccuucgaguacgugagccagcccuuccugauggaccuggagggcaagcagggcaacuucaagaaccugcgggaguucguguucaagaacaucgacggcuacuucaagaucuacagcaagcacaccccaaucaaccuggugcgggaucugccccagggcuucucagcccuggagccccugguggaccugcccaucggcaucaacaucacccgguuccagacccugcuggcccugcaccggagcuaccugaccccaggcgacagcagcagcggguggacagcaggcgcggcugcuuacuacgugggcuaccugcagccccggaccuuccugcugaaguacaacgagaacggcaccaucaccgacgccguggacugcgcccuggacccucugagcgagaccaagugcacccugaagagcuucaccguggagaagggcaucuaccagaccagcaacuuccgggugcagcccaccgagagcaucgugcgguuccccaacaucaccaaccugugccccuucggcgagguguucaacgccacccgguucgccagcguguacgccuggaaccggaagcggaucagcaacugcguggccgacuacagcgugcuguacaacagcgccagcuucagcaccuucaagugcuacggcgugagccccaccaagcugaacgaccugugcuucaccaacguguacgccgacagcuucgugauccguggcgacgaggugcggcagaucgcacccggccagacaggcaagaucgccgacuacaacuacaagcugcccgacgacuucaccggcugcgugaucgccuggaacagcaacaaccucgacagcaaggugggcggcaacuacaacuaccuguaccggcuguuccggaagagcaaccugaagcccuucgagcgggacaucagcaccgagaucuaccaagccggcuccaccccuugcaacggcguggagggcuucaacugcuacuucccucugcagagcuacggcuuccagcccaccaacggcgugggcuaccagcccuaccgggugguggugcugagcuucgagcugcugcacgccccagccaccguguguggccccaagaagagcaccaaccuggugaagaacaagugcgugaacuucaacuucaacggccuuaccggcaccggcgugcugaccgagagcaacaagaaauuccugcccuuucagcaguucggccgggacaucgccgacaccaccgacgcugugcgggauccccagacccuggagauccuggacaucaccccuugcagcuucggcggcgugagcgugaucaccccaggcaccaacaccagcaaccagguggccgugcuguaccagggcgugaacugcaccgaggugcccguggccauccacgccgaccagcugacacccaccuggcgggucuacagcaccggcagcaacguguuccagacccgggccgguugccugaucggcgccgagcacgugaacaacagcuacgagugcgacauccccaucggcgccggcaucugugccagcuaccagacccagaccaauucaccccggagggcaaggagcguggccagccagagcaucaucgccuacaccaugagccugggcgccgagaacagcguggccuacagcaacaacagcaucgccauccccaccaacuucaccaucagcgugaccaccgagauucugcccgugagcaugaccaagaccagcguggacugcaccauguacaucugcggcgacagcaccgagugcagcaaccugcugcugcaguacggcagcuucugcacccagcugaaccgggcccugaccggcaucgccguggagcaggacaagaacacccaggagguguucgcccaggugaagcagaucuacaagaccccucccaucaaggacuucggcggcuucaacuucagccagauccugcccgaccccagcaagcccagcaagcggagcuucaucgaggaccugcuguucaacaaggugacccuagccgacgccggcuucaucaagcaguacggcgacugccucggcgacauagccgcccgggaccugaucugcgcccagaaguucaacggccugaccgugcugccuccccugcugaccgacgagaugaucgcccaguacaccagcgcccuguuagccggaaccaucaccagcggcuggacuuucggcgcuggagccgcucugcagauccccuucgccaugcagauggccuaccgguucaacggcaucggcgugacccagaacgugcuguacgagaaccagaagcugaucgccaaccaguucaacagcgccaucggcaagauccaggacagccugagcagcaccgcuagcgcccugggcaagcugcaggacguggugaaccagaacgcccaggcccugaacacccuggugaagcagcugagcagcaacuucggcgccaucagcagcgugcugaacgacauccugagccggcuggacccucccgaggccgaggugcagaucgaccggcugaucacuggccggcugcagagccugcagaccuacgugacccagcagcugauccgggccgccgagauucgggccagcgccaaccuggccgccaccaagaugagcgagugcgugcugggccagagcaagcggguggacuucugcggcaagggcuaccaccugaugagcuuuccccagagcgcaccccacggagugguguuccugcacgugaccuacgugcccgcccaggagaagaacuucaccaccgccccagccaucugccacgacggcaaggcccacuuuccccgggagggcguguucgugagcaacggcacccacugguucgugacccagcggaacuucuacgagccccagaucaucaccaccgacaacaccuucgugagcggcaacugcgacguggugaucggcaucgugaacaacaccguguacgauccccugcagcccgagcuggacagcuucaaggaggagcuggacaaguacuucaagaaucacaccagccccgacguggaccugggcgacaucagcggcaucaacgccagcguggugaacauccagaaggagaucgaucggcugaacgagguggccaagaaccugaacgagagccugaucgaccugcaggagcugggcaaguacgagcaguacaucaaguggcccugguacaucuggcugggcuucaucgccggccugaucgccaucgugauggugaccaucaugcugugcugcaugaccagcugcugcagcugccugaagggcuguugcagcugcggcagcugcugcaaguucgacgaggacgacagcgagcccgugcugaagggcgugaagcugcacuacaccugaggacuaguuauaagacugacuagcccgaugggccucccaacgggcccuccuccccuccuugcaccgagauuaauaaaaaaaaaaaaaaaaaaaaaaaaaaaaaaaaaaaaaaaaaaaaaaaaaaaaaaaaaaaaaaaaaaaaaaaaaaaaaaaaaaaaaaaaaaaaaaaaaaaa

SEQ ID NO: 25535 - RNA, 4011 nt, Artificial Sequence
  SARS-CoV-2/Wuhan/WIV05/2019__EPI_ISL_402128 spike protein mRNA gc (1-1273)(K986P_V987P_A222V_D614G)
aggagaaagcuuaccauguucguguuccuggugcugcugccccuggugagcagccagugcgugaaccugaccacccggacccagcugccaccagccuacaccaacagcuucacccggggcgucuacuaccccgacaagguguuccggagcagcguccugcacagcacccaggaccuguuccugcccuucuucagcaacgugaccugguuccacgccauccacgugagcggcaccaacggcaccaagcgguucgacaaccccgugcugcccuucaacgacggcguguacuucgccagcaccgagaagagcaacaucauccggggcuggaucuucggcaccacccuggacagcaagacccagagccugcugaucgugaauaacgccaccaacguggugaucaaggugugcgaguuccaguucugcaacgaccccuuccugggcguguacuaccacaagaacaacaagagcuggauggagagcgaguuccggguguacagcagcgccaacaacugcaccuucgaguacgugagccagcccuuccugauggaccuggagggcaagcagggcaacuucaagaaccugcgggaguucguguucaagaacaucgacggcuacuucaagaucuacagcaagcacaccccaaucaaccuggugcgggaucugccccagggcuucucagugcuggagccccugguggaccugcccaucggcaucaacaucacccgguuccagacccugcuggcccugcaccggagcuaccugaccccaggcgacagcagcagcggguggacagcaggcgcggcugcuuacuacgugggcuaccugcagccccggaccuuccugcugaaguacaacgagaacggcaccaucaccgacgccguggacugcgcccuggacccucugagcgagaccaagugcacccugaagagcuucaccguggagaagggcaucuaccagaccagcaacuuccgggugcagcccaccgagagcaucgugcgguuccccaacaucaccaaccugugccccuucggcgagguguucaacgccacccgguucgccagcguguacgccuggaaccggaagcggaucagcaacugcguggccgacuacagcgugcuguacaacagcgccagcuucagcaccuucaagugcuacggcgugagccccaccaagcugaacgaccugugcuucaccaacguguacgccgacagcuucgugauccguggcgacgaggugcggcagaucgcacccggccagacaggcaagaucgccgacuacaacuacaagcugcccgacgacuucaccggcugcgugaucgccuggaacagcaacaaccucgacagcaaggugggcggcaacuacaacuaccuguaccggcuguuccggaagagcaaccugaagcccuucgagcgggacaucagcaccgagaucuaccaagccggcuccaccccuugcaacggcguggagggcuucaacugcuacuucccucugcagagcuacggcuuccagcccaccaacggcgugggcuaccagcccuaccgggugguggugcugagcuucgagcugcugcacgccccagccaccguguguggccccaagaagagcaccaaccuggugaagaacaagugcgugaacuucaacuucaacggccuuaccggcaccggcgugcugaccgagagcaacaagaaauuccugcccuuucagcaguucggccgggacaucgccgacaccaccgacgcugugcgggauccccagacccuggagauccuggacaucaccccuugcagcuucggcggcgugagcgugaucaccccaggcaccaacaccagcaaccagguggccgugcuguaccagggcgugaacugcaccgaggugcccguggccauccacgccgaccagcugacacccaccuggcgggucuacagcaccggcagcaacguguuccagacccgggccgguugccugaucggcgccgagcacgugaacaacagcuacgagugcgacauccccaucggcgccggcaucugugccagcuaccagacccagaccaauucaccccggagggcaaggagcguggccagccagagcaucaucgccuacaccaugagccugggcgccgagaacagcguggccuacagcaacaacagcaucgccauccccaccaacuucaccaucagcgugaccaccgagauucugcccgugagcaugaccaagaccagcguggacugcaccauguacaucugcggcgacagcaccgagugcagcaaccugcugcugcaguacggcagcuucugcacccagcugaaccgggcccugaccggcaucgccguggagcaggacaagaacacccaggagguguucgcccaggugaagcagaucuacaagaccccucccaucaaggacuucggcggcuucaacuucagccagauccugcccgaccccagcaagcccagcaagcggagcuucaucgaggaccugcuguucaacaaggugacccuagccgacgccggcuucaucaagcaguacggcgacugccucggcgacauagccgcccgggaccugaucugcgcccagaaguucaacggccugaccgugcugccuccccugcugaccgacgagaugaucgcccaguacaccagcgcccuguuagccggaaccaucaccagcggcuggacuuucggcgcuggagccgcucugcagauccccuucgccaugcagauggccuaccgguucaacggcaucggcgugacccagaacgugcuguacgagaaccagaagcugaucgccaaccaguucaacagcgccaucggcaagauccaggacagccugagcagcaccgcuagcgcccugggcaagcugcaggacguggugaaccagaacgcccaggcccugaacacccuggugaagcagcugagcagcaacuucggcgccaucagcagcgugcugaacgacauccugagccggcuggacccucccgaggccgaggugcagaucgaccggcugaucacuggccggcugcagagccugcagaccuacgugacccagcagcugauccgggccgccgagauucgggccagcgccaaccuggccgccaccaagaugagcgagugcgugcugggccagagcaagcggguggacuucugcggcaagggcuaccaccugaugagcuuuccccagagcgcaccccacggagugguguuccugcacgugaccuacgugcccgcccaggagaagaacuucaccaccgccccagccaucugccacgacggcaaggcccacuuuccccgggagggcguguucgugagcaacggcacccacugguucgugacccagcggaacuucuacgagccccagaucaucaccaccgacaacaccuucgugagcggcaacugcgacguggugaucggcaucgugaacaacaccguguacgauccccugcagcccgagcuggacagcuucaaggaggagcuggacaaguacuucaagaaucacaccagccccgacguggaccugggcgacaucagcggcaucaacgccagcguggugaacauccagaaggagaucgaucggcugaacgagguggccaagaaccugaacgagagccugaucgaccugcaggagcugggcaaguacgagcaguacaucaaguggcccugguacaucuggcugggcuucaucgccggccugaucgccaucgugauggugaccaucaugcugugcugcaugaccagcugcugcagcugccugaagggcuguugcagcugcggcagcugcugcaaguucgacgaggacgacagcgagcccgugcugaagggcgugaagcugcacuacaccugaggacuaguuauaagacugacuagcccgaugggccucccaacgggcccuccuccccuccuugcaccgagauuaauaaaaaaaaaaaaaaaaaaaaaaaaaaaaaaaaaaaaaaaaaaaaaaaaaaaaaaaaaaaaaaaaaaaaaaaaaaaaaaaaaaaaaaaaaaaaaaaaaaaa

SEQ ID NO: 25536 - RNA, 4011 nt, Artificial Sequence
  SARS-CoV-2/Wuhan/WIV05/2019__EPI_ISL_402128 spike protein mRNA gc (1-1273)(K986P_V987P_N439K_D614G)
aggagaaagcuuaccauguucguguuccuggugcugcugccccuggugagcagccagugcgugaaccugaccacccggacccagcugccaccagccuacaccaacagcuucacccggggcgucuacuaccccgacaagguguuccggagcagcguccugcacagcacccaggaccuguuccugcccuucuucagcaacgugaccugguuccacgccauccacgugagcggcaccaacggcaccaagcgguucgacaaccccgugcugcccuucaacgacggcguguacuucgccagcaccgagaagagcaacaucauccggggcuggaucuucggcaccacccuggacagcaagacccagagccugcugaucgugaauaacgccaccaacguggugaucaaggugugcgaguuccaguucugcaacgaccccuuccugggcguguacuaccacaagaacaacaagagcuggauggagagcgaguuccggguguacagcagcgccaacaacugcaccuucgaguacgugagccagcccuuccugauggaccuggagggcaagcagggcaacuucaagaaccugcgggaguucguguucaagaacaucgacggcuacuucaagaucuacagcaagcacaccccaaucaaccuggugcgggaucugccccagggcuucucagcccuggagccccugguggaccugcccaucggcaucaacaucacccgguuccagacccugcuggcccugcaccggagcuaccugaccccaggcgacagcagcagcggguggacagcaggcgcggcugcuuacuacgugggcuaccugcagccccggaccuuccugcugaaguacaacgagaacggcaccaucaccgacgccguggacugcgcccuggacccucugagcgagaccaagugcacccugaagagcuucaccguggagaagggcaucuaccagaccagcaacuuccgggugcagcccaccgagagcaucgugcgguuccccaacaucaccaaccugugccccuucggcgagguguucaacgccacccgguucgccagcguguacgccuggaaccggaagcggaucagcaacugcguggccgacuacagcgugcuguacaacagcgccagcuucagcaccuucaagugcuacggcgugagccccaccaagcugaacgaccugugcuucaccaacguguacgccgacagcuucgugauccguggcgacgaggugcggcagaucgcacccggccagacaggcaagaucgccgacuacaacuacaagcugcccgacgacuucaccggcugcgugaucgccuggaacagcaagaaccucgacagcaaggugggcggcaacuacaacuaccuguaccggcuguuccggaagagcaaccugaagcccuucgagcgggacaucagcaccgagaucuaccaagccggcuccaccccuugcaacggcguggagggcuucaacugcuacuucccucugcagagcuacggcuuccagcccaccaacggcgugggcuaccagcccuaccgggugguggugcugagcuucgagcugcugcacgccccagccaccguguguggccccaagaagagcaccaaccuggugaagaacaagugcgugaacuucaacuucaacggccuuaccggcaccggcgugcugaccgagagcaacaagaaauuccugcccuuucagcaguucggccgggacaucgccgacaccaccgacgcugugcgggauccccagacccuggagauccuggacaucaccccuugcagcuucggcggcgugagcgugaucaccccaggcaccaacaccagcaaccagguggccgugcuguaccagggcgugaacugcaccgaggugcccguggccauccacgccgaccagcugacacccaccuggcgggucuacagcaccggcagcaacguguuccagacccgggccgguugccugaucggcgccgagcacgugaacaacagcuacgagugcgacauccccaucggcgccggcaucugugccagcuaccagacccagaccaauucaccccggagggcaaggagcguggccagccagagcaucaucgccuacaccaugagccugggcgccgagaacagcguggccuacagcaacaacagcaucgccauccccaccaacuucaccaucagcgugaccaccgagauucugcccgugagcaugaccaagaccagcguggacugcaccauguacaucugcggcgacagcaccgagugcagcaaccugcugcugcaguacggcagcuucugcacccagcugaaccgggcccugaccggcaucgccguggagcaggacaagaacacccaggagguguucgcccaggugaagcagaucuacaagaccccucccaucaaggacuucggcggcuucaacuucagccagauccugcccgaccccagcaagcccagcaagcggagcuucaucgaggaccugcuguucaacaaggugacccuagccgacgccggcuucaucaagcaguacggcgacugccucggcgacauagccgcccgggaccugaucugcgcccagaaguucaacggccugaccgugcugccuccccugcugaccgacgagaugaucgcccaguacaccagcgcccuguuagccggaaccaucaccagcggcuggacuuucggcgcuggagccgcucugcagauccccuucgccaugcagauggccuaccgguucaacggcaucggcgugacccagaacgugcuguacgagaaccagaagcugaucgccaaccaguucaacagcgccaucggcaagauccaggacagccugagcagcaccgcuagcgcccugggcaagcugcaggacguggugaaccagaacgcccaggcccugaacacccuggugaagcagcugagcagcaacuucggcgccaucagcagcgugcugaacgacauccugagccggcuggacccucccgaggccgaggugcagaucgaccggcugaucacuggccggcugcagagccugcagaccuacgugacccagcagcugauccgggccgccgagauucgggccagcgccaaccuggccgccaccaagaugagcgagugcgugcugggccagagcaagcggguggacuucugcggcaagggcuaccaccugaugagcuuuccccagagcgcaccccacggagugguguuccugcacgugaccuacgugcccgcccaggagaagaacuucaccaccgccccagccaucugccacgacggcaaggcccacuuuccccgggagggcguguucgugagcaacggcacccacugguucgugacccagcggaacuucuacgagccccagaucaucaccaccgacaacaccuucgugagcggcaacugcgacguggugaucggcaucgugaacaacaccguguacgauccccugcagcccgagcuggacagcuucaaggaggagcuggacaaguacuucaagaaucacaccagccccgacguggaccugggcgacaucagcggcaucaacgccagcguggugaacauccagaaggagaucgaucggcugaacgagguggccaagaaccugaacgagagccugaucgaccugcaggagcugggcaaguacgagcaguacaucaaguggcccugguacaucuggcugggcuucaucgccggccugaucgccaucgugauggugaccaucaugcugugcugcaugaccagcugcugcagcugccugaagggcuguugcagcugcggcagcugcugcaaguucgacgaggacgacagcgagcccgugcugaagggcgugaagcugcacuacaccugaggacuaguuauaagacugacuagcccgaugggccucccaacgggcccuccuccccuccuugcaccgagauuaauaaaaaaaaaaaaaaaaaaaaaaaaaaaaaaaaaaaaaaaaaaaaaaaaaaaaaaaaaaaaaaaaaaaaaaaaaaaaaaaaaaaaaaaaaaaaaaaaaaaa

SEQ ID NO: 25537 - RNA, 4011 nt, Artificial Sequence
  SARS-CoV-2/Wuhan/WIV05/2019__EPI_ISL_402128 spike protein mRNA gc (1-1273)(K986P_V987P_S477N_D614G)
aggagaaagcuuaccauguucguguuccuggugcugcugccccuggugagcagccagugcgugaaccugaccacccggacccagcugccaccagccuacaccaacagcuucacccggggcgucuacuaccccgacaagguguuccggagcagcguccugcacagcacccaggaccuguuccugcccuucuucagcaacgugaccugguuccacgccauccacgugagcggcaccaacggcaccaagcgguucgacaaccccgugcugcccuucaacgacggcguguacuucgccagcaccgagaagagcaacaucauccggggcuggaucuucggcaccacccuggacagcaagacccagagccugcugaucgugaauaacgccaccaacguggugaucaaggugugcgaguuccaguucugcaacgaccccuuccugggcguguacuaccacaagaacaacaagagcuggauggagagcgaguuccggguguacagcagcgccaacaacugcaccuucgaguacgugagccagcccuuccugauggaccuggagggcaagcagggcaacuucaagaaccugcgggaguucguguucaagaacaucgacggcuacuucaagaucuacagcaagcacaccccaaucaaccuggugcgggaucugccccagggcuucucagcccuggagccccugguggaccugcccaucggcaucaacaucacccgguuccagacccugcuggcccugcaccggagcuaccugaccccaggcgacagcagcagcggguggacagcaggcgcggcugcuuacuacgugggcuaccugcagccccggaccuuccugcugaaguacaacgagaacggcaccaucaccgacgccguggacugcgcccuggacccucugagcgagaccaagugcacccugaagagcuucaccguggagaagggcaucuaccagaccagcaacuuccgggugcagcccaccgagagcaucgugcgguuccccaacaucaccaaccugugccccuucggcgagguguucaacgccacccgguucgccagcguguacgccuggaaccggaagcggaucagcaacugcguggccgacuacagcgugcuguacaacagcgccagcuucagcaccuucaagugcuacggcgugagccccaccaagcugaacgaccugugcuucaccaacguguacgccgacagcuucgugauccguggcgacgaggugcggcagaucgcacccggccagacaggcaagaucgccgacuacaacuacaagcugcccgacgacuucaccggcugcgugaucgccuggaacagcaacaaccucgacagcaaggugggcggcaacuacaacuaccuguaccggcuguuccggaagagcaaccugaagcccuucgagcgggacaucagcaccgagaucuaccaagccggcaacaccccuugcaacggcguggagggcuucaacugcuacuucccucugcagagcuacggcuuccagcccaccaacggcgugggcuaccagcccuaccgggugguggugcugagcuucgagcugcugcacgccccagccaccguguguggccccaagaagagcaccaaccuggugaagaacaagugcgugaacuucaacuucaacggccuuaccggcaccggcgugcugaccgagagcaacaagaaauuccugcccuuucagcaguucggccgggacaucgccgacaccaccgacgcugugcgggauccccagacccuggagauccuggacaucaccccuugcagcuucggcggcgugagcgugaucaccccaggcaccaacaccagcaaccagguggccgugcuguaccagggcgugaacugcaccgaggugcccguggccauccacgccgaccagcugacacccaccuggcgggucuacagcaccggcagcaacguguuccagacccgggccgguugccugaucggcgccgagcacgugaacaacagcuacgagugcgacauccccaucggcgccggcaucugugccagcuaccagacccagaccaauucaccccggagggcaaggagcguggccagccagagcaucaucgccuacaccaugagccugggcgccgagaacagcguggccuacagcaacaacagcaucgccauccccaccaacuucaccaucagcgugaccaccgagauucugcccgugagcaugaccaagaccagcguggacugcaccauguacaucugcggcgacagcaccgagugcagcaaccugcugcugcaguacggcagcuucugcacccagcugaaccgggcccugaccggcaucgccguggagcaggacaagaacacccaggagguguucgcccaggugaagcagaucuacaagaccccucccaucaaggacuucggcggcuucaacuucagccagauccugcccgaccccagcaagcccagcaagcggagcuucaucgaggaccugcuguucaacaaggugacccuagccgacgccggcuucaucaagcaguacggcgacugccucggcgacauagccgcccgggaccugaucugcgcccagaaguucaacggccugaccgugcugccuccccugcugaccgacgagaugaucgcccaguacaccagcgcccuguuagccggaaccaucaccagcggcuggacuuucggcgcuggagccgcucugcagauccccuucgccaugcagauggccuaccgguucaacggcaucggcgugacccagaacgugcuguacgagaaccagaagcugaucgccaaccaguucaacagcgccaucggcaagauccaggacagccugagcagcaccgcuagcgcccugggcaagcugcaggacguggugaaccagaacgcccaggcccugaacacccuggugaagcagcugagcagcaacuucggcgccaucagcagcgugcugaacgacauccugagccggcuggacccucccgaggccgaggugcagaucgaccggcugaucacuggccggcugcagagccugcagaccuacgugacccagcagcugauccgggccgccgagauucgggccagcgccaaccuggccgccaccaagaugagcgagugcgugcugggccagagcaagcggguggacuucugcggcaagggcuaccaccugaugagcuuuccccagagcgcaccccacggagugguguuccugcacgugaccuacgugcccgcccaggagaagaacuucaccaccgccccagccaucugccacgacggcaaggcccacuuuccccgggagggcguguucgugagcaacggcacccacugguucgugacccagcggaacuucuacgagccccagaucaucaccaccgacaacaccuucgugagcggcaacugcgacguggugaucggcaucgugaacaacaccguguacgauccccugcagcccgagcuggacagcuucaaggaggagcuggacaaguacuucaagaaucacaccagccccgacguggaccugggcgacaucagcggcaucaacgccagcguggugaacauccagaaggagaucgaucggcugaacgagguggccaagaaccugaacgagagccugaucgaccugcaggagcugggcaaguacgagcaguacaucaaguggcccugguacaucuggcugggcuucaucgccggccugaucgccaucgugauggugaccaucaugcugugcugcaugaccagcugcugcagcugccugaagggcuguugcagcugcggcagcugcugcaaguucgacgaggacgacagcgagcccgugcugaagggcgugaagcugcacuacaccugaggacuaguuauaagacugacuagcccgaugggccucccaacgggcccuccuccccuccuugcaccgagauuaauaaaaaaaaaaaaaaaaaaaaaaaaaaaaaaaaaaaaaaaaaaaaaaaaaaaaaaaaaaaaaaaaaaaaaaaaaaaaaaaaaaaaaaaaaaaaaaaaaaaa

SEQ ID NO: 25538 - RNA, 4011 nt, Artificial Sequence
  SARS-CoV-2/Wuhan/WIV05/2019__EPI_ISL_402128 spike protein mRNA gc (1-1273)(K986P_V987P_N501Y_D614G)
aggagaaagcuuaccauguucguguuccuggugcugcugccccuggugagcagccagugcgugaaccugaccacccggacccagcugccaccagccuacaccaacagcuucacccggggcgucuacuaccccgacaagguguuccggagcagcguccugcacagcacccaggaccuguuccugcccuucuucagcaacgugaccugguuccacgccauccacgugagcggcaccaacggcaccaagcgguucgacaaccccgugcugcccuucaacgacggcguguacuucgccagcaccgagaagagcaacaucauccggggcuggaucuucggcaccacccuggacagcaagacccagagccugcugaucgugaauaacgccaccaacguggugaucaaggugugcgaguuccaguucugcaacgaccccuuccugggcguguacuaccacaagaacaacaagagcuggauggagagcgaguuccggguguacagcagcgccaacaacugcaccuucgaguacgugagccagcccuuccugauggaccuggagggcaagcagggcaacuucaagaaccugcgggaguucguguucaagaacaucgacggcuacuucaagaucuacagcaagcacaccccaaucaaccuggugcgggaucugccccagggcuucucagcccuggagccccugguggaccugcccaucggcaucaacaucacccgguuccagacccugcuggcccugcaccggagcuaccugaccccaggcgacagcagcagcggguggacagcaggcgcggcugcuuacuacgugggcuaccugcagccccggaccuuccugcugaaguacaacgagaacggcaccaucaccgacgccguggacugcgcccuggacccucugagcgagaccaagugcacccugaagagcuucaccguggagaagggcaucuaccagaccagcaacuuccgggugcagcccaccgagagcaucgugcgguuccccaacaucaccaaccugugccccuucggcgagguguucaacgccacccgguucgccagcguguacgccuggaaccggaagcggaucagcaacugcguggccgacuacagcgugcuguacaacagcgccagcuucagcaccuucaagugcuacggcgugagccccaccaagcugaacgaccugugcuucaccaacguguacgccgacagcuucgugauccguggcgacgaggugcggcagaucgcacccggccagacaggcaagaucgccgacuacaacuacaagcugcccgacgacuucaccggcugcgugaucgccuggaacagcaacaaccucgacagcaaggugggcggcaacuacaacuaccuguaccggcuguuccggaagagcaaccugaagcccuucgagcgggacaucagcaccgagaucuaccaagccggcuccaccccuugcaacggcguggagggcuucaacugcuacuucccucugcagagcuacggcuuccagcccaccuacggcgugggcuaccagcccuaccgggugguggugcugagcuucgagcugcugcacgccccagccaccguguguggccccaagaagagcaccaaccuggugaagaacaagugcgugaacuucaacuucaacggccuuaccggcaccggcgugcugaccgagagcaacaagaaauuccugcccuuucagcaguucggccgggacaucgccgacaccaccgacgcugugcgggauccccagacccuggagauccuggacaucaccccuugcagcuucggcggcgugagcgugaucaccccaggcaccaacaccagcaaccagguggccgugcuguaccagggcgugaacugcaccgaggugcccguggccauccacgccgaccagcugacacccaccuggcgggucuacagcaccggcagcaacguguuccagacccgggccgguugccugaucggcgccgagcacgugaacaacagcuacgagugcgacauccccaucggcgccggcaucugugccagcuaccagacccagaccaauucaccccggagggcaaggagcguggccagccagagcaucaucgccuacaccaugagccugggcgccgagaacagcguggccuacagcaacaacagcaucgccauccccaccaacuucaccaucagcgugaccaccgagauucugcccgugagcaugaccaagaccagcguggacugcaccauguacaucugcggcgacagcaccgagugcagcaaccugcugcugcaguacggcagcuucugcacccagcugaaccgggcccugaccggcaucgccguggagcaggacaagaacacccaggagguguucgcccaggugaagcagaucuacaagaccccucccaucaaggacuucggcggcuucaacuucagccagauccugcccgaccccagcaagcccagcaagcggagcuucaucgaggaccugcuguucaacaaggugacccuagccgacgccggcuucaucaagcaguacggcgacugccucggcgacauagccgcccgggaccugaucugcgcccagaaguucaacggccugaccgugcugccuccccugcugaccgacgagaugaucgcccaguacaccagcgcccuguuagccggaaccaucaccagcggcuggacuuucggcgcuggagccgcucugcagauccccuucgccaugcagauggccuaccgguucaacggcaucggcgugacccagaacgugcuguacgagaaccagaagcugaucgccaaccaguucaacagcgccaucggcaagauccaggacagccugagcagcaccgcuagcgcccugggcaagcugcaggacguggugaaccagaacgcccaggcccugaacacccuggugaagcagcugagcagcaacuucggcgccaucagcagcgugcugaacgacauccugagccggcuggacccucccgaggccgaggugcagaucgaccggcugaucacuggccggcugcagagccugcagaccuacgugacccagcagcugauccgggccgccgagauucgggccagcgccaaccuggccgccaccaagaugagcgagugcgugcugggccagagcaagcggguggacuucugcggcaagggcuaccaccugaugagcuuuccccagagcgcaccccacggagugguguuccugcacgugaccuacgugcccgcccaggagaagaacuucaccaccgccccagccaucugccacgacggcaaggcccacuuuccccgggagggcguguucgugagcaacggcacccacugguucgugacccagcggaacuucuacgagccccagaucaucaccaccgacaacaccuucgugagcggcaacugcgacguggugaucggcaucgugaacaacaccguguacgauccccugcagcccgagcuggacagcuucaaggaggagcuggacaaguacuucaagaaucacaccagccccgacguggaccugggcgacaucagcggcaucaacgccagcguggugaacauccagaaggagaucgaucggcugaacgagguggccaagaaccugaacgagagccugaucgaccugcaggagcugggcaaguacgagcaguacaucaaguggcccugguacaucuggcugggcuucaucgccggccugaucgccaucgugauggugaccaucaugcugugcugcaugaccagcugcugcagcugccugaagggcuguugcagcugcggcagcugcugcaaguucgacgaggacgacagcgagcccgugcugaagggcgugaagcugcacuacaccugaggacuaguuauaagacugacuagcccgaugggccucccaacgggcccuccuccccuccuugcaccgagauuaauaaaaaaaaaaaaaaaaaaaaaaaaaaaaaaaaaaaaaaaaaaaaaaaaaaaaaaaaaaaaaaaaaaaaaaaaaaaaaaaaaaaaaaaaaaaaaaaaaaaa

SEQ ID NO: 25539 - RNA, 4005 nt, Artificial Sequence
  SARS-CoV-2/Wuhan/WIV05/2019__EPI_ISL_402128 spike protein mRNA gc (1-1273)(K986P_V987P_H69del_V70del_D614G)
aggagaaagcuuaccauguucguguuccuggugcugcugccccuggugagcagccagugcgugaaccugaccacccggacccagcugccaccagccuacaccaacagcuucacccggggcgucuacuaccccgacaagguguuccggagcagcguccugcacagcacccaggaccuguuccugcccuucuucagcaacgugaccugguuccacgccaucagcggcaccaacggcaccaagcgguucgacaaccccgugcugcccuucaacgacggcguguacuucgccagcaccgagaagagcaacaucauccggggcuggaucuucggcaccacccuggacagcaagacccagagccugcugaucgugaauaacgccaccaacguggugaucaaggugugcgaguuccaguucugcaacgaccccuuccugggcguguacuaccacaagaacaacaagagcuggauggagagcgaguuccggguguacagcagcgccaacaacugcaccuucgaguacgugagccagcccuuccugauggaccuggagggcaagcagggcaacuucaagaaccugcgggaguucguguucaagaacaucgacggcuacuucaagaucuacagcaagcacaccccaaucaaccuggugcgggaucugccccagggcuucucagcccuggagccccugguggaccugcccaucggcaucaacaucacccgguuccagacccugcuggcccugcaccggagcuaccugaccccaggcgacagcagcagcggguggacagcaggcgcggcugcuuacuacgugggcuaccugcagccccggaccuuccugcugaaguacaacgagaacggcaccaucaccgacgccguggacugcgcccuggacccucugagcgagaccaagugcacccugaagagcuucaccguggagaagggcaucuaccagaccagcaacuuccgggugcagcccaccgagagcaucgugcgguuccccaacaucaccaaccugugccccuucggcgagguguucaacgccacccgguucgccagcguguacgccuggaaccggaagcggaucagcaacugcguggccgacuacagcgugcuguacaacagcgccagcuucagcaccuucaagugcuacggcgugagccccaccaagcugaacgaccugugcuucaccaacguguacgccgacagcuucgugauccguggcgacgaggugcggcagaucgcacccggccagacaggcaagaucgccgacuacaacuacaagcugcccgacgacuucaccggcugcgugaucgccuggaacagcaacaaccucgacagcaaggugggcggcaacuacaacuaccuguaccggcuguuccggaagagcaaccugaagcccuucgagcgggacaucagcaccgagaucuaccaagccggcuccaccccuugcaacggcguggagggcuucaacugcuacuucccucugcagagcuacggcuuccagcccaccaacggcgugggcuaccagcccuaccgggugguggugcugagcuucgagcugcugcacgccccagccaccguguguggccccaagaagagcaccaaccuggugaagaacaagugcgugaacuucaacuucaacggccuuaccggcaccggcgugcugaccgagagcaacaagaaauuccugcccuuucagcaguucggccgggacaucgccgacaccaccgacgcugugcgggauccccagacccuggagauccuggacaucaccccuugcagcuucggcggcgugagcgugaucaccccaggcaccaacaccagcaaccagguggccgugcuguaccagggcgugaacugcaccgaggugcccguggccauccacgccgaccagcugacacccaccuggcgggucuacagcaccggcagcaacguguuccagacccgggccgguugccugaucggcgccgagcacgugaacaacagcuacgagugcgacauccccaucggcgccggcaucugugccagcuaccagacccagaccaauucaccccggagggcaaggagcguggccagccagagcaucaucgccuacaccaugagccugggcgccgagaacagcguggccuacagcaacaacagcaucgccauccccaccaacuucaccaucagcgugaccaccgagauucugcccgugagcaugaccaagaccagcguggacugcaccauguacaucugcggcgacagcaccgagugcagcaaccugcugcugcaguacggcagcuucugcacccagcugaaccgggcccugaccggcaucgccguggagcaggacaagaacacccaggagguguucgcccaggugaagcagaucuacaagaccccucccaucaaggacuucggcggcuucaacuucagccagauccugcccgaccccagcaagcccagcaagcggagcuucaucgaggaccugcuguucaacaaggugacccuagccgacgccggcuucaucaagcaguacggcgacugccucggcgacauagccgcccgggaccugaucugcgcccagaaguucaacggccugaccgugcugccuccccugcugaccgacgagaugaucgcccaguacaccagcgcccuguuagccggaaccaucaccagcggcuggacuuucggcgcuggagccgcucugcagauccccuucgccaugcagauggccuaccgguucaacggcaucggcgugacccagaacgugcuguacgagaaccagaagcugaucgccaaccaguucaacagcgccaucggcaagauccaggacagccugagcagcaccgcuagcgcccugggcaagcugcaggacguggugaaccagaacgcccaggcccugaacacccuggugaagcagcugagcagcaacuucggcgccaucagcagcgugcugaacgacauccugagccggcuggacccucccgaggccgaggugcagaucgaccggcugaucacuggccggcugcagagccugcagaccuacgugacccagcagcugauccgggccgccgagauucgggccagcgccaaccuggccgccaccaagaugagcgagugcgugcugggccagagcaagcggguggacuucugcggcaagggcuaccaccugaugagcuuuccccagagcgcaccccacggagugguguuccugcacgugaccuacgugcccgcccaggagaagaacuucaccaccgccccagccaucugccacgacggcaaggcccacuuuccccgggagggcguguucgugagcaacggcacccacugguucgugacccagcggaacuucuacgagccccagaucaucaccaccgacaacaccuucgugagcggcaacugcgacguggugaucggcaucgugaacaacaccguguacgauccccugcagcccgagcuggacagcuucaaggaggagcuggacaaguacuucaagaaucacaccagccccgacguggaccugggcgacaucagcggcaucaacgccagcguggugaacauccagaaggagaucgaucggcugaacgagguggccaagaaccugaacgagagccugaucgaccugcaggagcugggcaaguacgagcaguacaucaaguggcccugguacaucuggcugggcuucaucgccggccugaucgccaucgugauggugaccaucaugcugugcugcaugaccagcugcugcagcugccugaagggcuguugcagcugcggcagcugcugcaaguucgacgaggacgacagcgagcccgugcugaagggcgugaagcugcacuacaccugaggacuaguuauaagacugacuagcccgaugggccucccaacgggcccuccuccccuccuugcaccgagauuaauaaaaaaaaaaaaaaaaaaaaaaaaaaaaaaaaaaaaaaaaaaaaaaaaaaaaaaaaaaaaaaaaaaaaaaaaaaaaaaaaaaaaaaaaaaaaaaaaaaaa

SEQ ID NO: 25540 - RNA, 4011 nt, Artificial Sequence
  SARS-CoV-2/Wuhan/WIV05/2019__EPI_ISL_402128 spike protein mRNA gc (1-1273)(K986P_V987P_Y453F_D614G)
aggagaaagcuuaccauguucguguuccuggugcugcugccccuggugagcagccagugcgugaaccugaccacccggacccagcugccaccagccuacaccaacagcuucacccggggcgucuacuaccccgacaagguguuccggagcagcguccugcacagcacccaggaccuguuccugcccuucuucagcaacgugaccugguuccacgccauccacgugagcggcaccaacggcaccaagcgguucgacaaccccgugcugcccuucaacgacggcguguacuucgccagcaccgagaagagcaacaucauccggggcuggaucuucggcaccacccuggacagcaagacccagagccugcugaucgugaauaacgccaccaacguggugaucaaggugugcgaguuccaguucugcaacgaccccuuccugggcguguacuaccacaagaacaacaagagcuggauggagagcgaguuccggguguacagcagcgccaacaacugcaccuucgaguacgugagccagcccuuccugauggaccuggagggcaagcagggcaacuucaagaaccugcgggaguucguguucaagaacaucgacggcuacuucaagaucuacagcaagcacaccccaaucaaccuggugcgggaucugccccagggcuucucagcccuggagccccugguggaccugcccaucggcaucaacaucacccgguuccagacccugcuggcccugcaccggagcuaccugaccccaggcgacagcagcagcggguggacagcaggcgcggcugcuuacuacgugggcuaccugcagccccggaccuuccugcugaaguacaacgagaacggcaccaucaccgacgccguggacugcgcccuggacccucugagcgagaccaagugcacccugaagagcuucaccguggagaagggcaucuaccagaccagcaacuuccgggugcagcccaccgagagcaucgugcgguuccccaacaucaccaaccugugccccuucggcgagguguucaacgccacccgguucgccagcguguacgccuggaaccggaagcggaucagcaacugcguggccgacuacagcgugcuguacaacagcgccagcuucagcaccuucaagugcuacggcgugagccccaccaagcugaacgaccugugcuucaccaacguguacgccgacagcuucgugauccguggcgacgaggugcggcagaucgcacccggccagacaggcaagaucgccgacuacaacuacaagcugcccgacgacuucaccggcugcgugaucgccuggaacagcaacaaccucgacagcaaggugggcggcaacuacaacuaccuguuccggcuguuccggaagagcaaccugaagcccuucgagcgggacaucagcaccgagaucuaccaagccggcuccaccccuugcaacggcguggagggcuucaacugcuacuucccucugcagagcuacggcuuccagcccaccaacggcgugggcuaccagcccuaccgggugguggugcugagcuucgagcugcugcacgccccagccaccguguguggccccaagaagagcaccaaccuggugaagaacaagugcgugaacuucaacuucaacggccuuaccggcaccggcgugcugaccgagagcaacaagaaauuccugcccuuucagcaguucggccgggacaucgccgacaccaccgacgcugugcgggauccccagacccuggagauccuggacaucaccccuugcagcuucggcggcgugagcgugaucaccccaggcaccaacaccagcaaccagguggccgugcuguaccagggcgugaacugcaccgaggugcccguggccauccacgccgaccagcugacacccaccuggcgggucuacagcaccggcagcaacguguuccagacccgggccgguugccugaucggcgccgagcacgugaacaacagcuacgagugcgacauccccaucggcgccggcaucugugccagcuaccagacccagaccaauucaccccggagggcaaggagcguggccagccagagcaucaucgccuacaccaugagccugggcgccgagaacagcguggccuacagcaacaacagcaucgccauccccaccaacuucaccaucagcgugaccaccgagauucugcccgugagcaugaccaagaccagcguggacugcaccauguacaucugcggcgacagcaccgagugcagcaaccugcugcugcaguacggcagcuucugcacccagcugaaccgggcccugaccggcaucgccguggagcaggacaagaacacccaggagguguucgcccaggugaagcagaucuacaagaccccucccaucaaggacuucggcggcuucaacuucagccagauccugcccgaccccagcaagcccagcaagcggagcuucaucgaggaccugcuguucaacaaggugacccuagccgacgccggcuucaucaagcaguacggcgacugccucggcgacauagccgcccgggaccugaucugcgcccagaaguucaacggccugaccgugcugccuccccugcugaccgacgagaugaucgcccaguacaccagcgcccuguuagccggaaccaucaccagcggcuggacuuucggcgcuggagccgcucugcagauccccuucgccaugcagauggccuaccgguucaacggcaucggcgugacccagaacgugcuguacgagaaccagaagcugaucgccaaccaguucaacagcgccaucggcaagauccaggacagccugagcagcaccgcuagcgcccugggcaagcugcaggacguggugaaccagaacgcccaggcccugaacacccuggugaagcagcugagcagcaacuucggcgccaucagcagcgugcugaacgacauccugagccggcuggacccucccgaggccgaggugcagaucgaccggcugaucacuggccggcugcagagccugcagaccuacgugacccagcagcugauccgggccgccgagauucgggccagcgccaaccuggccgccaccaagaugagcgagugcgugcugggccagagcaagcggguggacuucugcggcaagggcuaccaccugaugagcuuuccccagagcgcaccccacggagugguguuccugcacgugaccuacgugcccgcccaggagaagaacuucaccaccgccccagccaucugccacgacggcaaggcccacuuuccccgggagggcguguucgugagcaacggcacccacugguucgugacccagcggaacuucuacgagccccagaucaucaccaccgacaacaccuucgugagcggcaacugcgacguggugaucggcaucgugaacaacaccguguacgauccccugcagcccgagcuggacagcuucaaggaggagcuggacaaguacuucaagaaucacaccagccccgacguggaccugggcgacaucagcggcaucaacgccagcguggugaacauccagaaggagaucgaucggcugaacgagguggccaagaaccugaacgagagccugaucgaccugcaggagcugggcaaguacgagcaguacaucaaguggcccugguacaucuggcugggcuucaucgccggccugaucgccaucgugauggugaccaucaugcugugcugcaugaccagcugcugcagcugccugaagggcuguugcagcugcggcagcugcugcaaguucgacgaggacgacagcgagcccgugcugaagggcgugaagcugcacuacaccugaggacuaguuauaagacugacuagcccgaugggccucccaacgggcccuccuccccuccuugcaccgagauuaauaaaaaaaaaaaaaaaaaaaaaaaaaaaaaaaaaaaaaaaaaaaaaaaaaaaaaaaaaaaaaaaaaaaaaaaaaaaaaaaaaaaaaaaaaaaaaaaaaaaa

SEQ ID NO: 25541 - RNA, 4011 nt, Artificial Sequence
  SARS-CoV-2/Wuhan/WIV05/2019__EPI_ISL_402128 spike protein mRNA gc (1-1273)(K986P_V987P_D614G_I692V)
aggagaaagcuuaccauguucguguuccuggugcugcugccccuggugagcagccagugcgugaaccugaccacccggacccagcugccaccagccuacaccaacagcuucacccggggcgucuacuaccccgacaagguguuccggagcagcguccugcacagcacccaggaccuguuccugcccuucuucagcaacgugaccugguuccacgccauccacgugagcggcaccaacggcaccaagcgguucgacaaccccgugcugcccuucaacgacggcguguacuucgccagcaccgagaagagcaacaucauccggggcuggaucuucggcaccacccuggacagcaagacccagagccugcugaucgugaauaacgccaccaacguggugaucaaggugugcgaguuccaguucugcaacgaccccuuccugggcguguacuaccacaagaacaacaagagcuggauggagagcgaguuccggguguacagcagcgccaacaacugcaccuucgaguacgugagccagcccuuccugauggaccuggagggcaagcagggcaacuucaagaaccugcgggaguucguguucaagaacaucgacggcuacuucaagaucuacagcaagcacaccccaaucaaccuggugcgggaucugccccagggcuucucagcccuggagccccugguggaccugcccaucggcaucaacaucacccgguuccagacccugcuggcccugcaccggagcuaccugaccccaggcgacagcagcagcggguggacagcaggcgcggcugcuuacuacgugggcuaccugcagccccggaccuuccugcugaaguacaacgagaacggcaccaucaccgacgccguggacugcgcccuggacccucugagcgagaccaagugcacccugaagagcuucaccguggagaagggcaucuaccagaccagcaacuuccgggugcagcccaccgagagcaucgugcgguuccccaacaucaccaaccugugccccuucggcgagguguucaacgccacccgguucgccagcguguacgccuggaaccggaagcggaucagcaacugcguggccgacuacagcgugcuguacaacagcgccagcuucagcaccuucaagugcuacggcgugagccccaccaagcugaacgaccugugcuucaccaacguguacgccgacagcuucgugauccguggcgacgaggugcggcagaucgcacccggccagacaggcaagaucgccgacuacaacuacaagcugcccgacgacuucaccggcugcgugaucgccuggaacagcaacaaccucgacagcaaggugggcggcaacuacaacuaccuguaccggcuguuccggaagagcaaccugaagcccuucgagcgggacaucagcaccgagaucuaccaagccggcuccaccccuugcaacggcguggagggcuucaacugcuacuucccucugcagagcuacggcuuccagcccaccaacggcgugggcuaccagcccuaccgggugguggugcugagcuucgagcugcugcacgccccagccaccguguguggccccaagaagagcaccaaccuggugaagaacaagugcgugaacuucaacuucaacggccuuaccggcaccggcgugcugaccgagagcaacaagaaauuccugcccuuucagcaguucggccgggacaucgccgacaccaccgacgcugugcgggauccccagacccuggagauccuggacaucaccccuugcagcuucggcggcgugagcgugaucaccccaggcaccaacaccagcaaccagguggccgugcuguaccagggcgugaacugcaccgaggugcccguggccauccacgccgaccagcugacacccaccuggcgggucuacagcaccggcagcaacguguuccagacccgggccgguugccugaucggcgccgagcacgugaacaacagcuacgagugcgacauccccaucggcgccggcaucugugccagcuaccagacccagaccaauucaccccggagggcaaggagcguggccagccagagcgugaucgccuacaccaugagccugggcgccgagaacagcguggccuacagcaacaacagcaucgccauccccaccaacuucaccaucagcgugaccaccgagauucugcccgugagcaugaccaagaccagcguggacugcaccauguacaucugcggcgacagcaccgagugcagcaaccugcugcugcaguacggcagcuucugcacccagcugaaccgggcccugaccggcaucgccguggagcaggacaagaacacccaggagguguucgcccaggugaagcagaucuacaagaccccucccaucaaggacuucggcggcuucaacuucagccagauccugcccgaccccagcaagcccagcaagcggagcuucaucgaggaccugcuguucaacaaggugacccuagccgacgccggcuucaucaagcaguacggcgacugccucggcgacauagccgcccgggaccugaucugcgcccagaaguucaacggccugaccgugcugccuccccugcugaccgacgagaugaucgcccaguacaccagcgcccuguuagccggaaccaucaccagcggcuggacuuucggcgcuggagccgcucugcagauccccuucgccaugcagauggccuaccgguucaacggcaucggcgugacccagaacgugcuguacgagaaccagaagcugaucgccaaccaguucaacagcgccaucggcaagauccaggacagccugagcagcaccgcuagcgcccugggcaagcugcaggacguggugaaccagaacgcccaggcccugaacacccuggugaagcagcugagcagcaacuucggcgccaucagcagcgugcugaacgacauccugagccggcuggacccucccgaggccgaggugcagaucgaccggcugaucacuggccggcugcagagccugcagaccuacgugacccagcagcugauccgggccgccgagauucgggccagcgccaaccuggccgccaccaagaugagcgagugcgugcugggccagagcaagcggguggacuucugcggcaagggcuaccaccugaugagcuuuccccagagcgcaccccacggagugguguuccugcacgugaccuacgugcccgcccaggagaagaacuucaccaccgccccagccaucugccacgacggcaaggcccacuuuccccgggagggcguguucgugagcaacggcacccacugguucgugacccagcggaacuucuacgagccccagaucaucaccaccgacaacaccuucgugagcggcaacugcgacguggugaucggcaucgugaacaacaccguguacgauccccugcagcccgagcuggacagcuucaaggaggagcuggacaaguacuucaagaaucacaccagccccgacguggaccugggcgacaucagcggcaucaacgccagcguggugaacauccagaaggagaucgaucggcugaacgagguggccaagaaccugaacgagagccugaucgaccugcaggagcugggcaaguacgagcaguacaucaaguggcccugguacaucuggcugggcuucaucgccggccugaucgccaucgugauggugaccaucaugcugugcugcaugaccagcugcugcagcugccugaagggcuguugcagcugcggcagcugcugcaaguucgacgaggacgacagcgagcccgugcugaagggcgugaagcugcacuacaccugaggacuaguuauaagacugacuagcccgaugggccucccaacgggcccuccuccccuccuugcaccgagauuaauaaaaaaaaaaaaaaaaaaaaaaaaaaaaaaaaaaaaaaaaaaaaaaaaaaaaaaaaaaaaaaaaaaaaaaaaaaaaaaaaaaaaaaaaaaaaaaaaaaaa

SEQ ID NO: 25542 - RNA, 4011 nt, Artificial Sequence
  SARS-CoV-2/Wuhan/WIV05/2019__EPI_ISL_402128 spike protein mRNA gc (1-1273)(K986P_V987P_D614G_M1229I)
aggagaaagcuuaccauguucguguuccuggugcugcugccccuggugagcagccagugcgugaaccugaccacccggacccagcugccaccagccuacaccaacagcuucacccggggcgucuacuaccccgacaagguguuccggagcagcguccugcacagcacccaggaccuguuccugcccuucuucagcaacgugaccugguuccacgccauccacgugagcggcaccaacggcaccaagcgguucgacaaccccgugcugcccuucaacgacggcguguacuucgccagcaccgagaagagcaacaucauccggggcuggaucuucggcaccacccuggacagcaagacccagagccugcugaucgugaauaacgccaccaacguggugaucaaggugugcgaguuccaguucugcaacgaccccuuccugggcguguacuaccacaagaacaacaagagcuggauggagagcgaguuccggguguacagcagcgccaacaacugcaccuucgaguacgugagccagcccuuccugauggaccuggagggcaagcagggcaacuucaagaaccugcgggaguucguguucaagaacaucgacggcuacuucaagaucuacagcaagcacaccccaaucaaccuggugcgggaucugccccagggcuucucagcccuggagccccugguggaccugcccaucggcaucaacaucacccgguuccagacccugcuggcccugcaccggagcuaccugaccccaggcgacagcagcagcggguggacagcaggcgcggcugcuuacuacgugggcuaccugcagccccggaccuuccugcugaaguacaacgagaacggcaccaucaccgacgccguggacugcgcccuggacccucugagcgagaccaagugcacccugaagagcuucaccguggagaagggcaucuaccagaccagcaacuuccgggugcagcccaccgagagcaucgugcgguuccccaacaucaccaaccugugccccuucggcgagguguucaacgccacccgguucgccagcguguacgccuggaaccggaagcggaucagcaacugcguggccgacuacagcgugcuguacaacagcgccagcuucagcaccuucaagugcuacggcgugagccccaccaagcugaacgaccugugcuucaccaacguguacgccgacagcuucgugauccguggcgacgaggugcggcagaucgcacccggccagacaggcaagaucgccgacuacaacuacaagcugcccgacgacuucaccggcugcgugaucgccuggaacagcaacaaccucgacagcaaggugggcggcaacuacaacuaccuguaccggcuguuccggaagagcaaccugaagcccuucgagcgggacaucagcaccgagaucuaccaagccggcuccaccccuugcaacggcguggagggcuucaacugcuacuucccucugcagagcuacggcuuccagcccaccaacggcgugggcuaccagcccuaccgggugguggugcugagcuucgagcugcugcacgccccagccaccguguguggccccaagaagagcaccaaccuggugaagaacaagugcgugaacuucaacuucaacggccuuaccggcaccggcgugcugaccgagagcaacaagaaauuccugcccuuucagcaguucggccgggacaucgccgacaccaccgacgcugugcgggauccccagacccuggagauccuggacaucaccccuugcagcuucggcggcgugagcgugaucaccccaggcaccaacaccagcaaccagguggccgugcuguaccagggcgugaacugcaccgaggugcccguggccauccacgccgaccagcugacacccaccuggcgggucuacagcaccggcagcaacguguuccagacccgggccgguugccugaucggcgccgagcacgugaacaacagcuacgagugcgacauccccaucggcgccggcaucugugccagcuaccagacccagaccaauucaccccggagggcaaggagcguggccagccagagcaucaucgccuacaccaugagccugggcgccgagaacagcguggccuacagcaacaacagcaucgccauccccaccaacuucaccaucagcgugaccaccgagauucugcccgugagcaugaccaagaccagcguggacugcaccauguacaucugcggcgacagcaccgagugcagcaaccugcugcugcaguacggcagcuucugcacccagcugaaccgggcccugaccggcaucgccguggagcaggacaagaacacccaggagguguucgcccaggugaagcagaucuacaagaccccucccaucaaggacuucggcggcuucaacuucagccagauccugcccgaccccagcaagcccagcaagcggagcuucaucgaggaccugcuguucaacaaggugacccuagccgacgccggcuucaucaagcaguacggcgacugccucggcgacauagccgcccgggaccugaucugcgcccagaaguucaacggccugaccgugcugccuccccugcugaccgacgagaugaucgcccaguacaccagcgcccuguuagccggaaccaucaccagcggcuggacuuucggcgcuggagccgcucugcagauccccuucgccaugcagauggccuaccgguucaacggcaucggcgugacccagaacgugcuguacgagaaccagaagcugaucgccaaccaguucaacagcgccaucggcaagauccaggacagccugagcagcaccgcuagcgcccugggcaagcugcaggacguggugaaccagaacgcccaggcccugaacacccuggugaagcagcugagcagcaacuucggcgccaucagcagcgugcugaacgacauccugagccggcuggacccucccgaggccgaggugcagaucgaccggcugaucacuggccggcugcagagccugcagaccuacgugacccagcagcugauccgggccgccgagauucgggccagcgccaaccuggccgccaccaagaugagcgagugcgugcugggccagagcaagcggguggacuucugcggcaagggcuaccaccugaugagcuuuccccagagcgcaccccacggagugguguuccugcacgugaccuacgugcccgcccaggagaagaacuucaccaccgccccagccaucugccacgacggcaaggcccacuuuccccgggagggcguguucgugagcaacggcacccacugguucgugacccagcggaacuucuacgagccccagaucaucaccaccgacaacaccuucgugagcggcaacugcgacguggugaucggcaucgugaacaacaccguguacgauccccugcagcccgagcuggacagcuucaaggaggagcuggacaaguacuucaagaaucacaccagccccgacguggaccugggcgacaucagcggcaucaacgccagcguggugaacauccagaaggagaucgaucggcugaacgagguggccaagaaccugaacgagagccugaucgaccugcaggagcugggcaaguacgagcaguacaucaaguggcccugguacaucuggcugggcuucaucgccggccugaucgccaucgugaucgugaccaucaugcugugcugcaugaccagcugcugcagcugccugaagggcuguugcagcugcggcagcugcugcaaguucgacgaggacgacagcgagcccgugcugaagggcgugaagcugcacuacaccugaggacuaguuauaagacugacuagcccgaugggccucccaacgggcccuccuccccuccuugcaccgagauuaauaaaaaaaaaaaaaaaaaaaaaaaaaaaaaaaaaaaaaaaaaaaaaaaaaaaaaaaaaaaaaaaaaaaaaaaaaaaaaaaaaaaaaaaaaaaaaaaaaaaa

SEQ ID NO: 25543 - RNA, 4005 nt, Artificial Sequence
  SARS-CoV-2/Wuhan/WIV05/2019__EPI_ISL_402128 spike protein mRNA gc (1-1273)(K986P_V987P_H69del_V70del_A222V_Y453F_S477N_D614G_I692V)
aggagaaagcuuaccauguucguguuccuggugcugcugccccuggugagcagccagugcgugaaccugaccacccggacccagcugccaccagccuacaccaacagcuucacccggggcgucuacuaccccgacaagguguuccggagcagcguccugcacagcacccaggaccuguuccugcccuucuucagcaacgugaccugguuccacgccaucagcggcaccaacggcaccaagcgguucgacaaccccgugcugcccuucaacgacggcguguacuucgccagcaccgagaagagcaacaucauccggggcuggaucuucggcaccacccuggacagcaagacccagagccugcugaucgugaauaacgccaccaacguggugaucaaggugugcgaguuccaguucugcaacgaccccuuccugggcguguacuaccacaagaacaacaagagcuggauggagagcgaguuccggguguacagcagcgccaacaacugcaccuucgaguacgugagccagcccuuccugauggaccuggagggcaagcagggcaacuucaagaaccugcgggaguucguguucaagaacaucgacggcuacuucaagaucuacagcaagcacaccccaaucaaccuggugcgggaucugccccagggcuucucagugcuggagccccugguggaccugcccaucggcaucaacaucacccgguuccagacccugcuggcccugcaccggagcuaccugaccccaggcgacagcagcagcggguggacagcaggcgcggcugcuuacuacgugggcuaccugcagccccggaccuuccugcugaaguacaacgagaacggcaccaucaccgacgccguggacugcgcccuggacccucugagcgagaccaagugcacccugaagagcuucaccguggagaagggcaucuaccagaccagcaacuuccgggugcagcccaccgagagcaucgugcgguuccccaacaucaccaaccugugccccuucggcgagguguucaacgccacccgguucgccagcguguacgccuggaaccggaagcggaucagcaacugcguggccgacuacagcgugcuguacaacagcgccagcuucagcaccuucaagugcuacggcgugagccccaccaagcugaacgaccugugcuucaccaacguguacgccgacagcuucgugauccguggcgacgaggugcggcagaucgcacccggccagacaggcaagaucgccgacuacaacuacaagcugcccgacgacuucaccggcugcgugaucgccuggaacagcaacaaccucgacagcaaggugggcggcaacuacaacuaccuguuccggcuguuccggaagagcaaccugaagcccuucgagcgggacaucagcaccgagaucuaccaagccggcaacaccccuugcaacggcguggagggcuucaacugcuacuucccucugcagagcuacggcuuccagcccaccaacggcgugggcuaccagcccuaccgggugguggugcugagcuucgagcugcugcacgccccagccaccguguguggccccaagaagagcaccaaccuggugaagaacaagugcgugaacuucaacuucaacggccuuaccggcaccggcgugcugaccgagagcaacaagaaauuccugcccuuucagcaguucggccgggacaucgccgacaccaccgacgcugugcgggauccccagacccuggagauccuggacaucaccccuugcagcuucggcggcgugagcgugaucaccccaggcaccaacaccagcaaccagguggccgugcuguaccagggcgugaacugcaccgaggugcccguggccauccacgccgaccagcugacacccaccuggcgggucuacagcaccggcagcaacguguuccagacccgggccgguugccugaucggcgccgagcacgugaacaacagcuacgagugcgacauccccaucggcgccggcaucugugccagcuaccagacccagaccaauucaccccggagggcaaggagcguggccagccagagcgugaucgccuacaccaugagccugggcgccgagaacagcguggccuacagcaacaacagcaucgccauccccaccaacuucaccaucagcgugaccaccgagauucugcccgugagcaugaccaagaccagcguggacugcaccauguacaucugcggcgacagcaccgagugcagcaaccugcugcugcaguacggcagcuucugcacccagcugaaccgggcccugaccggcaucgccguggagcaggacaagaacacccaggagguguucgcccaggugaagcagaucuacaagaccccucccaucaaggacuucggcggcuucaacuucagccagauccugcccgaccccagcaagcccagcaagcggagcuucaucgaggaccugcuguucaacaaggugacccuagccgacgccggcuucaucaagcaguacggcgacugccucggcgacauagccgcccgggaccugaucugcgcccagaaguucaacggccugaccgugcugccuccccugcugaccgacgagaugaucgcccaguacaccagcgcccuguuagccggaaccaucaccagcggcuggacuuucggcgcuggagccgcucugcagauccccuucgccaugcagauggccuaccgguucaacggcaucggcgugacccagaacgugcuguacgagaaccagaagcugaucgccaaccaguucaacagcgccaucggcaagauccaggacagccugagcagcaccgcuagcgcccugggcaagcugcaggacguggugaaccagaacgcccaggcccugaacacccuggugaagcagcugagcagcaacuucggcgccaucagcagcgugcugaacgacauccugagccggcuggacccucccgaggccgaggugcagaucgaccggcugaucacuggccggcugcagagccugcagaccuacgugacccagcagcugauccgggccgccgagauucgggccagcgccaaccuggccgccaccaagaugagcgagugcgugcugggccagagcaagcggguggacuucugcggcaagggcuaccaccugaugagcuuuccccagagcgcaccccacggagugguguuccugcacgugaccuacgugcccgcccaggagaagaacuucaccaccgccccagccaucugccacgacggcaaggcccacuuuccccgggagggcguguucgugagcaacggcacccacugguucgugacccagcggaacuucuacgagccccagaucaucaccaccgacaacaccuucgugagcggcaacugcgacguggugaucggcaucgugaacaacaccguguacgauccccugcagcccgagcuggacagcuucaaggaggagcuggacaaguacuucaagaaucacaccagccccgacguggaccugggcgacaucagcggcaucaacgccagcguggugaacauccagaaggagaucgaucggcugaacgagguggccaagaaccugaacgagagccugaucgaccugcaggagcugggcaaguacgagcaguacaucaaguggcccugguacaucuggcugggcuucaucgccggccugaucgccaucgugauggugaccaucaugcugugcugcaugaccagcugcugcagcugccugaagggcuguugcagcugcggcagcugcugcaaguucgacgaggacgacagcgagcccgugcugaagggcgugaagcugcacuacaccugaggacuaguuauaagacugacuagcccgaugggccucccaacgggcccuccuccccuccuugcaccgagauuaauaaaaaaaaaaaaaaaaaaaaaaaaaaaaaaaaaaaaaaaaaaaaaaaaaaaaaaaaaaaaaaaaaaaaaaaaaaaaaaaaaaaaaaaaaaaaaaaaaaaa

SEQ ID NO: 25544 - RNA, 4005 nt, Artificial Sequence
  SARS-CoV-2/Wuhan/WIV05/2019__EPI_ISL_402128 spike protein mRNA gc (1-1273)(K986P_V987P_H69del_V70del_Y453F_D614G_I692V_M1229I)
aggagaaagcuuaccauguucguguuccuggugcugcugccccuggugagcagccagugcgugaaccugaccacccggacccagcugccaccagccuacaccaacagcuucacccggggcgucuacuaccccgacaagguguuccggagcagcguccugcacagcacccaggaccuguuccugcccuucuucagcaacgugaccugguuccacgccaucagcggcaccaacggcaccaagcgguucgacaaccccgugcugcccuucaacgacggcguguacuucgccagcaccgagaagagcaacaucauccggggcuggaucuucggcaccacccuggacagcaagacccagagccugcugaucgugaauaacgccaccaacguggugaucaaggugugcgaguuccaguucugcaacgaccccuuccugggcguguacuaccacaagaacaacaagagcuggauggagagcgaguuccggguguacagcagcgccaacaacugcaccuucgaguacgugagccagcccuuccugauggaccuggagggcaagcagggcaacuucaagaaccugcgggaguucguguucaagaacaucgacggcuacuucaagaucuacagcaagcacaccccaaucaaccuggugcgggaucugccccagggcuucucagcccuggagccccugguggaccugcccaucggcaucaacaucacccgguuccagacccugcuggcccugcaccggagcuaccugaccccaggcgacagcagcagcggguggacagcaggcgcggcugcuuacuacgugggcuaccugcagccccggaccuuccugcugaaguacaacgagaacggcaccaucaccgacgccguggacugcgcccuggacccucugagcgagaccaagugcacccugaagagcuucaccguggagaagggcaucuaccagaccagcaacuuccgggugcagcccaccgagagcaucgugcgguuccccaacaucaccaaccugugccccuucggcgagguguucaacgccacccgguucgccagcguguacgccuggaaccggaagcggaucagcaacugcguggccgacuacagcgugcuguacaacagcgccagcuucagcaccuucaagugcuacggcgugagccccaccaagcugaacgaccugugcuucaccaacguguacgccgacagcuucgugauccguggcgacgaggugcggcagaucgcacccggccagacaggcaagaucgccgacuacaacuacaagcugcccgacgacuucaccggcugcgugaucgccuggaacagcaacaaccucgacagcaaggugggcggcaacuacaacuaccuguuccggcuguuccggaagagcaaccugaagcccuucgagcgggacaucagcaccgagaucuaccaagccggcuccaccccuugcaacggcguggagggcuucaacugcuacuucccucugcagagcuacggcuuccagcccaccaacggcgugggcuaccagcccuaccgggugguggugcugagcuucgagcugcugcacgccccagccaccguguguggccccaagaagagcaccaaccuggugaagaacaagugcgugaacuucaacuucaacggccuuaccggcaccggcgugcugaccgagagcaacaagaaauuccugcccuuucagcaguucggccgggacaucgccgacaccaccgacgcugugcgggauccccagacccuggagauccuggacaucaccccuugcagcuucggcggcgugagcgugaucaccccaggcaccaacaccagcaaccagguggccgugcuguaccagggcgugaacugcaccgaggugcccguggccauccacgccgaccagcugacacccaccuggcgggucuacagcaccggcagcaacguguuccagacccgggccgguugccugaucggcgccgagcacgugaacaacagcuacgagugcgacauccccaucggcgccggcaucugugccagcuaccagacccagaccaauucaccccggagggcaaggagcguggccagccagagcgugaucgccuacaccaugagccugggcgccgagaacagcguggccuacagcaacaacagcaucgccauccccaccaacuucaccaucagcgugaccaccgagauucugcccgugagcaugaccaagaccagcguggacugcaccauguacaucugcggcgacagcaccgagugcagcaaccugcugcugcaguacggcagcuucugcacccagcugaaccgggcccugaccggcaucgccguggagcaggacaagaacacccaggagguguucgcccaggugaagcagaucuacaagaccccucccaucaaggacuucggcggcuucaacuucagccagauccugcccgaccccagcaagcccagcaagcggagcuucaucgaggaccugcuguucaacaaggugacccuagccgacgccggcuucaucaagcaguacggcgacugccucggcgacauagccgcccgggaccugaucugcgcccagaaguucaacggccugaccgugcugccuccccugcugaccgacgagaugaucgcccaguacaccagcgcccuguuagccggaaccaucaccagcggcuggacuuucggcgcuggagccgcucugcagauccccuucgccaugcagauggccuaccgguucaacggcaucggcgugacccagaacgugcuguacgagaaccagaagcugaucgccaaccaguucaacagcgccaucggcaagauccaggacagccugagcagcaccgcuagcgcccugggcaagcugcaggacguggugaaccagaacgcccaggcccugaacacccuggugaagcagcugagcagcaacuucggcgccaucagcagcgugcugaacgacauccugagccggcuggacccucccgaggccgaggugcagaucgaccggcugaucacuggccggcugcagagccugcagaccuacgugacccagcagcugauccgggccgccgagauucgggccagcgccaaccuggccgccaccaagaugagcgagugcgugcugggccagagcaagcggguggacuucugcggcaagggcuaccaccugaugagcuuuccccagagcgcaccccacggagugguguuccugcacgugaccuacgugcccgcccaggagaagaacuucaccaccgccccagccaucugccacgacggcaaggcccacuuuccccgggagggcguguucgugagcaacggcacccacugguucgugacccagcggaacuucuacgagccccagaucaucaccaccgacaacaccuucgugagcggcaacugcgacguggugaucggcaucgugaacaacaccguguacgauccccugcagcccgagcuggacagcuucaaggaggagcuggacaaguacuucaagaaucacaccagccccgacguggaccugggcgacaucagcggcaucaacgccagcguggugaacauccagaaggagaucgaucggcugaacgagguggccaagaaccugaacgagagccugaucgaccugcaggagcugggcaaguacgagcaguacaucaaguggcccugguacaucuggcugggcuucaucgccggccugaucgccaucgugaucgugaccaucaugcugugcugcaugaccagcugcugcagcugccugaagggcuguugcagcugcggcagcugcugcaaguucgacgaggacgacagcgagcccgugcugaagggcgugaagcugcacuacaccugaggacuaguuauaagacugacuagcccgaugggccucccaacgggcccuccuccccuccuugcaccgagauuaauaaaaaaaaaaaaaaaaaaaaaaaaaaaaaaaaaaaaaaaaaaaaaaaaaaaaaaaaaaaaaaaaaaaaaaaaaaaaaaaaaaaaaaaaaaaaaaaaaaaa

SEQ ID NO: 25545 - RNA, 4002 nt, Artificial Sequence
  SARS-CoV-2/Wuhan/WIV05/2019__EPI_ISL_402128 spike protein mRNA gc (1-1273)(K986P_V987P_K986P_V987P_H69del_V70del_Y144del_N501Y_A570 D_D614G_P681H_T716I_S982A_D1118H)
aggagaaagcuuaccauguucguguuccuggugcugcugccccuggugagcagccagugcgugaaccugaccacccggacccagcugccaccagccuacaccaacagcuucacccggggcgucuacuaccccgacaagguguuccggagcagcguccugcacagcacccaggaccuguuccugcccuucuucagcaacgugaccugguuccacgccaucagcggcaccaacggcaccaagcgguucgacaaccccgugcugcccuucaacgacggcguguacuucgccagcaccgagaagagcaacaucauccggggcuggaucuucggcaccacccuggacagcaagacccagagccugcugaucgugaauaacgccaccaacguggugaucaaggugugcgaguuccaguucugcaacgaccccuuccugggcguguaccacaagaacaacaagagcuggauggagagcgaguuccggguguacagcagcgccaacaacugcaccuucgaguacgugagccagcccuuccugauggaccuggagggcaagcagggcaacuucaagaaccugcgggaguucguguucaagaacaucgacggcuacuucaagaucuacagcaagcacaccccaaucaaccuggugcgggaucugccccagggcuucucagcccuggagccccugguggaccugcccaucggcaucaacaucacccgguuccagacccugcuggcccugcaccggagcuaccugaccccaggcgacagcagcagcggguggacagcaggcgcggcugcuuacuacgugggcuaccugcagccccggaccuuccugcugaaguacaacgagaacggcaccaucaccgacgccguggacugcgcccuggacccucugagcgagaccaagugcacccugaagagcuucaccguggagaagggcaucuaccagaccagcaacuuccgggugcagcccaccgagagcaucgugcgguuccccaacaucaccaaccugugccccuucggcgagguguucaacgccacccgguucgccagcguguacgccuggaaccggaagcggaucagcaacugcguggccgacuacagcgugcuguacaacagcgccagcuucagcaccuucaagugcuacggcgugagccccaccaagcugaacgaccugugcuucaccaacguguacgccgacagcuucgugauccguggcgacgaggugcggcagaucgcacccggccagacaggcaagaucgccgacuacaacuacaagcugcccgacgacuucaccggcugcgugaucgccuggaacagcaacaaccucgacagcaaggugggcggcaacuacaacuaccuguaccggcuguuccggaagagcaaccugaagcccuucgagcgggacaucagcaccgagaucuaccaagccggcuccaccccuugcaacggcguggagggcuucaacugcuacuucccucugcagagcuacggcuuccagcccaccuacggcgugggcuaccagcccuaccgggugguggugcugagcuucgagcugcugcacgccccagccaccguguguggccccaagaagagcaccaaccuggugaagaacaagugcgugaacuucaacuucaacggccuuaccggcaccggcgugcugaccgagagcaacaagaaauuccugcccuuucagcaguucggccgggacaucgacgacaccaccgacgcugugcgggauccccagacccuggagauccuggacaucaccccuugcagcuucggcggcgugagcgugaucaccccaggcaccaacaccagcaaccagguggccgugcuguaccagggcgugaacugcaccgaggugcccguggccauccacgccgaccagcugacacccaccuggcgggucuacagcaccggcagcaacguguuccagacccgggccgguugccugaucggcgccgagcacgugaacaacagcuacgagugcgacauccccaucggcgccggcaucugugccagcuaccagacccagaccaauucacaccggagggcaaggagcguggccagccagagcaucaucgccuacaccaugagccugggcgccgagaacagcguggccuacagcaacaacagcaucgccauccccaucaacuucaccaucagcgugaccaccgagauucugcccgugagcaugaccaagaccagcguggacugcaccauguacaucugcggcgacagcaccgagugcagcaaccugcugcugcaguacggcagcuucugcacccagcugaaccgggcccugaccggcaucgccguggagcaggacaagaacacccaggagguguucgcccaggugaagcagaucuacaagaccccucccaucaaggacuucggcggcuucaacuucagccagauccugcccgaccccagcaagcccagcaagcggagcuucaucgaggaccugcuguucaacaaggugacccuagccgacgccggcuucaucaagcaguacggcgacugccucggcgacauagccgcccgggaccugaucugcgcccagaaguucaacggccugaccgugcugccuccccugcugaccgacgagaugaucgcccaguacaccagcgcccuguuagccggaaccaucaccagcggcuggacuuucggcgcuggagccgcucugcagauccccuucgccaugcagauggccuaccgguucaacggcaucggcgugacccagaacgugcuguacgagaaccagaagcugaucgccaaccaguucaacagcgccaucggcaagauccaggacagccugagcagcaccgcuagcgcccugggcaagcugcaggacguggugaaccagaacgcccaggcccugaacacccuggugaagcagcugagcagcaacuucggcgccaucagcagcgugcugaacgacauccuggcccggcuggacccucccgaggccgaggugcagaucgaccggcugaucacuggccggcugcagagccugcagaccuacgugacccagcagcugauccgggccgccgagauucgggccagcgccaaccuggccgccaccaagaugagcgagugcgugcugggccagagcaagcggguggacuucugcggcaagggcuaccaccugaugagcuuuccccagagcgcaccccacggagugguguuccugcacgugaccuacgugcccgcccaggagaagaacuucaccaccgccccagccaucugccacgacggcaaggcccacuuuccccgggagggcguguucgugagcaacggcacccacugguucgugacccagcggaacuucuacgagccccagaucaucaccacccacaacaccuucgugagcggcaacugcgacguggugaucggcaucgugaacaacaccguguacgauccccugcagcccgagcuggacagcuucaaggaggagcuggacaaguacuucaagaaucacaccagccccgacguggaccugggcgacaucagcggcaucaacgccagcguggugaacauccagaaggagaucgaucggcugaacgagguggccaagaaccugaacgagagccugaucgaccugcaggagcugggcaaguacgagcaguacaucaaguggcccugguacaucuggcugggcuucaucgccggccugaucgccaucgugauggugaccaucaugcugugcugcaugaccagcugcugcagcugccugaagggcuguugcagcugcggcagcugcugcaaguucgacgaggacgacagcgagcccgugcugaagggcgugaagcugcacuacaccugaggacuaguuauaagacugacuagcccgaugggccucccaacgggcccuccuccccuccuugcaccgagauuaauaaaaaaaaaaaaaaaaaaaaaaaaaaaaaaaaaaaaaaaaaaaaaaaaaaaaaaaaaaaaaaaaaaaaaaaaaaaaaaaaaaaaaaaaaaaaaaaaaaaa

SEQ ID NO: 25546 - RNA, 4011 nt, Artificial Sequence
  SARS-CoV-2/Wuhan/WIV05/2019__EPI_ISL_402128 spike protein mRNA gc (1-1273)(K986P_V987P_K986P_V987P_K417N_E484K_N501Y_D614G)
aggagaaagcuuaccauguucguguuccuggugcugcugccccuggugagcagccagugcgugaaccugaccacccggacccagcugccaccagccuacaccaacagcuucacccggggcgucuacuaccccgacaagguguuccggagcagcguccugcacagcacccaggaccuguuccugcccuucuucagcaacgugaccugguuccacgccauccacgugagcggcaccaacggcaccaagcgguucgacaaccccgugcugcccuucaacgacggcguguacuucgccagcaccgagaagagcaacaucauccggggcuggaucuucggcaccacccuggacagcaagacccagagccugcugaucgugaauaacgccaccaacguggugaucaaggugugcgaguuccaguucugcaacgaccccuuccugggcguguacuaccacaagaacaacaagagcuggauggagagcgaguuccggguguacagcagcgccaacaacugcaccuucgaguacgugagccagcccuuccugauggaccuggagggcaagcagggcaacuucaagaaccugcgggaguucguguucaagaacaucgacggcuacuucaagaucuacagcaagcacaccccaaucaaccuggugcgggaucugccccagggcuucucagcccuggagccccugguggaccugcccaucggcaucaacaucacccgguuccagacccugcuggcccugcaccggagcuaccugaccccaggcgacagcagcagcggguggacagcaggcgcggcugcuuacuacgugggcuaccugcagccccggaccuuccugcugaaguacaacgagaacggcaccaucaccgacgccguggacugcgcccuggacccucugagcgagaccaagugcacccugaagagcuucaccguggagaagggcaucuaccagaccagcaacuuccgggugcagcccaccgagagcaucgugcgguuccccaacaucaccaaccugugccccuucggcgagguguucaacgccacccgguucgccagcguguacgccuggaaccggaagcggaucagcaacugcguggccgacuacagcgugcuguacaacagcgccagcuucagcaccuucaagugcuacggcgugagccccaccaagcugaacgaccugugcuucaccaacguguacgccgacagcuucgugauccguggcgacgaggugcggcagaucgcacccggccagacaggcaacaucgccgacuacaacuacaagcugcccgacgacuucaccggcugcgugaucgccuggaacagcaacaaccucgacagcaaggugggcggcaacuacaacuaccuguaccggcuguuccggaagagcaaccugaagcccuucgagcgggacaucagcaccgagaucuaccaagccggcuccaccccuugcaacggcgugaagggcuucaacugcuacuucccucugcagagcuacggcuuccagcccaccuacggcgugggcuaccagcccuaccgggugguggugcugagcuucgagcugcugcacgccccagccaccguguguggccccaagaagagcaccaaccuggugaagaacaagugcgugaacuucaacuucaacggccuuaccggcaccggcgugcugaccgagagcaacaagaaauuccugcccuuucagcaguucggccgggacaucgccgacaccaccgacgcugugcgggauccccagacccuggagauccuggacaucaccccuugcagcuucggcggcgugagcgugaucaccccaggcaccaacaccagcaaccagguggccgugcuguaccagggcgugaacugcaccgaggugcccguggccauccacgccgaccagcugacacccaccuggcgggucuacagcaccggcagcaacguguuccagacccgggccgguugccugaucggcgccgagcacgugaacaacagcuacgagugcgacauccccaucggcgccggcaucugugccagcuaccagacccagaccaauucaccccggagggcaaggagcguggccagccagagcaucaucgccuacaccaugagccugggcgccgagaacagcguggccuacagcaacaacagcaucgccauccccaccaacuucaccaucagcgugaccaccgagauucugcccgugagcaugaccaagaccagcguggacugcaccauguacaucugcggcgacagcaccgagugcagcaaccugcugcugcaguacggcagcuucugcacccagcugaaccgggcccugaccggcaucgccguggagcaggacaagaacacccaggagguguucgcccaggugaagcagaucuacaagaccccucccaucaaggacuucggcggcuucaacuucagccagauccugcccgaccccagcaagcccagcaagcggagcuucaucgaggaccugcuguucaacaaggugacccuagccgacgccggcuucaucaagcaguacggcgacugccucggcgacauagccgcccgggaccugaucugcgcccagaaguucaacggccugaccgugcugccuccccugcugaccgacgagaugaucgcccaguacaccagcgcccuguuagccggaaccaucaccagcggcuggacuuucggcgcuggagccgcucugcagauccccuucgccaugcagauggccuaccgguucaacggcaucggcgugacccagaacgugcuguacgagaaccagaagcugaucgccaaccaguucaacagcgccaucggcaagauccaggacagccugagcagcaccgcuagcgcccugggcaagcugcaggacguggugaaccagaacgcccaggcccugaacacccuggugaagcagcugagcagcaacuucggcgccaucagcagcgugcugaacgacauccugagccggcuggacccucccgaggccgaggugcagaucgaccggcugaucacuggccggcugcagagccugcagaccuacgugacccagcagcugauccgggccgccgagauucgggccagcgccaaccuggccgccaccaagaugagcgagugcgugcugggccagagcaagcggguggacuucugcggcaagggcuaccaccugaugagcuuuccccagagcgcaccccacggagugguguuccugcacgugaccuacgugcccgcccaggagaagaacuucaccaccgccccagccaucugccacgacggcaaggcccacuuuccccgggagggcguguucgugagcaacggcacccacugguucgugacccagcggaacuucuacgagccccagaucaucaccaccgacaacaccuucgugagcggcaacugcgacguggugaucggcaucgugaacaacaccguguacgauccccugcagcccgagcuggacagcuucaaggaggagcuggacaaguacuucaagaaucacaccagccccgacguggaccugggcgacaucagcggcaucaacgccagcguggugaacauccagaaggagaucgaucggcugaacgagguggccaagaaccugaacgagagccugaucgaccugcaggagcugggcaaguacgagcaguacaucaaguggcccugguacaucuggcugggcuucaucgccggccugaucgccaucgugauggugaccaucaugcugugcugcaugaccagcugcugcagcugccugaagggcuguugcagcugcggcagcugcugcaaguucgacgaggacgacagcgagcccgugcugaagggcgugaagcugcacuacaccugaggacuaguuauaagacugacuagcccgaugggccucccaacgggcccuccuccccuccuugcaccgagauuaauaaaaaaaaaaaaaaaaaaaaaaaaaaaaaaaaaaaaaaaaaaaaaaaaaaaaaaaaaaaaaaaaaaaaaaaaaaaaaaaaaaaaaaaaaaaaaaaaaaaa

SEQ ID NO: 25547 - RNA, 4002 nt, Artificial Sequence
  SARS-CoV-2/Wuhan/WIV05/2019__EPI_ISL_402128 spike protein mRNA gc (1-1273)(K986P_V987P_K986P_V987P_L18F_D80A_D215G_L242del_A243del_ L244del_R246I_K417N_E484K_N501Y_D614G_A701V)
aggagaaagcuuaccauguucguguuccuggugcugcugccccuggugagcagccagugcgugaacuucaccacccggacccagcugccaccagccuacaccaacagcuucacccggggcgucuacuaccccgacaagguguuccggagcagcguccugcacagcacccaggaccuguuccugcccuucuucagcaacgugaccugguuccacgccauccacgugagcggcaccaacggcaccaagcgguucgccaaccccgugcugcccuucaacgacggcguguacuucgccagcaccgagaagagcaacaucauccggggcuggaucuucggcaccacccuggacagcaagacccagagccugcugaucgugaauaacgccaccaacguggugaucaaggugugcgaguuccaguucugcaacgaccccuuccugggcguguacuaccacaagaacaacaagagcuggauggagagcgaguuccggguguacagcagcgccaacaacugcaccuucgaguacgugagccagcccuuccugauggaccuggagggcaagcagggcaacuucaagaaccugcgggaguucguguucaagaacaucgacggcuacuucaagaucuacagcaagcacaccccaaucaaccuggugcggggccugccccagggcuucucagcccuggagccccugguggaccugcccaucggcaucaacaucacccgguuccagacccugcacaucagcuaccugaccccaggcgacagcagcagcggguggacagcaggcgcggcugcuuacuacgugggcuaccugcagccccggaccuuccugcugaaguacaacgagaacggcaccaucaccgacgccguggacugcgcccuggacccucugagcgagaccaagugcacccugaagagcuucaccguggagaagggcaucuaccagaccagcaacuuccgggugcagcccaccgagagcaucgugcgguuccccaacaucaccaaccugugccccuucggcgagguguucaacgccacccgguucgccagcguguacgccuggaaccggaagcggaucagcaacugcguggccgacuacagcgugcuguacaacagcgccagcuucagcaccuucaagugcuacggcgugagccccaccaagcugaacgaccugugcuucaccaacguguacgccgacagcuucgugauccguggcgacgaggugcggcagaucgcacccggccagacaggcaacaucgccgacuacaacuacaagcugcccgacgacuucaccggcugcgugaucgccuggaacagcaacaaccucgacagcaaggugggcggcaacuacaacuaccuguaccggcuguuccggaagagcaaccugaagcccuucgagcgggacaucagcaccgagaucuaccaagccggcuccaccccuugcaacggcgugaagggcuucaacugcuacuucccucugcagagcuacggcuuccagcccaccuacggcgugggcuaccagcccuaccgggugguggugcugagcuucgagcugcugcacgccccagccaccguguguggccccaagaagagcaccaaccuggugaagaacaagugcgugaacuucaacuucaacggccuuaccggcaccggcgugcugaccgagagcaacaagaaauuccugcccuuucagcaguucggccgggacaucgccgacaccaccgacgcugugcgggauccccagacccuggagauccuggacaucaccccuugcagcuucggcggcgugagcgugaucaccccaggcaccaacaccagcaaccagguggccgugcuguaccagggcgugaacugcaccgaggugcccguggccauccacgccgaccagcugacacccaccuggcgggucuacagcaccggcagcaacguguuccagacccgggccgguugccugaucggcgccgagcacgugaacaacagcuacgagugcgacauccccaucggcgccggcaucugugccagcuaccagacccagaccaauucaccccggagggcaaggagcguggccagccagagcaucaucgccuacaccaugagccugggcguggagaacagcguggccuacagcaacaacagcaucgccauccccaccaacuucaccaucagcgugaccaccgagauucugcccgugagcaugaccaagaccagcguggacugcaccauguacaucugcggcgacagcaccgagugcagcaaccugcugcugcaguacggcagcuucugcacccagcugaaccgggcccugaccggcaucgccguggagcaggacaagaacacccaggagguguucgcccaggugaagcagaucuacaagaccccucccaucaaggacuucggcggcuucaacuucagccagauccugcccgaccccagcaagcccagcaagcggagcuucaucgaggaccugcuguucaacaaggugacccuagccgacgccggcuucaucaagcaguacggcgacugccucggcgacauagccgcccgggaccugaucugcgcccagaaguucaacggccugaccgugcugccuccccugcugaccgacgagaugaucgcccaguacaccagcgcccuguuagccggaaccaucaccagcggcuggacuuucggcgcuggagccgcucugcagauccccuucgccaugcagauggccuaccgguucaacggcaucggcgugacccagaacgugcuguacgagaaccagaagcugaucgccaaccaguucaacagcgccaucggcaagauccaggacagccugagcagcaccgcuagcgcccugggcaagcugcaggacguggugaaccagaacgcccaggcccugaacacccuggugaagcagcugagcagcaacuucggcgccaucagcagcgugcugaacgacauccugagccggcuggacccucccgaggccgaggugcagaucgaccggcugaucacuggccggcugcagagccugcagaccuacgugacccagcagcugauccgggccgccgagauucgggccagcgccaaccuggccgccaccaagaugagcgagugcgugcugggccagagcaagcggguggacuucugcggcaagggcuaccaccugaugagcuuuccccagagcgcaccccacggagugguguuccugcacgugaccuacgugcccgcccaggagaagaacuucaccaccgccccagccaucugccacgacggcaaggcccacuuuccccgggagggcguguucgugagcaacggcacccacugguucgugacccagcggaacuucuacgagccccagaucaucaccaccgacaacaccuucgugagcggcaacugcgacguggugaucggcaucgugaacaacaccguguacgauccccugcagcccgagcuggacagcuucaaggaggagcuggacaaguacuucaagaaucacaccagccccgacguggaccugggcgacaucagcggcaucaacgccagcguggugaacauccagaaggagaucgaucggcugaacgagguggccaagaaccugaacgagagccugaucgaccugcaggagcugggcaaguacgagcaguacaucaaguggcccugguacaucuggcugggcuucaucgccggccugaucgccaucgugauggugaccaucaugcugugcugcaugaccagcugcugcagcugccugaagggcuguugcagcugcggcagcugcugcaaguucgacgaggacgacagcgagcccgugcugaagggcgugaagcugcacuacaccugaggacuaguuauaagacugacuagcccgaugggccucccaacgggcccuccuccccuccuugcaccgagauuaauaaaaaaaaaaaaaaaaaaaaaaaaaaaaaaaaaaaaaaaaaaaaaaaaaaaaaaaaaaaaaaaaaaaaaaaaaaaaaaaaaaaaaaaaaaaaaaaaaaaa

SEQ ID NO: 25548 - RNA, 4011 nt, Artificial Sequence
  SARS-CoV-2/Wuhan/WIV05/2019__EPI_ISL_402128 spike protein mRNA gc (1-1273)(K986P_V987P_K986P_V987P_E484K_D614G)
aggagaaagcuuaccauguucguguuccuggugcugcugccccuggugagcagccagugcgugaaccugaccacccggacccagcugccaccagccuacaccaacagcuucacccggggcgucuacuaccccgacaagguguuccggagcagcguccugcacagcacccaggaccuguuccugcccuucuucagcaacgugaccugguuccacgccauccacgugagcggcaccaacggcaccaagcgguucgacaaccccgugcugcccuucaacgacggcguguacuucgccagcaccgagaagagcaacaucauccggggcuggaucuucggcaccacccuggacagcaagacccagagccugcugaucgugaauaacgccaccaacguggugaucaaggugugcgaguuccaguucugcaacgaccccuuccugggcguguacuaccacaagaacaacaagagcuggauggagagcgaguuccggguguacagcagcgccaacaacugcaccuucgaguacgugagccagcccuuccugauggaccuggagggcaagcagggcaacuucaagaaccugcgggaguucguguucaagaacaucgacggcuacuucaagaucuacagcaagcacaccccaaucaaccuggugcgggaucugccccagggcuucucagcccuggagccccugguggaccugcccaucggcaucaacaucacccgguuccagacccugcuggcccugcaccggagcuaccugaccccaggcgacagcagcagcggguggacagcaggcgcggcugcuuacuacgugggcuaccugcagccccggaccuuccugcugaaguacaacgagaacggcaccaucaccgacgccguggacugcgcccuggacccucugagcgagaccaagugcacccugaagagcuucaccguggagaagggcaucuaccagaccagcaacuuccgggugcagcccaccgagagcaucgugcgguuccccaacaucaccaaccugugccccuucggcgagguguucaacgccacccgguucgccagcguguacgccuggaaccggaagcggaucagcaacugcguggccgacuacagcgugcuguacaacagcgccagcuucagcaccuucaagugcuacggcgugagccccaccaagcugaacgaccugugcuucaccaacguguacgccgacagcuucgugauccguggcgacgaggugcggcagaucgcacccggccagacaggcaagaucgccgacuacaacuacaagcugcccgacgacuucaccggcugcgugaucgccuggaacagcaacaaccucgacagcaaggugggcggcaacuacaacuaccuguaccggcuguuccggaagagcaaccugaagcccuucgagcgggacaucagcaccgagaucuaccaagccggcuccaccccuugcaacggcgugaagggcuucaacugcuacuucccucugcagagcuacggcuuccagcccaccaacggcgugggcuaccagcccuaccgggugguggugcugagcuucgagcugcugcacgccccagccaccguguguggccccaagaagagcaccaaccuggugaagaacaagugcgugaacuucaacuucaacggccuuaccggcaccggcgugcugaccgagagcaacaagaaauuccugcccuuucagcaguucggccgggacaucgccgacaccaccgacgcugugcgggauccccagacccuggagauccuggacaucaccccuugcagcuucggcggcgugagcgugaucaccccaggcaccaacaccagcaaccagguggccgugcuguaccagggcgugaacugcaccgaggugcccguggccauccacgccgaccagcugacacccaccuggcgggucuacagcaccggcagcaacguguuccagacccgggccgguugccugaucggcgccgagcacgugaacaacagcuacgagugcgacauccccaucggcgccggcaucugugccagcuaccagacccagaccaauucaccccggagggcaaggagcguggccagccagagcaucaucgccuacaccaugagccugggcgccgagaacagcguggccuacagcaacaacagcaucgccauccccaccaacuucaccaucagcgugaccaccgagauucugcccgugagcaugaccaagaccagcguggacugcaccauguacaucugcggcgacagcaccgagugcagcaaccugcugcugcaguacggcagcuucugcacccagcugaaccgggcccugaccggcaucgccguggagcaggacaagaacacccaggagguguucgcccaggugaagcagaucuacaagaccccucccaucaaggacuucggcggcuucaacuucagccagauccugcccgaccccagcaagcccagcaagcggagcuucaucgaggaccugcuguucaacaaggugacccuagccgacgccggcuucaucaagcaguacggcgacugccucggcgacauagccgcccgggaccugaucugcgcccagaaguucaacggccugaccgugcugccuccccugcugaccgacgagaugaucgcccaguacaccagcgcccuguuagccggaaccaucaccagcggcuggacuuucggcgcuggagccgcucugcagauccccuucgccaugcagauggccuaccgguucaacggcaucggcgugacccagaacgugcuguacgagaaccagaagcugaucgccaaccaguucaacagcgccaucggcaagauccaggacagccugagcagcaccgcuagcgcccugggcaagcugcaggacguggugaaccagaacgcccaggcccugaacacccuggugaagcagcugagcagcaacuucggcgccaucagcagcgugcugaacgacauccugagccggcuggacccucccgaggccgaggugcagaucgaccggcugaucacuggccggcugcagagccugcagaccuacgugacccagcagcugauccgggccgccgagauucgggccagcgccaaccuggccgccaccaagaugagcgagugcgugcugggccagagcaagcggguggacuucugcggcaagggcuaccaccugaugagcuuuccccagagcgcaccccacggagugguguuccugcacgugaccuacgugcccgcccaggagaagaacuucaccaccgccccagccaucugccacgacggcaaggcccacuuuccccgggagggcguguucgugagcaacggcacccacugguucgugacccagcggaacuucuacgagccccagaucaucaccaccgacaacaccuucgugagcggcaacugcgacguggugaucggcaucgugaacaacaccguguacgauccccugcagcccgagcuggacagcuucaaggaggagcuggacaaguacuucaagaaucacaccagccccgacguggaccugggcgacaucagcggcaucaacgccagcguggugaacauccagaaggagaucgaucggcugaacgagguggccaagaaccugaacgagagccugaucgaccugcaggagcugggcaaguacgagcaguacaucaaguggcccugguacaucuggcugggcuucaucgccggccugaucgccaucgugauggugaccaucaugcugugcugcaugaccagcugcugcagcugccugaagggcuguugcagcugcggcagcugcugcaaguucgacgaggacgacagcgagcccgugcugaagggcgugaagcugcacuacaccugaggacuaguuauaagacugacuagcccgaugggccucccaacgggcccuccuccccuccuugcaccgagauuaauaaaaaaaaaaaaaaaaaaaaaaaaaaaaaaaaaaaaaaaaaaaaaaaaaaaaaaaaaaaaaaaaaaaaaaaaaaaaaaaaaaaaaaaaaaaaaaaaaaaa

SEQ ID NO: 25549 - RNA, 4011 nt, Artificial Sequence
  SARS-CoV-2/Wuhan/WIV05/2019__EPI_ISL_402128 spike protein mRNA gc (1-1273)(K986P_V987P_K986P_V987P_L18F_T20N_P26S_D138Y_R190S_K417T _E484K_N501Y_D614G_H655Y_T1027I)
aggagaaagcuuaccauguucguguuccuggugcugcugccccuggugagcagccagugcgugaacuucaccaaccggacccagcugccaagcgccuacaccaacagcuucacccggggcgucuacuaccccgacaagguguuccggagcagcguccugcacagcacccaggaccuguuccugcccuucuucagcaacgugaccugguuccacgccauccacgugagcggcaccaacggcaccaagcgguucgacaaccccgugcugcccuucaacgacggcguguacuucgccagcaccgagaagagcaacaucauccggggcuggaucuucggcaccacccuggacagcaagacccagagccugcugaucgugaauaacgccaccaacguggugaucaaggugugcgaguuccaguucugcaacuaccccuuccugggcguguacuaccacaagaacaacaagagcuggauggagagcgaguuccggguguacagcagcgccaacaacugcaccuucgaguacgugagccagcccuuccugauggaccuggagggcaagcagggcaacuucaagaaccugagcgaguucguguucaagaacaucgacggcuacuucaagaucuacagcaagcacaccccaaucaaccuggugcgggaucugccccagggcuucucagcccuggagccccugguggaccugcccaucggcaucaacaucacccgguuccagacccugcuggcccugcaccggagcuaccugaccccaggcgacagcagcagcggguggacagcaggcgcggcugcuuacuacgugggcuaccugcagccccggaccuuccugcugaaguacaacgagaacggcaccaucaccgacgccguggacugcgcccuggacccucugagcgagaccaagugcacccugaagagcuucaccguggagaagggcaucuaccagaccagcaacuuccgggugcagcccaccgagagcaucgugcgguuccccaacaucaccaaccugugccccuucggcgagguguucaacgccacccgguucgccagcguguacgccuggaaccggaagcggaucagcaacugcguggccgacuacagcgugcuguacaacagcgccagcuucagcaccuucaagugcuacggcgugagccccaccaagcugaacgaccugugcuucaccaacguguacgccgacagcuucgugauccguggcgacgaggugcggcagaucgcacccggccagacaggcaccaucgccgacuacaacuacaagcugcccgacgacuucaccggcugcgugaucgccuggaacagcaacaaccucgacagcaaggugggcggcaacuacaacuaccuguaccggcuguuccggaagagcaaccugaagcccuucgagcgggacaucagcaccgagaucuaccaagccggcuccaccccuugcaacggcgugaagggcuucaacugcuacuucccucugcagagcuacggcuuccagcccaccuacggcgugggcuaccagcccuaccgggugguggugcugagcuucgagcugcugcacgccccagccaccguguguggccccaagaagagcaccaaccuggugaagaacaagugcgugaacuucaacuucaacggccuuaccggcaccggcgugcugaccgagagcaacaagaaauuccugcccuuucagcaguucggccgggacaucgccgacaccaccgacgcugugcgggauccccagacccuggagauccuggacaucaccccuugcagcuucggcggcgugagcgugaucaccccaggcaccaacaccagcaaccagguggccgugcuguaccagggcgugaacugcaccgaggugcccguggccauccacgccgaccagcugacacccaccuggcgggucuacagcaccggcagcaacguguuccagacccgggccgguugccugaucggcgccgaguacgugaacaacagcuacgagugcgacauccccaucggcgccggcaucugugccagcuaccagacccagaccaauucaccccggagggcaaggagcguggccagccagagcaucaucgccuacaccaugagccugggcgccgagaacagcguggccuacagcaacaacagcaucgccauccccaccaacuucaccaucagcgugaccaccgagauucugcccgugagcaugaccaagaccagcguggacugcaccauguacaucugcggcgacagcaccgagugcagcaaccugcugcugcaguacggcagcuucugcacccagcugaaccgggcccugaccggcaucgccguggagcaggacaagaacacccaggagguguucgcccaggugaagcagaucuacaagaccccucccaucaaggacuucggcggcuucaacuucagccagauccugcccgaccccagcaagcccagcaagcggagcuucaucgaggaccugcuguucaacaaggugacccuagccgacgccggcuucaucaagcaguacggcgacugccucggcgacauagccgcccgggaccugaucugcgcccagaaguucaacggccugaccgugcugccuccccugcugaccgacgagaugaucgcccaguacaccagcgcccuguuagccggaaccaucaccagcggcuggacuuucggcgcuggagccgcucugcagauccccuucgccaugcagauggccuaccgguucaacggcaucggcgugacccagaacgugcuguacgagaaccagaagcugaucgccaaccaguucaacagcgccaucggcaagauccaggacagccugagcagcaccgcuagcgcccugggcaagcugcaggacguggugaaccagaacgcccaggcccugaacacccuggugaagcagcugagcagcaacuucggcgccaucagcagcgugcugaacgacauccugagccggcuggacccucccgaggccgaggugcagaucgaccggcugaucacuggccggcugcagagccugcagaccuacgugacccagcagcugauccgggccgccgagauucgggccagcgccaaccuggccgccaucaagaugagcgagugcgugcugggccagagcaagcggguggacuucugcggcaagggcuaccaccugaugagcuuuccccagagcgcaccccacggagugguguuccugcacgugaccuacgugcccgcccaggagaagaacuucaccaccgccccagccaucugccacgacggcaaggcccacuuuccccgggagggcguguucgugagcaacggcacccacugguucgugacccagcggaacuucuacgagccccagaucaucaccaccgacaacaccuucgugagcggcaacugcgacguggugaucggcaucgugaacaacaccguguacgauccccugcagcccgagcuggacagcuucaaggaggagcuggacaaguacuucaagaaucacaccagccccgacguggaccugggcgacaucagcggcaucaacgccagcguggugaacauccagaaggagaucgaucggcugaacgagguggccaagaaccugaacgagagccugaucgaccugcaggagcugggcaaguacgagcaguacaucaaguggcccugguacaucuggcugggcuucaucgccggccugaucgccaucgugauggugaccaucaugcugugcugcaugaccagcugcugcagcugccugaagggcuguugcagcugcggcagcugcugcaaguucgacgaggacgacagcgagcccgugcugaagggcgugaagcugcacuacaccugaggacuaguuauaagacugacuagcccgaugggccucccaacgggcccuccuccccuccuugcaccgagauuaauaaaaaaaaaaaaaaaaaaaaaaaaaaaaaaaaaaaaaaaaaaaaaaaaaaaaaaaaaaaaaaaaaaaaaaaaaaaaaaaaaaaaaaaaaaaaaaaaaaaa

SEQ ID NO: 25550 - RNA, 4011 nt, Artificial Sequence
  SARS-CoV-2/Wuhan/WIV05/2019__EPI_ISL_402128 spike protein mRNA gc (1-1273)(K986P_V987P_K986P_V987P_S13I_W152C_L452R_D614G)
aggagaaagcuuaccauguucguguuccuggugcugcugccccuggugagcauccagugcgugaaccugaccacccggacccagcugccaccagccuacaccaacagcuucacccggggcgucuacuaccccgacaagguguuccggagcagcguccugcacagcacccaggaccuguuccugcccuucuucagcaacgugaccugguuccacgccauccacgugagcggcaccaacggcaccaagcgguucgacaaccccgugcugcccuucaacgacggcguguacuucgccagcaccgagaagagcaacaucauccggggcuggaucuucggcaccacccuggacagcaagacccagagccugcugaucgugaauaacgccaccaacguggugaucaaggugugcgaguuccaguucugcaacgaccccuuccugggcguguacuaccacaagaacaacaagagcugcauggagagcgaguuccggguguacagcagcgccaacaacugcaccuucgaguacgugagccagcccuuccugauggaccuggagggcaagcagggcaacuucaagaaccugcgggaguucguguucaagaacaucgacggcuacuucaagaucuacagcaagcacaccccaaucaaccuggugcgggaucugccccagggcuucucagcccuggagccccugguggaccugcccaucggcaucaacaucacccgguuccagacccugcuggcccugcaccggagcuaccugaccccaggcgacagcagcagcggguggacagcaggcgcggcugcuuacuacgugggcuaccugcagccccggaccuuccugcugaaguacaacgagaacggcaccaucaccgacgccguggacugcgcccuggacccucugagcgagaccaagugcacccugaagagcuucaccguggagaagggcaucuaccagaccagcaacuuccgggugcagcccaccgagagcaucgugcgguuccccaacaucaccaaccugugccccuucggcgagguguucaacgccacccgguucgccagcguguacgccuggaaccggaagcggaucagcaacugcguggccgacuacagcgugcuguacaacagcgccagcuucagcaccuucaagugcuacggcgugagccccaccaagcugaacgaccugugcuucaccaacguguacgccgacagcuucgugauccguggcgacgaggugcggcagaucgcacccggccagacaggcaagaucgccgacuacaacuacaagcugcccgacgacuucaccggcugcgugaucgccuggaacagcaacaaccucgacagcaaggugggcggcaacuacaacuaccgcuaccggcuguuccggaagagcaaccugaagcccuucgagcgggacaucagcaccgagaucuaccaagccggcuccaccccuugcaacggcguggagggcuucaacugcuacuucccucugcagagcuacggcuuccagcccaccaacggcgugggcuaccagcccuaccgggugguggugcugagcuucgagcugcugcacgccccagccaccguguguggccccaagaagagcaccaaccuggugaagaacaagugcgugaacuucaacuucaacggccuuaccggcaccggcgugcugaccgagagcaacaagaaauuccugcccuuucagcaguucggccgggacaucgccgacaccaccgacgcugugcgggauccccagacccuggagauccuggacaucaccccuugcagcuucggcggcgugagcgugaucaccccaggcaccaacaccagcaaccagguggccgugcuguaccagggcgugaacugcaccgaggugcccguggccauccacgccgaccagcugacacccaccuggcgggucuacagcaccggcagcaacguguuccagacccgggccgguugccugaucggcgccgagcacgugaacaacagcuacgagugcgacauccccaucggcgccggcaucugugccagcuaccagacccagaccaauucaccccggagggcaaggagcguggccagccagagcaucaucgccuacaccaugagccugggcgccgagaacagcguggccuacagcaacaacagcaucgccauccccaccaacuucaccaucagcgugaccaccgagauucugcccgugagcaugaccaagaccagcguggacugcaccauguacaucugcggcgacagcaccgagugcagcaaccugcugcugcaguacggcagcuucugcacccagcugaaccgggcccugaccggcaucgccguggagcaggacaagaacacccaggagguguucgcccaggugaagcagaucuacaagaccccucccaucaaggacuucggcggcuucaacuucagccagauccugcccgaccccagcaagcccagcaagcggagcuucaucgaggaccugcuguucaacaaggugacccuagccgacgccggcuucaucaagcaguacggcgacugccucggcgacauagccgcccgggaccugaucugcgcccagaaguucaacggccugaccgugcugccuccccugcugaccgacgagaugaucgcccaguacaccagcgcccuguuagccggaaccaucaccagcggcuggacuuucggcgcuggagccgcucugcagauccccuucgccaugcagauggccuaccgguucaacggcaucggcgugacccagaacgugcuguacgagaaccagaagcugaucgccaaccaguucaacagcgccaucggcaagauccaggacagccugagcagcaccgcuagcgcccugggcaagcugcaggacguggugaaccagaacgcccaggcccugaacacccuggugaagcagcugagcagcaacuucggcgccaucagcagcgugcugaacgacauccugagccggcuggacccucccgaggccgaggugcagaucgaccggcugaucacuggccggcugcagagccugcagaccuacgugacccagcagcugauccgggccgccgagauucgggccagcgccaaccuggccgccaccaagaugagcgagugcgugcugggccagagcaagcggguggacuucugcggcaagggcuaccaccugaugagcuuuccccagagcgcaccccacggagugguguuccugcacgugaccuacgugcccgcccaggagaagaacuucaccaccgccccagccaucugccacgacggcaaggcccacuuuccccgggagggcguguucgugagcaacggcacccacugguucgugacccagcggaacuucuacgagccccagaucaucaccaccgacaacaccuucgugagcggcaacugcgacguggugaucggcaucgugaacaacaccguguacgauccccugcagcccgagcuggacagcuucaaggaggagcuggacaaguacuucaagaaucacaccagccccgacguggaccugggcgacaucagcggcaucaacgccagcguggugaacauccagaaggagaucgaucggcugaacgagguggccaagaaccugaacgagagccugaucgaccugcaggagcugggcaaguacgagcaguacaucaaguggcccugguacaucuggcugggcuucaucgccggccugaucgccaucgugauggugaccaucaugcugugcugcaugaccagcugcugcagcugccugaagggcuguugcagcugcggcagcugcugcaaguucgacgaggacgacagcgagcccgugcugaagggcgugaagcugcacuacaccugaggacuaguuauaagacugacuagcccgaugggccucccaacgggcccuccuccccuccuugcaccgagauuaauaaaaaaaaaaaaaaaaaaaaaaaaaaaaaaaaaaaaaaaaaaaaaaaaaaaaaaaaaaaaaaaaaaaaaaaaaaaaaaaaaaaaaaaaaaaaaaaaaaaa

SEQ ID NO: 25551 - RNA, 4011 nt, Artificial Sequence
  SARS-CoV-2/Wuhan/WIV05/2019__EPI_ISL_402128 spike protein mRNA gc (1-1273)(K986P_V987P)
aggagaaagcuuaccauguucguguuccuggugcugcugccccuggugagcagccagugcgugaaccugaccacccggacccagcugcccccugccuacaccaacagcuucacccggggcguguacuaccccgacaagguguuccggagcagcgugcugcacagcacccaggaccuguuccugcccuucuucagcaacgugaccugguuccacgccauccacgugagcggcaccaacggcaccaagcgguucgacaacccagugcugcccuucaacgacggcguguacuucgccagcaccgagaagucaaacaucauccggggcuggaucuucggcaccacccuggacagcaagacacagagccugcugaucgugaacaacgccaccaacguggugaucaaggugugcgaguuucaguucugcaacgaccccuuccugggcguguacuaccacaagaacaacaagagcuggauggagagcgaguuccgggucuacagcagcgcuaacaauugcaccuucgaguacgugagccagcccuuccugauggaccucgagggcaagcagggcaacuucaagaaccugcgggaguucguguucaagaacaucgauggcuacuucaagaucuacagcaagcacacccccaucaaccuggugcgggaccugccccagggauucagcgcccuggagccucugguggaccugcccaucggcaucaacaucaccagguuccagacccugcuggcccugcaccggagcuaccugacccccggcgacagcagcagcggcuggaccgccggcgccgccgcauacuacgugggcuaccugcagccacggaccuuccugcugaaguacaacgagaacggcaccaucaccgacgccguggacugcgcccuggacccccugagcgagaccaagugcacccuaaagagcuucaccguggagaagggcaucuaccagaccagcaacuuccgggugcagcccacugagagcaucgugcgguuccccaacauuaccaaccugugucccuucggcgagguguucaacgccacccgguucgccagcguguacgccuggaaccggaagcggaucagcaacugcguggccgacuacagcgugcuguacaacagcgccagcuucagcaccuucaagugcuacggcgugagcccuaccaagcugaacgaccugugcuucaccaacguguacgcugacagcuucgugauccggggcgacgaggugcggcagaucgcccccggccagaccggcaagaucgccgacuacaacuacaagcugcccgacgacuucaccggcugcgugaucgccuggaacagcaacaaccuggacagcaaggugggcggcaacuacaacuaccuguaccggcuguuccguaagagcaaccugaagccauucgagcgggacaucagcaccgagaucuaccaggccggcagcacccccugcaacgguguggagggcuuuaacugcuacuucccccugcagagcuacggcuuccagcccaccaacggcgugggcuaccagcccuaccgggugguggugcugagcuucgagcugcugcacgcccccgccaccgugugcggcccuaaaaagagcaccaaccuggugaagaacaagugcgugaacuucaauuucaacggccugaccggcaccggcgugcugaccgagagcaacaagaaguuccugcccuuccagcaguucggccgggauaucgccgacaccaccgacgcagugcgggacccccagacccuggagauccuggacaucaccccaugcagcuucggcggcgugagcgucaucacccccggcacaaacaccagcaaccagguggccgugcuguaccaggacgugaacugcaccgaggugcccguggccauccacgccgaccagcugacccccaccuggcggguguacagcaccggaagcaacguguuccagacccgggccggcugccugaucggcgccgagcacgugaacaacuccuacgagugcgacauccccaucggcgcuggcaucugcgccagcuaccagacccagaccaacagcccccggcgggcccggagcguggccagccagagcaucaucgccuacaccaugagcuuaggcgccgagaacagcguggccuacagcaacaacagcaucgcgaucccuaccaacuucaccaucagcgugaccaccgagauacugcccgugagcaugaccaagaccagcguggacuguaccauguacaucugcggcgacagcaccgagugcagcaaccugcugcugcaguacggcagcuucugcacccagcugaaccgggcccugaccggcaucgccguggagcaggacaagaacacccaagagguguucgcccaggugaagcagaucuacaagacucccccaaucaaggacuucggcggcuucaacuucagccagauccugcccgaccccagcaagcccagcaagcggagcuucaucgaggaccugcuguucaacaaggugacccuggccgacgccggcuucaucaagcaguacggcgauugccugggcgacaucgccgcucgggaccugaucugcgcccagaaguucaacgggcugaccgugcugcccccucugcugaccgacgagaugaucgcccaguacaccagcgcccugcuugccggcaccaucaccagcggcuggaccuucggcgccggcgcagcccugcagauccccuucgccaugcagauggccuaccgguucaacggcaucggcgugacccagaacgugcuguacgagaaccagaagcugaucgccaaccaguucaacagcgccaucggcaagauccaggacagccugagcagcaccgccagcgcccugggcaagcugcaggacguggugaaccagaacgcucaggcccugaacacccuggugaagcagcugagcagcaacuucggcgccaucagcucagugcugaaugacauccugagcaggcuggaucccccagaggccgaggugcagaucgaccggcugaucaccggccggcugcagagccugcagaccuacgugacccagcagcugauccgggccgccgagauccgggccagcgccaaccuggcagccaccaagaugagcgagugcgugcugggccagagcaagcggguggacuuuugcggcaagggcuaccaccugaugagcuucccccagagcgcuccccacggcgugguguuccuccacgugacauacguccccgcccaggagaagaacuucaccaccgcccccgccauuugccacgacggcaaggcccacuucccccgggagggcguguucgugagcaacggaacccacugguucgugacccagcggaacuucuacgagccucagaucaucaccaccgacaacaccuucgugagcggcaacugcgacguggugaucggcaucgugaacaacaccguguacgacccccugcagcccgagcuggacagcuucaaggaggagcuggacaaguacuucaagaaccacaccagcccagacguggaccugggcgacaucagcggcaucaacgccagcguggugaacauccagaaggagaucgaccggcugaacgagguggccaagaaccugaacgagagccugaucgaccugcaggagcugggcaaguacgagcaguacaucaaguggcccugguacaucuggcugggcuucaucgccggccugaucgccaucgugauggugaccaucaugcugugcugcaugaccagcugcuguagcugccugaagggcugcugcagcugcggcagcugcugcaaguucgacgaggacgacagcgagcccgugcugaagggcgugaagcugcacuacaccugaggacuaguuauaagacugacuagcccgaugggccucccaacgggcccuccuccccuccuugcaccgagauuaauaaaaaaaaaaaaaaaaaaaaaaaaaaaaaaaaaaaaaaaaaaaaaaaaaaaaaaaaaaaaaaaaaaaaaaaaaaaaaaaaaaaaaaaaaaaaaaaaaaaa

SEQ ID NO: 25552 - RNA, 4011 nt, Artificial Sequence
  SARS-CoV-2/Wuhan/WIV05/2019__EPI_ISL_402128 spike protein mRNA gc (1-1273)(K986P_V987P_ D614G)
aggagaaagcuuaccauguucguguuccuggugcugcugccccuggugagcagccagugcgugaaccugaccacccggacccagcugcccccugccuacaccaacagcuucacccggggcguguacuaccccgacaagguguuccggagcagcgugcugcacagcacccaggaccuguuccugcccuucuucagcaacgugaccugguuccacgccauccacgugagcggcaccaacggcaccaagcgguucgacaacccagugcugcccuucaacgacggcguguacuucgccagcaccgagaagucaaacaucauccggggcuggaucuucggcaccacccuggacagcaagacacagagccugcugaucgugaacaacgccaccaacguggugaucaaggugugcgaguuucaguucugcaacgaccccuuccugggcguguacuaccacaagaacaacaagagcuggauggagagcgaguuccgggucuacagcagcgcuaacaauugcaccuucgaguacgugagccagcccuuccugauggaccucgagggcaagcagggcaacuucaagaaccugcgggaguucguguucaagaacaucgauggcuacuucaagaucuacagcaagcacacccccaucaaccuggugcgggaccugccccagggauucagcgcccuggagccucugguggaccugcccaucggcaucaacaucaccagguuccagacccugcuggcccugcaccggagcuaccugacccccggcgacagcagcagcggcuggaccgccggcgccgccgcauacuacgugggcuaccugcagccacggaccuuccugcugaaguacaacgagaacggcaccaucaccgacgccguggacugcgcccuggacccccugagcgagaccaagugcacccuaaagagcuucaccguggagaagggcaucuaccagaccagcaacuuccgggugcagcccacugagagcaucgugcgguuccccaacauuaccaaccugugucccuucggcgagguguucaacgccacccgguucgccagcguguacgccuggaaccggaagcggaucagcaacugcguggccgacuacagcgugcuguacaacagcgccagcuucagcaccuucaagugcuacggcgugagcccuaccaagcugaacgaccugugcuucaccaacguguacgcugacagcuucgugauccggggcgacgaggugcggcagaucgcccccggccagaccggcaagaucgccgacuacaacuacaagcugcccgacgacuucaccggcugcgugaucgccuggaacagcaacaaccuggacagcaaggugggcggcaacuacaacuaccuguaccggcuguuccguaagagcaaccugaagccauucgagcgggacaucagcaccgagaucuaccaggccggcagcacccccugcaacgguguggagggcuuuaacugcuacuucccccugcagagcuacggcuuccagcccaccaacggcgugggcuaccagcccuaccgggugguggugcugagcuucgagcugcugcacgcccccgccaccgugugcggcccuaaaaagagcaccaaccuggugaagaacaagugcgugaacuucaauuucaacggccugaccggcaccggcgugcugaccgagagcaacaagaaguuccugcccuuccagcaguucggccgggauaucgccgacaccaccgacgcagugcgggacccccagacccuggagauccuggacaucaccccaugcagcuucggcggcgugagcgucaucacccccggcacaaacaccagcaaccagguggccgugcuguaccagggagugaacugcaccgaggugcccguggccauccacgccgaccagcugacccccaccuggcggguguacagcaccggcagcaacguguuccagacccgggccggcugccugaucggcgccgagcacgugaacaacuccuacgagugcgacauccccaucggcgcuggcaucugcgccagcuaccagacccagaccaacagcccccggcgggcccggagcguggccagccagagcaucaucgccuacaccaugagcuuaggcgccgagaacagcguggccuacagcaacaacagcaucgcgaucccuaccaacuucaccaucagcgugaccaccgagauacugcccgugagcaugaccaagaccagcguggacuguaccauguacaucugcggcgacagcaccgagugcagcaaccugcugcugcaguacggcagcuucugcacccagcugaaccgggcccugaccggcaucgccguggagcaggacaagaacacccaagagguguucgcccaggugaagcagaucuacaagacucccccaaucaaggacuucggcggcuucaacuucagccagauccugcccgaccccagcaagcccagcaagcggagcuucaucgaggaccugcuguucaacaaggugacccuggccgacgccggcuucaucaagcaguacggcgacugccugggggauaucgccgcucgggaccugaucugcgcccagaaguucaacggccugaccgugcugcccccucugcugaccgacgagaugaucgcccaguacaccagcgcccugcuugccggcaccaucaccagcggcuggaccuucggcgccggcgcagcccugcagauccccuucgccaugcagauggccuaccgguucaacggcaucggcgugacccagaacgugcuguacgagaaccagaagcugaucgccaaccaguucaacagcgccaucggcaagauccaggacagccugagcagcaccgccagcgcccugggcaagcugcaggacguggugaaccagaacgcucaggcccugaacacccuggugaagcagcugagcagcaacuucggcgccaucagcucagugcugaaugacauccugagcaggcuggaucccccagaggccgaggugcagaucgaccggcugaucaccggccggcugcagagccugcagaccuacgugacccagcagcugauccgggccgccgagauccgggccagcgccaaccuggcagccaccaagaugagcgagugcgugcugggccagagcaagcggguggacuuuugcggcaagggcuaccaccugaugagcuucccccagagcgcuccccacggcgugguguuccuccacgugacauacguccccgcccaggagaagaacuucaccaccgcccccgccauuugccacgacggcaaggcccacuucccccgggagggaguguucgugagcaacggcacccacugguucgugacccagcggaacuucuacgagccucagaucaucaccaccgacaacaccuucgugagcggcaacugcgacguggugaucggcaucgugaacaacaccguguacgacccccugcagcccgagcuggacagcuucaaggaggagcuggacaaguacuucaagaaccacaccagcccagacguggaccugggcgacaucagcggcaucaacgccagcguggugaacauccagaaggagaucgaccggcugaacgagguggccaagaaccugaacgagagccugaucgaccugcaggagcugggcaaguacgagcaguacaucaaguggcccugguacaucuggcugggcuucaucgccggccugaucgccaucgugauggugaccaucaugcugugcugcaugaccagcugcuguagcugccugaagggcugcugcagcugcggcagcugcugcaaguucgacgaggacgacagcgagcccgugcugaagggcgugaagcugcacuacaccugaggacuaguuauaagacugacuagcccgaugggccucccaacgggcccuccuccccuccuugcaccgagauuaauaaaaaaaaaaaaaaaaaaaaaaaaaaaaaaaaaaaaaaaaaaaaaaaaaaaaaaaaaaaaaaaaaaaaaaaaaaaaaaaaaaaaaaaaaaaaaaaaaaaa

SEQ ID NO: 25553 - RNA, 4011 nt, Artificial Sequence
  SARS-CoV-2/Wuhan/WIV05/2019__EPI_ISL_402128 spike protein mRNA gc (1-1273)(K986P_V987P_A222V_D614G)
aggagaaagcuuaccauguucguguuccuggugcugcugccccuggugagcagccagugcgugaaccugaccacccggacccagcugcccccugccuacaccaacagcuucacccggggcguguacuaccccgacaagguguuccggagcagcgugcugcacagcacccaggaccuguuccugcccuucuucagcaacgugaccugguuccacgccauccacgugagcggcaccaacggcaccaagcgguucgacaacccagugcugcccuucaacgacggcguguacuucgccagcaccgagaagucaaacaucauccggggcuggaucuucggcaccacccuggacagcaagacacagagccugcugaucgugaacaacgccaccaacguggugaucaaggugugcgaguuucaguucugcaacgaccccuuccugggcguguacuaccacaagaacaacaagagcuggauggagagcgaguuccgggucuacagcagcgcuaacaauugcaccuucgaguacgugagccagcccuuccugauggaccucgagggcaagcagggcaacuucaagaaccugcgggaguucguguucaagaacaucgauggcuacuucaagaucuacagcaagcacacccccaucaaccuggugcgggaccugccccagggauucagcgugcuggagccucugguggaccugcccaucggcaucaacaucaccagguuccagacccugcuggcccugcaccggagcuaccugacccccggcgacagcagcagcggcuggaccgccggcgccgccgccuacuacgugggcuaccugcagccacggaccuuccugcugaaguacaacgagaacggcaccaucaccgacgcaguggacugcgcccuggacccccugagcgagaccaagugcacccuaaagagcuucaccguggagaagggcaucuaccagaccagcaacuuccgggugcagcccacugagagcaucgugcgguuccccaacauuaccaaccugugucccuucggcgagguguucaacgccacccgguucgccagcguguacgccuggaaccggaagcggaucagcaacugcguggccgacuacagcgugcuguacaacagcgccagcuucagcaccuucaagugcuacggcgugagcccuaccaagcugaacgaccugugcuucaccaacguguacgccgacagcuucgugauccggggcgacgaggugcggcagaucgcucccggccagaccggcaagaucgccgacuacaacuacaagcugcccgacgacuucaccggcugcgugaucgccuggaacagcaacaaccuggacagcaaggugggcggcaacuacaacuaccuguaccggcuguuccguaagagcaaccugaagccauucgagcgggacaucagcaccgagaucuaccaggccggcagcacccccugcaacgguguggagggcuuuaacugcuacuucccccugcagagcuacggcuuccagcccaccaacggcgugggcuaccagcccuaccgggugguggugcugagcuucgagcugcugcacgcccccgccaccgugugcggcccuaaaaagagcaccaaccuggugaagaacaagugcgugaacuucaauuucaacggccugaccggcaccggcgugcugaccgagagcaacaagaaguuccugcccuuccagcaguucggccgggauaucgccgacaccaccgacgccgugcgggacccccagacccuggagauccuggacaucaccccaugcagcuucggcggcgucagcgugaucacccccggcacaaacaccagcaaccagguggcagugcuguaccagggagugaacugcaccgaggugcccguggccauccacgccgaccagcugacccccaccuggcggguguacagcaccggcagcaacguguuccagacccgggccggcugccugaucggcgccgagcacgugaacaacuccuacgagugcgacauccccaucggcgccggcaucugcgcuagcuaccagacccagaccaacagcccccggcgggcccggagcguggccagccagagcaucaucgccuacaccaugagcuuaggcgccgagaacagcguggccuacagcaacaacagcaucgccaucccuaccaacuucaccaucagcgugaccaccgagauacugcccgugagcaugaccaagaccagcguggacuguaccauguacaucugcggcgacagcaccgagugcagcaaccugcugcugcaguacggcagcuucugcacccagcugaaccgggcgcugaccggcaucgccguggagcaggacaagaacacccaagagguguucgcccaggugaagcagaucuacaagacucccccaaucaaggacuucggcggcuucaacuucagccagauccugcccgaccccagcaagcccagcaagcggagcuucaucgaggaccugcuguucaacaaggugacccuggccgacgccggcuucaucaagcaguacggcgacugccugggggauaucgccgcccgggaccugaucugcgcucagaaguucaacggccugaccgugcugcccccucugcugaccgacgagaugaucgcccaguacaccagcgcccugcuugccggcaccaucaccagcggcuggaccuucggcgccggcgccgcacugcagauccccuucgccaugcagauggccuaccgguucaacggcaucggcgugacccagaacgugcuguacgagaaccagaagcugaucgccaaccaguucaacagcgccaucggcaagauccaggacagccugagcagcaccgccagcgcccugggcaagcugcaggacguggugaaccagaacgcccaggcucugaacacccuggugaagcagcugagcagcaacuucggcgccaucagcucagugcugaaugacauccugagcaggcuggaucccccagaggccgaggugcagaucgaccggcugaucaccggccggcugcagagccugcagaccuacgugacccagcagcugauccgggccgccgagauccgggccagcgccaaccuggccgcaaccaagaugagcgagugcgugcugggccagagcaagcggguggacuuuugcggcaagggcuaccaccugaugagcuucccccagagcgcuccccacggcgugguguuccuccacgucacauacgugcccgcccaggagaagaacuucaccaccgcccccgccauuugccacgacggcaaggcccacuucccccgggagggaguguucgugagcaacggcacccacugguucgugacccagcggaacuucuacgagccucagaucaucaccaccgacaacaccuucgugagcggcaacugcgacguggugaucggcaucgugaacaacaccguguacgacccccugcagcccgagcuggacagcuucaaggaggagcuggacaaguacuucaagaaccacaccagcccagacguggaccugggcgacaucagcggcaucaacgccagcguggugaacauccagaaggagaucgaccggcugaacgagguggccaagaaccugaacgagagccugaucgaccugcaggagcugggcaaguacgagcaguacaucaaguggcccugguacaucuggcugggcuucaucgccggccugaucgccaucgugauggugaccaucaugcugugcugcaugaccagcugcuguagcugccugaagggcugcugcagcugcggcagcugcugcaaguucgacgaggacgacagcgagcccgugcugaagggcgugaagcugcacuacaccugaggacuaguuauaagacugacuagcccgaugggccucccaacgggcccuccuccccuccuugcaccgagauuaauaaaaaaaaaaaaaaaaaaaaaaaaaaaaaaaaaaaaaaaaaaaaaaaaaaaaaaaaaaaaaaaaaaaaaaaaaaaaaaaaaaaaaaaaaaaaaaaaaaaa

SEQ ID NO: 25554 - RNA, 4011 nt, Artificial Sequence
  SARS-CoV-2/Wuhan/WIV05/2019__EPI_ISL_402128 spike protein mRNA gc (1-1273)(K986P_V987P_N439K_D614G)
aggagaaagcuuaccauguucguguuccuggugcugcugccccuggugagcagccagugcgugaaccugaccacccggacccagcugcccccugccuacaccaacagcuucacccggggcguguacuaccccgacaagguguuccggagcagcgugcugcacagcacccaggaccuguuccugcccuucuucagcaacgugaccugguuccacgccauccacgugagcggcaccaacggcaccaagcgguucgacaacccagugcugcccuucaacgacggcguguacuucgccagcaccgagaagucaaacaucauccggggcuggaucuucggcaccacccuggacagcaagacacagagccugcugaucgugaacaacgccaccaacguggugaucaaggugugcgaguuucaguucugcaacgaccccuuccugggcguguacuaccacaagaacaacaagagcuggauggagagcgaguuccgggucuacagcagcgcuaacaauugcaccuucgaguacgugagccagcccuuccugauggaccucgagggcaagcagggcaacuucaagaaccugcgggaguucguguucaagaacaucgauggcuacuucaagaucuacagcaagcacacccccaucaaccuggugcgggaccugccccagggauucagcgcccuggagccucugguggaccugcccaucggcaucaacaucaccagguuccagacccugcuggcccugcaccggagcuaccugacccccggcgacagcagcagcggcuggaccgccggcgccgccgcauacuacgugggcuaccugcagccacggaccuuccugcugaaguacaacgagaacggcaccaucaccgacgccguggacugcgcccuggacccccugagcgagaccaagugcacccuaaagagcuucaccguggagaagggcaucuaccagaccagcaacuuccgggugcagcccacugagagcaucgugcgguuccccaacauuaccaaccugugucccuucggcgagguguucaacgccacccgguucgccagcguguacgccuggaaccggaagcggaucagcaacugcguggccgacuacagcgugcuguacaacagcgccagcuucagcaccuucaagugcuacggcgugagcccuaccaagcugaacgaccugugcuucaccaacguguacgcugacagcuucgugauccggggcgacgaggugcggcagaucgcccccggccagaccggcaagaucgccgacuacaacuacaagcugcccgacgacuucaccggcugcgugaucgccuggaacagcaagaaccuggacagcaaggugggcggcaacuacaacuaccuguaccggcuguuccguaagagcaaccugaagccauucgagcgggacaucagcaccgagaucuaccaggccggcagcacccccugcaacgguguggagggcuuuaacugcuacuucccccugcagagcuacggcuuccagcccaccaacggcgugggcuaccagcccuaccgggugguggugcugagcuucgagcugcugcacgcccccgccaccgugugcggcccuaaaaagagcaccaaccuggugaagaacaagugcgugaacuucaacuucaauggccugaccggcaccggcgugcugaccgagagcaacaagaaguuccugcccuuccagcaguucggccgggauaucgccgacaccaccgacgcagugcgggacccccagacccuggagauccuggacaucaccccaugcagcuucggcggcgugagcgucaucacccccggcacaaacaccagcaaccagguggccgugcuguaccagggagugaacugcaccgaggugcccguggccauccacgccgaccagcugacccccaccuggcggguguacagcaccggcagcaacguguuccagacccgggccggcugccugaucggcgccgagcacgugaacaacuccuacgagugcgacauccccaucggcgcuggcaucugcgccagcuaccagacccagaccaacagcccccggcgggcccggagcguggccagccagagcaucaucgccuacaccaugagcuuaggcgccgagaacagcguggccuacagcaacaacagcaucgcgaucccuaccaacuucaccaucagcgugaccaccgagauacugcccgugagcaugaccaagaccagcguggacuguaccauguacaucugcggcgacagcaccgagugcagcaaccugcugcugcaguacggcagcuucugcacccagcugaaccgggcccugaccggcaucgccguggagcaggacaagaacacccaagagguguucgcccaggugaagcagaucuacaagacucccccaaucaaggacuucggcggcuucaacuucagccagauccugcccgaccccagcaagcccagcaagcggagcuucaucgaggaccugcuguucaacaaggugacccuggccgacgccggcuucaucaagcaguacggcgacugccugggggauaucgccgcucgggaccugaucugcgcccagaaguucaacggccugaccgugcugcccccucugcugaccgacgagaugaucgcccaguacaccagcgcccugcuugccggcaccaucaccagcggcuggaccuucggcgccggcgcagcccugcagauccccuucgccaugcagauggccuaccgguucaacggcaucggcgugacccagaacgugcuguacgagaaccagaagcugaucgccaaccaguucaacagcgccaucggcaagauccaggacagccugagcagcaccgccagcgcccugggcaagcugcaggacguggugaaccagaacgcucaggcccugaacacccuggugaagcagcugagcagcaacuucggcgccaucagcucagugcugaacgacauccugagcaggcuggaucccccagaggccgaggugcagaucgaccggcugaucaccggccggcugcagagccugcagaccuacgugacccagcagcugauccgggccgccgagauccgggccagcgccaaucuggcagccaccaagaugagcgagugcgugcugggccagagcaagcggguggacuuuugcggcaagggcuaccaccugaugagcuucccccagagcgcuccccacggcgugguguuccuccacgugacauacguccccgcccaggagaagaacuucaccaccgcccccgccauuugccacgacggcaaggcccacuucccccgggagggaguguucgugagcaacggcacccacugguucgugacccagcggaacuucuacgagccucagaucaucaccaccgacaacaccuucgugagcggcaacugcgacguggugaucggcaucgugaacaacaccguguacgacccccugcagcccgagcuggacagcuucaaggaggagcuggacaaguacuucaagaaccacaccagcccagacguggaccugggcgacaucagcggcaucaacgccagcguggugaacauccagaaggagaucgaccggcugaacgagguggccaagaaccugaacgagagccugaucgaccugcaggagcugggcaaguacgagcaguacaucaaguggcccugguacaucuggcugggcuucaucgccggccugaucgccaucgugauggugaccaucaugcugugcugcaugaccagcugcuguagcugccugaagggcugcugcagcugcggcagcugcugcaaguucgacgaggacgacagcgagcccgugcugaagggcgugaagcugcacuacaccugaggacuaguuauaagacugacuagcccgaugggccucccaacgggcccuccuccccuccuugcaccgagauuaauaaaaaaaaaaaaaaaaaaaaaaaaaaaaaaaaaaaaaaaaaaaaaaaaaaaaaaaaaaaaaaaaaaaaaaaaaaaaaaaaaaaaaaaaaaaaaaaaaaaa

SEQ ID NO: 25555 - RNA, 4011 nt, Artificial Sequence
  SARS-CoV-2/Wuhan/WIV05/2019__EPI_ISL_402128 spike protein mRNA gc (1-1273)(K986P_V987P_S477N_D614G)
aggagaaagcuuaccauguucguguuccuggugcugcugccccuggugagcagccagugcgugaaccugaccacccggacccagcugcccccugccuacaccaacagcuucacccggggcguguacuaccccgacaagguguuccggagcagcgugcugcacagcacccaggaccuguuccugcccuucuucagcaacgugaccugguuccacgccauccacgugagcggcaccaacggcaccaagcgguucgacaacccagugcugcccuucaacgacggcguguacuucgccagcaccgagaagucaaacaucauccggggcuggaucuucggcaccacccuggacagcaagacacagagccugcugaucgugaacaacgccaccaacguggugaucaaggugugcgaguuucaguucugcaacgaccccuuccugggcguguacuaccacaagaacaacaagagcuggauggagagcgaguuccgggucuacagcagcgcuaacaauugcaccuucgaguacgugagccagcccuuccugauggaccucgagggcaagcagggcaacuucaagaaccugcgggaguucguguucaagaacaucgauggcuacuucaagaucuacagcaagcacacccccaucaaccuggugcgggaccugccccagggauucagcgcccuggagccucugguggaccugcccaucggcaucaacaucaccagguuccagacccugcuggcccugcaccggagcuaccugacccccggcgacagcagcagcggcuggaccgccggcgccgccgcauacuacgugggcuaccugcagccacggaccuuccugcugaaguacaacgagaacggcaccaucaccgacgccguggacugcgcccuggacccccugagcgagaccaagugcacccuaaagagcuucaccguggagaagggcaucuaccagaccagcaacuuccgggugcagcccacugagagcaucgugcgguuccccaacauuaccaaccugugucccuucggcgagguguucaacgccacccgguucgccagcguguacgccuggaaccggaagcggaucagcaacugcguggccgacuacagcgugcuguacaacagcgccagcuucagcaccuucaagugcuacggcgugagcccuaccaagcugaacgaccugugcuucaccaacguguacgcugacagcuucgugauccggggcgacgaggugcggcagaucgcccccggccagaccggcaagaucgccgacuacaacuacaagcugcccgacgacuucaccggcugcgugaucgccuggaacagcaacaaccuggacagcaaggugggcggcaacuacaacuaccuguaccggcuguuccguaagagcaaccugaagccauucgagcgggacaucagcaccgagaucuaccaggccggcaacacccccugcaacgguguggagggcuuuaacugcuacuucccccugcagagcuacggcuuccagcccaccaacggcgugggcuaccagcccuaccgggugguggugcugagcuucgagcugcugcacgcccccgccaccgugugcggcccuaaaaagagcaccaaccuggugaagaacaagugcgugaauuucaacuucaacggccugaccggcaccggcgugcugaccgagagcaacaagaaguuccugcccuuccagcaguucggccgggauaucgccgacaccaccgacgcagugcgggacccccagacccuggagauccuggacaucaccccaugcagcuucggcggcgugagcgucaucacccccggcacaaacaccagcaaccagguggccgugcuguaccagggagugaacugcaccgaggugcccguggccauccacgccgaccagcugacccccaccuggcggguguacagcaccggcagcaacguguuccagacccgggccggcugccugaucggcgccgagcacgugaacaacagcuacgagugcgacauccccaucggcgcuggcaucugcgccuccuaccagacccagaccaacagcccccggcgggcccggagcguggccagccagagcaucaucgccuacaccaugagcuuaggcgccgagaacagcguggccuacagcaacaacagcaucgcgaucccuaccaacuucaccaucagcgugaccaccgagauacugcccgugagcaugaccaagaccagcguggacuguaccauguacaucugcggcgacagcaccgagugcagcaaccugcugcugcaguacggcagcuucugcacccagcugaaccgggcccugaccggcaucgccguggagcaggacaagaacacccaagagguguucgcccaggugaagcagaucuacaagacucccccaaucaaggacuucggcggcuucaacuucagccagauccugcccgaccccagcaagcccagcaagcggagcuucaucgaggaccugcuguucaacaaggugacccuggccgacgccggcuucaucaagcaguacggcgacugccugggggauaucgccgcucgggaccugaucugcgcccagaaguucaacggccugaccgugcugcccccucugcugaccgacgagaugaucgcccaguacaccagcgcccugcuugccggcaccaucaccagcggcuggaccuucggcgccggcgcagcccugcagauccccuucgccaugcagauggccuaccgguucaacggcaucggcgugacccagaacgugcuguacgagaaccagaagcugaucgccaaccaguucaacagcgccaucggcaagauccaggacagccugagcagcaccgccagcgcccugggcaagcugcaggacguggugaaccagaacgcucaggcccugaacacccuggugaagcagcugagcagcaauuucggcgccaucagcagcgugcugaacgacauccugucaaggcuggaucccccagaggccgaggugcagaucgaccggcugaucaccggccggcugcagagccugcagaccuacgugacccagcagcugauccgggccgccgagauccgggccagcgccaaccuggcagccaccaagaugagcgagugcgugcugggccagagcaagcggguggacuuuugcggcaagggcuaccaccugaugagcuucccccagagcgcuccccacggcgugguguuccuccacgugacauacguccccgcccaggagaagaacuucaccaccgcccccgccauuugccacgacggcaaggcccacuucccccgggagggaguguucgugagcaacggcacccacugguucgugacccagcggaacuucuacgagccucagaucaucaccaccgacaacaccuucgugagcggcaacugcgacguggugaucggcaucgugaacaacaccguguacgacccccugcagcccgagcuggacagcuucaaggaggagcuggacaaguacuucaagaaccacaccagcccagacguggaccugggcgacaucagcggcaucaacgccagcguggugaacauccagaaggagaucgaccggcugaacgagguggccaagaaccugaacgagagccugaucgaccugcaggagcugggcaaguacgagcaguacaucaaguggcccugguacaucuggcugggcuucaucgccggccugaucgccaucgugauggugaccaucaugcugugcugcaugaccagcugcuguagcugccugaagggcugcugcagcugcggcagcugcugcaaguucgacgaggacgacagcgagcccgugcugaagggcgugaagcugcacuacaccugaggacuaguuauaagacugacuagcccgaugggccucccaacgggcccuccuccccuccuugcaccgagauuaauaaaaaaaaaaaaaaaaaaaaaaaaaaaaaaaaaaaaaaaaaaaaaaaaaaaaaaaaaaaaaaaaaaaaaaaaaaaaaaaaaaaaaaaaaaaaaaaaaaaa

SEQ ID NO: 25556 - RNA, 4011 nt, Artificial Sequence
  SARS-CoV-2/Wuhan/WIV05/2019__EPI_ISL_402128 spike protein mRNA gc (1-1273)(K986P_V987P_N501Y_D614G)
aggagaaagcuuaccauguucguguuccuggugcugcugccccuggugagcagccagugcgugaaccugaccacccggacccagcugcccccugccuacaccaacagcuucacccggggcguguacuaccccgacaagguguuccggagcagcgugcugcacagcacccaggaccuguuccugcccuucuucagcaacgugaccugguuccacgccauccacgugagcggcaccaacggcaccaagcgguucgacaacccagugcugcccuucaacgacggcguguacuucgccagcaccgagaagucaaacaucauccggggcuggaucuucggcaccacccuggacagcaagacacagagccugcugaucgugaacaacgccaccaacguggugaucaaggugugcgaguuucaguucugcaacgaccccuuccugggcguguacuaccacaagaacaacaagagcuggauggagagcgaguuccgggucuacagcagcgcuaacaauugcaccuucgaguacgugagccagcccuuccugauggaccucgagggcaagcagggcaacuucaagaaccugcgggaguucguguucaagaacaucgauggcuacuucaagaucuacagcaagcacacccccaucaaccuggugcgggaccugccccagggauucagcgcccuggagccucugguggaccugcccaucggcaucaacaucaccagguuccagacccugcuggcccugcaccggagcuaccugacccccggcgacagcagcagcggcuggaccgccggcgccgccgcauacuacgugggcuaccugcagccacggaccuuccugcugaaguacaacgagaacggcaccaucaccgacgccguggacugcgcccuggacccccugagcgagaccaagugcacccuaaagagcuucaccguggagaagggcaucuaccagaccagcaacuuccgggugcagcccacugagagcaucgugcgguuccccaacauuaccaaccugugucccuucggcgagguguucaacgccacccgguucgccagcguguacgccuggaaccggaagcggaucagcaacugcguggccgacuacagcgugcuguacaacagcgccagcuucagcaccuucaagugcuacggcgugagcccuaccaagcugaacgaccugugcuucaccaacguguacgcugacagcuucgugauccggggcgacgaggugcggcagaucgcccccggccagaccggcaagaucgccgacuacaacuacaagcugcccgacgacuucaccggcugcgugaucgccuggaacagcaacaaccuggacagcaaggugggcggcaacuacaacuaccuguaccggcuguuccguaagagcaaccugaagccauucgagcgggacaucagcaccgagaucuaccaggccggcagcacccccugcaacgguguggagggcuuuaacugcuacuucccccugcagagcuacggcuuccagcccaccuacggcgugggcuaccagcccuaccgggugguggugcugagcuucgagcugcugcacgcccccgccaccgugugcggcccuaaaaagagcaccaaccuggugaagaacaagugcgugaacuucaacuucaauggccugaccggcaccggcgugcugaccgagagcaacaagaaguuccugcccuuccagcaguucggccgggauaucgccgacaccaccgacgcagugcgggacccccagacccuggagauccuggacaucaccccaugcagcuucggcggcgugagcgucaucacccccggcacaaacaccagcaaccagguggccgugcuguaccagggagugaacugcaccgaggugcccguggccauccacgccgaccagcugacccccaccuggcggguguacagcaccggcagcaacguguuccagacccgggccggcugccugaucggcgccgagcacgugaacaacuccuacgagugcgacauccccaucggcgcuggcaucugcgccagcuaccagacccagaccaacagcccccggcgggcccggagcguggccagccagagcaucaucgccuacaccaugagcuuaggcgccgagaacagcguggccuacagcaacaacagcaucgcgaucccuaccaacuucaccaucagcgugaccaccgagauacugcccgugagcaugaccaagaccagcguggacuguaccauguacaucugcggcgacagcaccgagugcagcaaccugcugcugcaguacggcagcuucugcacccagcugaaccgggcccugaccggcaucgccguggagcaggacaagaacacccaagagguguucgcccaggugaagcagaucuacaagacucccccaaucaaggacuucggcggcuucaacuucagccagauccugcccgaccccagcaagcccagcaagcggagcuucaucgaggaccugcuguucaacaaggugacccuggccgacgccggcuucaucaagcaguacggcgacugccugggggauaucgccgcucgggaccugaucugcgcccagaaguucaacggccugaccgugcugcccccucugcugaccgacgagaugaucgcccaguacaccagcgcccugcuugccggcaccaucaccagcggcuggaccuucggcgccggcgcagcccugcagauccccuucgccaugcagauggccuaccgguucaacggcaucggcgugacccagaacgugcuguacgagaaccagaagcugaucgccaaccaguucaacagcgccaucggcaagauccaggacagccugagcagcaccgccagcgcccugggcaagcugcaggacguggugaaccagaacgcucaggcccugaacacccuggugaagcagcugagcagcaacuucggcgccaucagcucagugcugaacgacauccugagcaggcuggaucccccagaggccgaggugcagaucgaccggcugaucaccggccggcugcagagccugcagaccuacgugacccagcagcugauccgggccgccgagauccgggccagcgccaaucuggcagccaccaagaugagcgagugcgugcugggccagagcaagcggguggacuuuugcggcaagggcuaccaccugaugagcuucccccagagcgcuccccacggcgugguguuccuccacgugacauacguccccgcccaggagaagaacuucaccaccgcccccgccauuugccacgacggcaaggcccacuucccccgggagggaguguucgugagcaacggcacccacugguucgugacccagcggaacuucuacgagccucagaucaucaccaccgacaacaccuucgugagcggcaacugcgacguggugaucggcaucgugaacaacaccguguacgacccccugcagcccgagcuggacagcuucaaggaggagcuggacaaguacuucaagaaccacaccagcccagacguggaccugggcgacaucagcggcaucaacgccagcguggugaacauccagaaggagaucgaccggcugaacgagguggccaagaaccugaacgagagccugaucgaccugcaggagcugggcaaguacgagcaguacaucaaguggcccugguacaucuggcugggcuucaucgccggccugaucgccaucgugauggugaccaucaugcugugcugcaugaccagcugcuguagcugccugaagggcugcugcagcugcggcagcugcugcaaguucgacgaggacgacagcgagcccgugcugaagggcgugaagcugcacuacaccugaggacuaguuauaagacugacuagcccgaugggccucccaacgggcccuccuccccuccuugcaccgagauuaauaaaaaaaaaaaaaaaaaaaaaaaaaaaaaaaaaaaaaaaaaaaaaaaaaaaaaaaaaaaaaaaaaaaaaaaaaaaaaaaaaaaaaaaaaaaaaaaaaaaa

SEQ ID NO: 25557 - RNA, 4005 nt, Artificial Sequence
  SARS-CoV-2/Wuhan/WIV05/2019__EPI_ISL_402128 spike protein mRNA gc (1-1273)(K986P_V987P_H69del_V70del_D614G)
aggagaaagcuuaccauguucguguuccuggugcugcugccccuggugagcagccagugcgugaaccugaccacccggacccagcugcccccugccuacaccaacagcuucacccggggcguguacuaccccgacaagguguuccggagcagcgugcugcacagcacccaggaccuguuccugcccuucuucagcaacgugaccugguuccacgccaucagcggcaccaacggcaccaagcgguucgacaacccagugcugcccuucaacgacggcguguacuucgccagcaccgagaagucaaacaucauccggggcuggaucuucggcaccacccuggacagcaagacacagagccugcugaucgugaacaacgccaccaacguggugaucaaggugugcgaguuucaguucugcaacgaccccuuccugggcguguacuaccacaagaacaacaagagcuggauggagagcgaguuccggguguacagcagcgcuaacaauugcaccuucgaguacgucagccagcccuuccugauggaccucgagggcaagcagggcaacuucaagaaccugcgggaguucguguucaagaacaucgauggcuacuucaagaucuacagcaagcacacccccaucaaccuggugcgggaccugccccagggauucagcgcccuggagccucugguggaccugcccaucggcaucaacaucaccagguuccagacccugcuggcccugcaccggagcuaccugacccccggcgacagcagcagcggcuggaccgccggcgccgccgcauacuacgugggcuaccugcagccacggaccuuccugcugaaguacaacgagaacggcaccaucaccgacgccguggacugcgcccuggacccccugagcgagaccaagugcacccuaaagagcuucaccguggagaagggcaucuaccagaccagcaacuuccgggugcagcccacugagagcaucgugcgguuccccaacauuaccaaccugugucccuucggcgagguguucaacgccacccgguucgccagcguguacgccuggaaccggaagcggaucagcaacugcguggccgacuacagcgugcuguacaacagcgccagcuucagcaccuucaagugcuacggcgugagcccuaccaagcugaacgaccugugcuucaccaacguguacgcugacagcuucgugauccggggcgacgaggugcggcagaucgcccccggccagaccggcaagaucgccgacuacaacuacaagcugcccgacgacuucaccggcugcgugaucgccuggaacagcaacaaccuggacagcaaggugggcggcaacuacaacuaccuguaccggcuguuccguaagagcaaccugaagccauucgagcgggacaucagcaccgagaucuaccaggccggcagcacccccugcaacgguguggagggcuuuaacugcuacuucccccugcagagcuacggcuuccagcccaccaacggcgugggcuaccagcccuaccgggugguggugcugagcuucgagcugcugcacgcccccgccaccgugugcggcccuaaaaagagcaccaaccuggugaagaacaagugcgugaacuucaauuucaacggccugaccggcaccggcgugcugaccgagagcaacaagaaguuccugcccuuccagcaguucggccgggauaucgccgacaccaccgacgcagugcgggacccccagacccuggagauccuggacaucaccccaugcagcuucggcggcgugagcgugaucacccccggcacaaacaccagcaaccaggucgccgugcuguaccagggagugaacugcaccgaggugcccguggccauccacgccgaccagcugacccccaccuggcggguguacagcaccggcagcaacguguuccagacccgggccggcugccugaucggcgccgagcacgugaacaacuccuacgagugcgacauccccaucggcgcuggcaucugcgccagcuaccagacccagaccaacagcccccggcgggcccggagcguggccagccagagcaucaucgccuacaccaugagcuuaggcgccgagaacagcguggccuacagcaacaacagcaucgcgaucccuaccaacuucaccaucagcgugaccaccgagauacugcccgugagcaugaccaagaccagcguggacuguaccauguacaucugcggcgacagcaccgagugcagcaaccugcugcugcaguacggcagcuucugcacccagcugaaccgggcccugaccggcaucgccguggagcaggacaagaacacccaagagguguucgcccaggugaagcagaucuacaagacucccccaaucaaggacuucggcggcuucaacuucagccagauccugcccgaccccagcaagcccagcaagcggagcuucaucgaggaccugcuguucaacaaggugacccuggccgacgccggcuucaucaagcaguacggcgacugccugggggauaucgccgcucgggaccugaucugcgcccagaaguucaacggccugaccgugcugcccccucugcugaccgacgagaugaucgcccaguacaccagcgcccugcuugccggcaccaucaccagcggcuggaccuucggcgccggcgcagcccugcagauccccuucgccaugcagauggccuaccgguucaacggcaucggcgugacccagaacgugcuguacgagaaccagaagcugaucgccaaccaguucaacagcgccaucggcaagauccaggacagccugagcagcaccgccagcgcccugggcaagcugcaggacguggugaaccagaacgcucaggcccugaacacccuggugaagcagcugagcagcaacuucggcgccaucagcucagugcugaaugacauccugagcaggcuggaucccccagaggccgaggugcagaucgaccggcugaucaccggccggcugcagagccugcagaccuacgugacccagcagcugauccgggccgccgagauccgggccagcgccaaccuggcagccaccaagaugagcgagugcgugcugggccagagcaagcggguggacuuuugcggcaagggcuaccaccugaugagcuucccccagagcgcuccccacggcgugguguuccuccacgugacauacgugcccgcccaggagaagaacuucaccaccgcccccgccauuugccacgacggcaaggcccacuucccccgggagggagucuucgugagcaacggcacccacugguucgugacccagcggaacuucuacgagccucagaucaucaccaccgacaacaccuucgugagcggcaacugcgacguggugaucggcaucgugaacaacaccguguacgacccccugcagcccgagcuggacagcuucaaggaggagcuggacaaguacuucaagaaccacaccagcccagacguggaccugggcgacaucagcggcaucaacgccagcguggugaacauccagaaggagaucgaccggcugaacgagguggccaagaaccugaacgagagccugaucgaccugcaggagcugggcaaguacgagcaguacaucaaguggcccugguacaucuggcugggcuucaucgccggccugaucgccaucgugauggugaccaucaugcugugcugcaugaccagcugcuguagcugccugaagggcugcugcagcugcggcagcugcugcaaguucgacgaggacgacagcgagcccgugcugaagggcgugaagcugcacuacaccugaggacuaguuauaagacugacuagcccgaugggccucccaacgggcccuccuccccuccuugcaccgagauuaauaaaaaaaaaaaaaaaaaaaaaaaaaaaaaaaaaaaaaaaaaaaaaaaaaaaaaaaaaaaaaaaaaaaaaaaaaaaaaaaaaaaaaaaaaaaaaaaaaaaa

SEQ ID NO: 25558 - RNA, 4011 nt, Artificial Sequence
  SARS-CoV-2/Wuhan/WIV05/2019__EPI_ISL_402128 spike protein mRNA gc (1-1273)(K986P_V987P_Y453F_D614G)
aggagaaagcuuaccauguucguguuccuggugcugcugccccuggugagcagccagugcgugaaccugaccacccggacccagcugcccccugccuacaccaacagcuucacccggggcguguacuaccccgacaagguguuccggagcagcgugcugcacagcacccaggaccuguuccugcccuucuucagcaacgugaccugguuccacgccauccacgugagcggcaccaacggcaccaagcgguucgacaacccagugcugcccuucaacgacggcguguacuucgccagcaccgagaagucaaacaucauccggggcuggaucuucggcaccacccuggacagcaagacacagagccugcugaucgugaacaacgccaccaacguggugaucaaggugugcgaguuucaguucugcaacgaccccuuccugggcguguacuaccacaagaacaacaagagcuggauggagagcgaguuccgggucuacagcagcgcuaacaauugcaccuucgaguacgugagccagcccuuccugauggaccucgagggcaagcagggcaacuucaagaaccugcgggaguucguguucaagaacaucgauggcuacuucaagaucuacagcaagcacacccccaucaaccuggugcgggaccugccccagggauucagcgcccuggagccucugguggaccugcccaucggcaucaacaucaccagguuccagacccugcuggcccugcaccggagcuaccugacccccggcgacagcagcagcggcuggaccgccggcgccgccgcauacuacgugggcuaccugcagccacggaccuuccugcugaaguacaacgagaacggcaccaucaccgacgccguggacugcgcccuggacccccugagcgagaccaagugcacccuaaagagcuucaccguggagaagggcaucuaccagaccagcaacuuccgggugcagcccacugagagcaucgugcgguuccccaacauuaccaaccugugucccuucggcgagguguucaacgccacccgguucgccagcguguacgccuggaaccggaagcggaucagcaacugcguggccgacuacagcgugcuguacaacagcgccagcuucagcaccuucaagugcuacggcgugagcccuaccaagcugaacgaccugugcuucaccaacguguacgcugacagcuucgugauccggggcgacgaggugcggcagaucgcccccggccagaccggcaagaucgccgacuacaacuacaagcugcccgacgacuucaccggcugcgugaucgccuggaacagcaacaaccuggacagcaaggugggcggcaacuacaacuaccuguuccggcuguuccguaagagcaaccugaagccauuugagcgggacaucagcaccgagaucuaccaggccggcagcacccccugcaacgguguggagggcuucaacugcuacuucccccugcagagcuacggcuuccagcccaccaacggcgugggcuaccagcccuaccgggugguggugcugagcuucgagcugcugcacgcccccgccaccgugugcggcccuaaaaagagcaccaaccuggugaagaacaagugcgugaacuucaauuucaacggccugaccggcaccggcgugcugaccgagagcaacaagaaguuccugcccuuccagcaguucggccgggauaucgccgacaccaccgacgcagugcgggacccccagacccuggagauccuggacaucaccccaugcagcuucggcggcgugagcgucaucacccccggcacaaacaccagcaaccagguggccgugcuguaccagggagugaacugcaccgaggugcccguggccauccacgccgaccagcugacccccaccuggcggguguacagcaccggcagcaacguguuccagacccgggccggcugccugaucggcgccgagcacgugaacaacuccuacgagugcgacauccccaucggcgcuggcaucugcgccagcuaccagacccagaccaacagcccccggcgggcccggagcguggccagccagagcaucaucgccuacaccaugagcuuaggcgccgagaacagcguggccuacagcaacaacagcaucgcgaucccuaccaacuucaccaucagcgugaccaccgagauacugcccgugagcaugaccaagaccagcguggacuguaccauguacaucugcggcgacagcaccgagugcagcaaccugcugcugcaguacggcagcuucugcacccagcugaaccgggcccugaccggcaucgccguggagcaggacaagaacacccaagagguguucgcccaggugaagcagaucuacaagacucccccaaucaaggacuucggcggcuucaacuucagccagauccugcccgaccccagcaagcccagcaagcggagcuucaucgaggaccugcuguucaacaaggugacccuggccgacgccggcuucaucaagcaguacggcgacugccugggggauaucgccgcucgggaccugaucugcgcccagaaguucaacggccugaccgugcugcccccucugcugaccgacgagaugaucgcccaguacaccagcgcccugcuugccggcaccaucaccagcggcuggaccuucggcgccggcgcagcccugcagauccccuucgccaugcagauggccuaccgguucaacggcaucggcgugacccagaacgugcuguacgagaaccagaagcugaucgccaaccaguucaacagcgccaucggcaagauccaggacagccugagcagcaccgccagcgcccugggcaagcugcaggacguggugaaccagaacgcucaggcccugaacacccuggugaagcagcugagcagcaacuuuggcgccaucagcucagugcugaaugacauccugagcaggcuggaucccccagaggccgaggugcagaucgaccggcugaucaccggccggcugcagagccugcagaccuacgugacccagcagcugauccgggccgccgagauccgggccagcgccaaccuggcagccaccaagaugagcgagugcgugcugggccagagcaagcggguggacuucugcggcaagggcuaccaccugaugagcuucccccagagcgcuccccacggcgugguguuccuccacgugacauacguccccgcccaggagaagaacuucaccaccgcccccgccauuugccacgacggcaaggcccacuucccccgggagggaguguucgugagcaacggcacccacugguucgugacccagcggaacuucuacgagccucagaucaucaccaccgacaacaccuucgugagcggcaacugcgacguggugaucggcaucgugaacaacaccguguacgacccccugcagcccgagcuggacagcuucaaggaggagcuggacaaguacuucaagaaccacaccagcccagacguggaccugggcgacaucagcggcaucaacgccagcguggugaacauccagaaggagaucgaccggcugaacgagguggccaagaaccugaacgagagccugaucgaccugcaggagcugggcaaguacgagcaguacaucaaguggcccugguacaucuggcugggcuucaucgccggccugaucgccaucgugauggugaccaucaugcugugcugcaugaccagcugcuguagcugccugaagggcugcugcagcugcggcagcugcugcaaguucgacgaggacgacagcgagcccgugcugaagggcgugaagcugcacuacaccugaggacuaguuauaagacugacuagcccgaugggccucccaacgggcccuccuccccuccuugcaccgagauuaauaaaaaaaaaaaaaaaaaaaaaaaaaaaaaaaaaaaaaaaaaaaaaaaaaaaaaaaaaaaaaaaaaaaaaaaaaaaaaaaaaaaaaaaaaaaaaaaaaaaa

SEQ ID NO: 25559 - RNA, 4011 nt, Artificial Sequence
  SARS-CoV-2/Wuhan/WIV05/2019__EPI_ISL_402128 spike protein mRNA gc (1-1273)(K986P_V987P_D614G_I692V)
aggagaaagcuuaccauguucguguuccuggugcugcugccccuggugagcagccagugcgugaaccugaccacccggacccagcugcccccugccuacaccaacagcuucacccggggcguguacuaccccgacaagguguuccggagcagcgugcugcacagcacccaggaccuguuccugcccuucuucagcaacgugaccugguuccacgccauccacgugagcggcaccaacggcaccaagcgguucgacaacccagugcugcccuucaacgacggcguguacuucgccagcaccgagaagucaaacaucauccggggcuggaucuucggcaccacccuggacagcaagacacagagccugcugaucgugaacaacgccaccaacguggugaucaaggugugcgaguuucaguucugcaacgaccccuuccugggcguguacuaccacaagaacaacaagagcuggauggagagcgaguuccgggucuacagcagcgcuaacaauugcaccuucgaguacgugagccagcccuuccugauggaccucgagggcaagcagggcaacuucaagaaccugcgggaguucguguucaagaacaucgauggcuacuucaagaucuacagcaagcacacccccaucaaccuggugcgggaccugccccagggauucagcgcccuggagccucugguggaccugcccaucggcaucaacaucaccagguuccagacccugcuggcccugcaccggagcuaccugacccccggcgacagcagcagcggcuggaccgccggcgccgccgcauacuacgugggcuaccugcagccacggaccuuccugcugaaguacaacgagaacggcaccaucaccgacgccguggacugcgcccuggacccccugagcgagaccaagugcacccuaaagagcuucaccguggagaagggcaucuaccagaccagcaacuuccgggugcagcccacugagagcaucgugcgguuccccaacauuaccaaccugugucccuucggcgagguguucaacgccacccgguucgccagcguguacgccuggaaccggaagcggaucagcaacugcguggccgacuacagcgugcuguacaacagcgccagcuucagcaccuucaagugcuacggcgugagcccuaccaagcugaacgaccugugcuucaccaacguguacgcugacagcuucgugauccggggcgacgaggugcggcagaucgcccccggccagaccggcaagaucgccgacuacaacuacaagcugcccgacgacuucaccggcugcgugaucgccuggaacagcaacaaccuggacagcaaggugggcggcaacuacaacuaccuguaccggcuguuccguaagagcaaccugaagccauucgagcgggacaucagcaccgagaucuaccaggccggcagcacccccugcaacgguguggagggcuuuaacugcuacuucccccugcagagcuacggcuuccagcccaccaacggcgugggcuaccagcccuaccgggugguggugcugagcuucgagcugcugcacgcccccgccaccgugugcggcccuaaaaagagcaccaaccuggugaagaacaagugcgugaacuucaauuucaacggccugaccggcaccggcgugcugaccgagagcaacaagaaguuccugcccuuccagcaguucggccgggauaucgccgacaccaccgacgcagugcgggacccccagacccuggagauccuggacaucaccccaugcagcuucggcggcgugagcgucaucacccccggcacaaacaccagcaaccagguggccgugcuguaccagggagugaacugcaccgaggugcccguggccauccacgccgaccagcugacccccaccuggcggguguacagcaccggcagcaacguguuccagacccgggccggcugccugaucggcgccgagcacgugaacaacuccuacgagugcgacauccccaucggcgcuggcaucugcgccagcuaccagacccagaccaacagcccccggcgggcccggagcguggccagccagagcgugaucgccuacaccaugagcuuaggcgccgagaacagcguggccuacagcaacaacagcaucgcgaucccuaccaacuucaccaucagcgugaccaccgagauccugcccgugagcaugaccaagaccagcguggacuguaccauguacauaugcggcgacagcaccgagugcagcaaccugcugcugcaguacggcagcuucugcacccagcugaaccgggcccugaccggcaucgccguggagcaggacaagaacacccaagagguguucgcccaggugaagcagaucuacaagacucccccaaucaaggacuucggcggcuucaacuucagccagauccugcccgaccccagcaagcccagcaagcggagcuucaucgaggaccugcuguucaacaaggugacccuggccgacgccggcuucaucaagcaguacggcgacugccugggggauaucgccgcucgggaccugaucugcgcccagaaguucaacggccugaccgugcugcccccucugcugaccgacgagaugaucgcccaguacaccagcgcccugcuugccggcaccaucaccagcggcuggaccuucggcgccggcgcagcccugcagauccccuucgccaugcagauggccuaccgguucaacggcaucggcgugacccagaacgugcuguacgagaaccagaagcugaucgccaaccaguucaacagcgccaucggcaagauccaggacagccugagcagcaccgccagcgcccugggcaagcugcaggacguggugaaccagaacgcucaggcccugaacacccuggugaagcagcugagcagcaacuucggcgccaucagcucagugcugaaugacauccugagcaggcuggaucccccagaggccgaggugcagaucgaccggcugaucaccggccggcugcagagccugcagaccuacgugacccagcagcugauccgggccgccgagauccgggccagcgccaaccuggcagccaccaagaugagcgagugcgugcugggccagagcaagcggguggacuuuugcggcaagggcuaccaccugaugagcuucccccagagcgcuccccacggcgugguguuccuccacgucacauacgugcccgcccaggagaagaacuucaccaccgcccccgccaucugccacgacggcaaggcccacuucccccgggagggaguguucgugagcaacggcacccacugguucgugacccagcggaacuucuacgagccucagauuaucaccaccgacaacaccuucgugagcggcaacugcgacguggugaucggcaucgugaacaacaccguguacgacccccugcagcccgagcuggacagcuucaaggaggagcuggacaaguacuucaagaaccacaccagcccagacguggaccugggcgacaucagcggcaucaacgccagcguggugaacauccagaaggagaucgaccggcugaacgagguggccaagaaccugaacgagagccugaucgaccugcaggagcugggcaaguacgagcaguacaucaaguggcccugguacaucuggcugggcuucaucgccggccugaucgccaucgugauggugaccaucaugcugugcugcaugaccagcugcuguagcugccugaagggcugcugcagcugcggcagcugcugcaaguucgacgaggacgacagcgagcccgugcugaagggcgugaagcugcacuacaccugaggacuaguuauaagacugacuagcccgaugggccucccaacgggcccuccuccccuccuugcaccgagauuaauaaaaaaaaaaaaaaaaaaaaaaaaaaaaaaaaaaaaaaaaaaaaaaaaaaaaaaaaaaaaaaaaaaaaaaaaaaaaaaaaaaaaaaaaaaaaaaaaaaaa

SEQ ID NO: 25560 - RNA, 4011 nt, Artificial Sequence
  SARS-CoV-2/Wuhan/WIV05/2019__EPI_ISL_402128 spike protein mRNA gc (1-1273)(K986P_V987P_D614G_M1229I)
aggagaaagcuuaccauguucguguuccuggugcugcugccccuggugagcagccagugcgugaaccugaccacccggacccagcugcccccugccuacaccaacagcuucacccggggcguguacuaccccgacaagguguuccggagcagcgugcugcacagcacccaggaccuguuccugcccuucuucagcaacgugaccugguuccacgccauccacgugagcggcaccaacggcaccaagcgguucgacaacccagugcugcccuucaacgacggcguguacuucgccagcaccgagaagucaaacaucauccggggcuggaucuucggcaccacccuggacagcaagacacagagccugcugaucgugaacaacgccaccaacguggugaucaaggugugcgaguuucaguucugcaacgaccccuuccugggcguguacuaccacaagaacaacaagagcuggauggagagcgaguuccgggucuacagcagcgcuaacaauugcaccuucgaguacgugagccagcccuuccugauggaccucgagggcaagcagggcaacuucaagaaccugcgggaguucguguucaagaacaucgauggcuacuucaagaucuacagcaagcacacccccaucaaccuggugcgggaccugccccagggauucagcgcccuggagccucugguggaccugcccaucggcaucaacaucaccagguuccagacccugcuggcccugcaccggagcuaccugacccccggcgacagcagcagcggcuggaccgccggcgccgccgcauacuacgugggcuaccugcagccacggaccuuccugcugaaguacaacgagaacggcaccaucaccgacgccguggacugcgcccuggacccccugagcgagaccaagugcacccuaaagagcuucaccguggagaagggcaucuaccagaccagcaacuuccgggugcagcccacugagagcaucgugcgguuccccaacauuaccaaccugugucccuucggcgagguguucaacgccacccgguucgccagcguguacgccuggaaccggaagcggaucagcaacugcguggccgacuacagcgugcuguacaacagcgccagcuucagcaccuucaagugcuacggcgugagcccuaccaagcugaacgaccugugcuucaccaacguguacgcugacagcuucgugauccggggcgacgaggugcggcagaucgcccccggccagaccggcaagaucgccgacuacaacuacaagcugcccgacgacuucaccggcugcgugaucgccuggaacagcaacaaccuggacagcaaggugggcggcaacuacaacuaccuguaccggcuguuccguaagagcaaccugaagccauucgagcgggacaucagcaccgagaucuaccaggccggcagcacccccugcaacgguguggagggcuuuaacugcuacuucccccugcagagcuacggcuuccagcccaccaacggcgugggcuaccagcccuaccgggugguggugcugagcuucgagcugcugcacgcccccgccaccgugugcggcccuaaaaagagcaccaaccuggugaagaacaagugcgugaacuucaauuucaacggccugaccggcaccggcgugcugaccgagagcaacaagaaguuccugcccuuccagcaguucggccgggauaucgccgacaccaccgacgcagugcgggacccccagacccuggagauccuggacaucaccccaugcagcuucggcggcgugagcgucaucacccccggcacaaacaccagcaaccagguggccgugcuguaccagggagugaacugcaccgaggugcccguggccauccacgccgaccagcugacccccaccuggcggguguacagcaccggcagcaacguguuccagacccgggccggcugccugaucggcgccgagcacgugaacaacuccuacgagugcgacauccccaucggcgcuggcaucugcgccagcuaccagacccagaccaacagcccccggcgggcccggagcguggccagccagagcaucaucgccuacaccaugagcuuaggcgccgagaacagcguggccuacagcaacaacagcaucgcgaucccuaccaacuucaccaucagcgugaccaccgagauacugcccgugagcaugaccaagaccagcguggacuguaccauguacaucugcggcgacagcaccgagugcagcaaccugcugcugcaguacggcagcuucugcacccagcugaaccgggcccugaccggcaucgccguggagcaggacaagaacacccaagagguguucgcccaggugaagcagaucuacaagacucccccaaucaaggacuucggcggcuucaacuucagccagauccugcccgaccccagcaagcccagcaagcggagcuucaucgaggaccugcuguucaacaaggugacccuggccgacgccggcuucaucaagcaguacggcgacugccugggggauaucgccgcucgggaccugaucugcgcccagaaguucaacggccugaccgugcugcccccucugcugaccgacgagaugaucgcccaguacaccagcgcccugcuugccggcaccaucaccagcggcuggaccuucggcgccggcgcagcccugcagauccccuucgccaugcagauggccuaccgguucaacggcaucggcgugacccagaacgugcuguacgagaaccagaagcugaucgccaaccaguucaacagcgccaucggcaagauccaggacagccugagcagcaccgccagcgcccugggcaagcugcaggacguggugaaccagaacgcucaggcccugaacacccuggugaagcagcugagcagcaacuucggcgccaucagcucagugcugaaugacauccugagcaggcuggaucccccagaggccgaggugcagaucgaccggcugaucaccggccggcugcagagccugcagaccuacgugacccagcagcugauccgggccgccgagauccgggccagcgccaaccuggcagccaccaagaugagcgagugcgugcugggccagagcaagcggguggacuuuugcggcaagggcuaccaccugaugagcuucccccagagcgcuccccacggcgugguguuccuccacgugacauacguccccgcccaggagaagaacuucaccaccgcccccgccauuugccacgacggcaaggcccacuucccccgggagggaguguucgugagcaacggcacccacugguucgugacccagcggaacuucuacgagccucagaucaucaccaccgacaacaccuucgugagcggcaacugcgacguggugaucggcaucgugaacaacaccguguacgacccccugcagcccgagcuggacagcuucaaggaggagcuggacaaguacuucaagaaccacaccagcccagacguggaccugggcgacaucagcggcaucaacgccagcguggugaacauccagaaggagaucgaccggcugaacgagguggccaagaaccugaacgagagccugaucgaccugcaggagcugggcaaguacgagcaguacaucaaguggcccugguacaucuggcugggcuucaucgccggccugaucgccaucgugaucgugaccaucaugcugugcugcaugaccagcugcuguagcugccugaagggcugcugcagcugcggcagcugcugcaaguucgacgaggacgacagcgagcccgugcugaagggcgugaagcugcacuacaccugaggacuaguuauaagacugacuagcccgaugggccucccaacgggcccuccuccccuccuugcaccgagauuaauaaaaaaaaaaaaaaaaaaaaaaaaaaaaaaaaaaaaaaaaaaaaaaaaaaaaaaaaaaaaaaaaaaaaaaaaaaaaaaaaaaaaaaaaaaaaaaaaaaaa

SEQ ID NO: 25561 - RNA, 4005 nt, Artificial Sequence
  SARS-CoV-2/Wuhan/WIV05/2019__EPI_ISL_402128 spike protein mRNA gc (1-1273)(K986P_V987P_H69del_V70del_A222V_Y453F_S477N_D614G_I692V)
aggagaaagcuuaccauguucguguuccuggugcugcugccccuggugagcagccagugcgugaaccugaccacccggacccagcugcccccugccuacaccaacagcuucacccggggcguguacuaccccgacaagguguuccggagcagcgugcugcacagcacccaggaccuguuccugcccuucuucagcaacgugaccugguuccacgccaucagcggcaccaacggcaccaagcgguucgacaacccagugcugcccuucaacgacggcguguacuucgccagcaccgagaagucaaacaucauccggggcuggaucuucggcaccacccuggacagcaagacacagagccugcugaucgugaacaacgccaccaacguggugaucaaggugugcgaguuucaguucugcaacgaccccuuccugggcguguacuaccacaagaacaacaagagcuggauggagagcgaguuccggguguacagcagcgcuaacaauugcaccuucgaguacgucagccagcccuuccugauggaccucgagggcaagcagggcaacuucaagaaccugcgggaguucguguucaagaacaucgauggcuacuucaagaucuacagcaagcacacccccaucaaccuggugcgggaccugccccagggauucagcgugcuggagccucugguggaccugcccaucggcaucaacaucaccagguuccagacccugcuggcccugcaccggagcuaccugacccccggcgacagcagcagcggcuggaccgccggcgccgccgccuacuacgugggcuaccugcagccacggaccuuccugcugaaguacaacgagaacggcaccaucaccgacgcaguggacugcgcccuggacccccugagcgagaccaagugcacccuaaagagcuucaccguggagaagggcaucuaccagaccagcaacuuccgggugcagcccacugagagcaucgugcgguuccccaacauuaccaaccugugucccuucggcgagguguucaacgccacccgguucgccagcguguacgccuggaaccggaagcggaucagcaacugcguggccgacuacagcgugcuguacaacagcgccagcuucagcaccuucaagugcuacggcgugagcccuaccaagcugaacgaccugugcuucaccaacguguacgccgacagcuucgugauccggggcgacgaggugcggcagaucgcucccggccagaccggcaagaucgccgacuacaacuacaagcugcccgacgacuucaccggcugcgugaucgccuggaacagcaacaaccuggacagcaaggugggcggcaacuacaacuaccuguuccggcuguuccguaagagcaaccugaagccauuugagcgggacaucagcaccgagaucuaccaggccggcaacacccccugcaacgguguggagggcuucaacugcuacuucccccugcagagcuacggcuuccagcccaccaacggcgugggcuaccagcccuaccgggugguggugcugagcuucgagcugcugcacgcccccgccaccgugugcggcccuaaaaagagcaccaaccuggugaagaacaagugcgugaauuucaacuucaacggccugaccggcaccggcgugcugaccgagagcaacaagaaguuccugcccuuccagcaguucggccgggauaucgccgacaccaccgacgccgugcgggacccccagacccuggagauccuggacaucaccccaugcagcuucggcggcgugagcgucaucacccccggcacaaacaccagcaaccagguggcagugcuguaccagggagugaacugcaccgaggugcccguggccauccacgccgaccagcugacccccaccuggcggguguacagcaccggcagcaacguguuccagacccgggccggcugccugaucggcgccgagcacgugaacaacagcuacgagugcgacauccccaucggcgccggcaucugcgcuuccuaccagacccagaccaacagcccccggcgggcccggagcguggccagccagagcgugaucgccuacaccaugagcuuaggcgccgagaacagcguggccuacagcaacaacagcaucgccaucccuaccaacuucaccaucagcgugaccaccgagauccugcccgugagcaugaccaagaccagcguggacuguaccauguacauaugcggcgacagcaccgagugcagcaaccugcugcugcaguacggcagcuucugcacccagcugaaccgggcgcugaccggcaucgccguggagcaggacaagaacacccaagagguguucgcccaggugaagcagaucuacaagacucccccaaucaaggacuucggcggcuucaacuucagccagauccugcccgaccccagcaagcccagcaagcggagcuucaucgaggaccugcuguucaacaaggugacccuggccgacgccggcuucaucaagcaguacggcgacugccugggggauaucgccgcccgggaccugaucugcgcucagaaguucaacggccugaccgugcugcccccucugcugaccgacgagaugaucgcccaguacaccagcgcccugcuugccggcaccaucaccagcggcuggaccuucggcgccggcgccgcacugcagauccccuucgccaugcagauggccuaccgguucaacggcaucggcgugacccagaacgugcuguacgagaaccagaagcugaucgccaaccaguucaacagcgccaucggcaagauccaggacagccugagcagcaccgccagcgcccugggcaagcugcaggacguggugaaccagaacgcccaggcucugaacacccuggugaagcagcugagcagcaauuuuggcgccaucagcagcgugcugaacgacauccugucaaggcuggaucccccagaggccgaggugcagaucgaccggcugaucaccggccggcugcagagccugcagaccuacgugacccagcagcugauccgggccgccgagauccgggccagcgccaaccuggccgcaaccaagaugagcgagugcgugcugggccagagcaagcggguggacuucugcggcaagggcuaccaccugaugagcuucccccagagcgcuccccacggcgugguguuccuccacgucacauacgugcccgcccaggagaagaacuucaccaccgcccccgccaucugccacgacggcaaggcccacuucccccgggagggaguguucgugagcaacggcacccacugguucgugacccagcggaacuucuacgagccucagauuaucaccaccgacaacaccuucgugagcggcaacugcgacguggugaucggcaucgugaacaacaccguguacgacccccugcagcccgagcuggacagcuucaaggaggagcuggacaaguacuucaagaaccacaccagcccagacguggaccugggcgacaucagcggcaucaacgccagcguggugaacauccagaaggagaucgaccggcugaacgagguggccaagaaccugaacgagagccugaucgaccugcaggagcugggcaaguacgagcaguacaucaaguggcccugguacaucuggcugggcuucaucgccggccugaucgccaucgugauggugaccaucaugcugugcugcaugaccagcugcuguagcugccugaagggcugcugcagcugcggcagcugcugcaaguucgacgaggacgacagcgagcccgugcugaagggcgugaagcugcacuacaccugaggacuaguuauaagacugacuagcccgaugggccucccaacgggcccuccuccccuccuugcaccgagauuaauaaaaaaaaaaaaaaaaaaaaaaaaaaaaaaaaaaaaaaaaaaaaaaaaaaaaaaaaaaaaaaaaaaaaaaaaaaaaaaaaaaaaaaaaaaaaaaaaaaaa

SEQ ID NO: 25562 - RNA, 4005 nt, Artificial Sequence
  SARS-CoV-2/Wuhan/WIV05/2019__EPI_ISL_402128 spike protein mRNA gc (1-1273)(K986P_V987P_H69del_V70del_Y453F_D614G_I692V_M1229I)
aggagaaagcuuaccauguucguguuccuggugcugcugccccuggugagcagccagugcgugaaccugaccacccggacccagcugcccccugccuacaccaacagcuucacccggggcguguacuaccccgacaagguguuccggagcagcgugcugcacagcacccaggaccuguuccugcccuucuucagcaacgugaccugguuccacgccaucagcggcaccaacggcaccaagcgguucgacaacccagugcugcccuucaacgacggcguguacuucgccagcaccgagaagucaaacaucauccggggcuggaucuucggcaccacccuggacagcaagacacagagccugcugaucgugaacaacgccaccaacguggugaucaaggugugcgaguuucaguucugcaacgaccccuuccugggcguguacuaccacaagaacaacaagagcuggauggagagcgaguuccggguguacagcagcgcuaacaauugcaccuucgaguacgucagccagcccuuccugauggaccucgagggcaagcagggcaacuucaagaaccugcgggaguucguguucaagaacaucgauggcuacuucaagaucuacagcaagcacacccccaucaaccuggugcgggaccugccccagggauucagcgcccuggagccucugguggaccugcccaucggcaucaacaucaccagguuccagacccugcuggcccugcaccggagcuaccugacccccggcgacagcagcagcggcuggaccgccggcgccgccgcauacuacgugggcuaccugcagccacggaccuuccugcugaaguacaacgagaacggcaccaucaccgacgccguggacugcgcccuggacccccugagcgagaccaagugcacccuaaagagcuucaccguggagaagggcaucuaccagaccagcaacuuccgggugcagcccacugagagcaucgugcgguuccccaacauuaccaaccugugucccuucggcgagguguucaacgccacccgguucgccagcguguacgccuggaaccggaagcggaucagcaacugcguggccgacuacagcgugcuguacaacagcgccagcuucagcaccuucaagugcuacggcgugagcccuaccaagcugaacgaccugugcuucaccaacguguacgcugacagcuucgugauccggggcgacgaggugcggcagaucgcccccggccagaccggcaagaucgccgacuacaacuacaagcugcccgacgacuucaccggcugcgugaucgccuggaacagcaacaaccuggacagcaaggugggcggcaacuacaacuaccuguuccggcuguuccguaagagcaaccugaagccauuugagcgggacaucagcaccgagaucuaccaggccggcagcacccccugcaacgguguggagggcuucaacugcuacuucccccugcagagcuacggcuuccagcccaccaacggcgugggcuaccagcccuaccgggugguggugcugagcuucgagcugcugcacgcccccgccaccgugugcggcccuaaaaagagcaccaaccuggugaagaacaagugcgugaacuucaauuucaacggccugaccggcaccggcgugcugaccgagagcaacaagaaguuccugcccuuccagcaguucggccgggauaucgccgacaccaccgacgcagugcgggacccccagacccuggagauccuggacaucaccccaugcagcuucggcggcgugagcgugaucacccccggcacaaacaccagcaaccaggucgccgugcuguaccagggagugaacugcaccgaggugcccguggccauccacgccgaccagcugacccccaccuggcggguguacagcaccggcagcaacguguuccagacccgggccggcugccugaucggcgccgagcacgugaacaacuccuacgagugcgacauccccaucggcgcuggcaucugcgccagcuaccagacccagaccaacagcccccggcgggcccggagcguggccagccagagcgugaucgccuacaccaugagcuuaggcgccgagaacagcguggccuacagcaacaacagcaucgcgaucccuaccaacuucaccaucagcgugaccaccgagauccugcccgugagcaugaccaagaccagcguggacuguaccauguacauaugcggcgacagcaccgagugcagcaaccugcugcugcaguacggcagcuucugcacccagcugaaccgggcccugaccggcaucgccguggagcaggacaagaacacccaagagguguucgcccaggugaagcagaucuacaagacucccccaaucaaggacuucggcggcuucaacuucagccagauccugcccgaccccagcaagcccagcaagcggagcuucaucgaggaccugcuguucaacaaggugacccuggccgacgccggcuucaucaagcaguacggcgacugccugggggauaucgccgcucgggaccugaucugcgcccagaaguucaacggccugaccgugcugcccccucugcugaccgacgagaugaucgcccaguacaccagcgcccugcuugccggcaccaucaccagcggcuggaccuucggcgccggcgcagcccugcagauccccuucgccaugcagauggccuaccgguucaacggcaucggcgugacccagaacgugcuguacgagaaccagaagcugaucgccaaccaguucaacagcgccaucggcaagauccaggacagccugagcagcaccgccagcgcccugggcaagcugcaggacguggugaaccagaacgcucaggcccugaacacccuggugaagcagcugagcagcaacuuuggcgccaucagcucagugcugaaugacauccugagcaggcuggaucccccagaggccgaggugcagaucgaccggcugaucaccggccggcugcagagccugcagaccuacgugacccagcagcugauccgggccgccgagauccgggccagcgccaaccuggcagccaccaagaugagcgagugcgugcugggccagagcaagcggguggacuucugcggcaagggcuaccaccugaugagcuucccccagagcgcuccccacggcgugguguuccuccacgugacauacguccccgcccaggagaagaacuucaccaccgcccccgccaucugccacgacggcaaggcccacuucccccgggagggaguguucgugagcaacggcacccacugguucgugacccagcggaacuucuacgagccucagauuaucaccaccgacaacaccuucgugagcggcaacugcgacguggugaucggcaucgugaacaacaccguguacgacccccugcagcccgagcuggacagcuucaaggaggagcuggacaaguacuucaagaaccacaccagcccagacguggaccugggcgacaucagcggcaucaacgccagcguggugaacauccagaaggagaucgaccggcugaacgagguggccaagaaccugaacgagagccugaucgaccugcaggagcugggcaaguacgagcaguacaucaaguggcccugguacaucuggcugggcuucaucgccggccugaucgccaucgugaucgugaccaucaugcugugcugcaugaccagcugcuguagcugccugaagggcugcugcagcugcggcagcugcugcaaguucgacgaggacgacagcgagcccgugcugaagggcgugaagcugcacuacaccugaggacuaguuauaagacugacuagcccgaugggccucccaacgggcccuccuccccuccuugcaccgagauuaauaaaaaaaaaaaaaaaaaaaaaaaaaaaaaaaaaaaaaaaaaaaaaaaaaaaaaaaaaaaaaaaaaaaaaaaaaaaaaaaaaaaaaaaaaaaaaaaaaaaa

SEQ ID NO: 25563 - RNA, 4002 nt, Artificial Sequence
  SARS-CoV-2/Wuhan/WIV05/2019__EPI_ISL_402128 spike protein mRNA gc (1-1273)(K986P_V987P_K986P_V987P_H69del_V70del_Y144del_N501Y_A570 D_D614G_P681H_T716I_S982A_D1118H)
aggagaaagcuuaccauguucguguuccuggugcugcugccccuggugagcagccagugcgugaaccugaccacccggacccagcugcccccugccuacaccaacagcuucacccggggcguguacuaccccgacaagguguuccggagcagcgugcugcacagcacccaggaccuguuccugcccuucuucagcaacgugaccugguuccacgccaucagcggcaccaacggcaccaagcgguucgacaacccagugcugcccuucaacgacggcguguacuucgccagcaccgagaagucaaacaucauccggggcuggaucuucggcaccacccuggacagcaagacacagagccugcugaucgugaacaacgccaccaacguggugaucaaggugugcgaguuucaguucugcaacgaccccuuccugggcguguaccacaagaacaacaagagcuggauggagagcgaguuccggguguacagcagcgcuaacaauugcaccuucgaguacgucagccagcccuuccugauggaccucgagggcaagcagggcaacuucaagaaccugcgggaguucguguucaagaacaucgauggcuacuucaagaucuacagcaagcacacccccaucaaccuggugcgggaccugccccagggauucagcgcccuggagccucugguggaccugcccaucggcaucaacaucaccagguuccagacccugcuggcccugcaccggagcuaccugacccccggcgacagcagcagcggcuggaccgccggcgccgccgcauacuacgugggcuaccugcagccacggaccuuccugcugaaguacaacgagaacggcaccaucaccgacgccguggacugcgcccuggacccccugagcgagaccaagugcacccuaaagagcuucaccguggagaagggcaucuaccagaccagcaacuuccgggugcagcccacugagagcaucgugcgguuccccaacauuaccaaccugugucccuucggcgagguguucaacgccacccgguucgccagcguguacgccuggaaccggaagcggaucagcaacugcguggccgacuacagcgugcuguacaacagcgccagcuucagcaccuucaagugcuacggcgugagcccuaccaagcugaacgaccugugcuucaccaacguguacgcugacagcuucgugauccggggcgacgaggugcggcagaucgcccccggccagaccggcaagaucgccgacuacaacuacaagcugcccgacgacuucaccggcugcgugaucgccuggaacagcaacaaccuggacagcaaggugggcggcaacuacaacuaccuguaccggcuguuccguaagagcaaccugaagccauucgagcgggacaucagcaccgagaucuaccaggccggcagcacccccugcaacgguguggagggcuuuaacugcuacuucccccugcagagcuacggcuuccagcccaccuacggcgugggcuaccagcccuaccgggugguggugcugagcuucgagcugcugcacgcccccgccaccgugugcggcccuaaaaagagcaccaaccuggugaagaacaagugcgugaacuucaacuucaauggccugaccggcaccggcgugcugaccgagagcaacaagaaguuccugcccuuccagcaguucggccgggauaucgacgacaccaccgacgccgugcgggacccccagacccuggagauccuggacaucaccccaugcagcuucggcggcgugagcgugaucacccccggcacaaacaccagcaaccaggucgcagugcuguaccagggagugaacugcaccgaggugcccguggccauccacgccgaccagcugacccccaccuggcggguguacagcaccggcagcaacguguuccagacccgggccggcugccugaucggcgccgagcacgugaacaacuccuacgagugcgacauccccaucggcgccggcaucugcgcuagcuaccagacccagaccaacagccaccggcgggcccggagcguggccagccagagcaucaucgccuacaccaugagcuuaggcgccgagaacagcguggccuacagcaacaacagcaucgccauccccaucaacuucaccauaagcgugaccaccgagauccugccugugagcaugaccaagaccagcguggacuguaccauguacaucugcggcgacagcaccgagugcagcaaccugcugcugcaguacggcagcuucugcacccagcugaaccgggcgcugaccggcaucgccguggagcaggacaagaacacccaagagguguucgcccaggugaagcagaucuacaagaccccacccaucaaggacuucggcggcuucaacuucagccagauccugcccgaccccagcaagcccagcaagcggagcuucaucgaggaccugcuguucaacaaggugacucuggccgacgccggcuucaucaagcaguacggcgauugccugggggacaucgccgcccgggaccugaucugcgcucagaaguucaacggccugaccgugcugccuccccugcugaccgacgagaugaucgcccaguacaccagcgcccugcuugccggcaccaucaccagcggcuggaccuucggcgccggcgccgcacugcagauccccuucgccaugcagauggccuaccgguucaacggcaucggcgugacccagaacgugcuguacgagaaccagaagcugaucgccaaccaguucaacagcgccaucggcaagauccaggacagccugagcagcaccgccagcgcccugggcaagcugcaggacguggugaaccagaacgcccaggcucugaacacccuggugaagcagcugagcagcaacuucggcgccaucagcucagugcugaacgacauccuggccaggcuggacccacccgaggccgaggugcagaucgaccggcugaucaccggccggcugcagagccugcagaccuacgugacccagcagcugauccgggccgccgagauucgggccagcgccaaucuggcagccaccaagaugagcgagugcgugcugggccagagcaagcggguggacuuuugcggcaagggcuaccaccugaugagcuucccccagagcgcuccccacggcgugguguuccuccacgugaccuacgugcccgcccaggagaagaacuucacaaccgcccccgccaucugccacgacggcaaggcccacuucccccgggagggagucuucgugagcaacggcacccacugguucgugacccagcggaacuucuacgagccccagaucaucaccacccacaacaccuucgugagcggcaacugcgacguggugaucggcaucgugaacaacaccguguacgacccucugcagcccgagcuggacagcuucaaggaggagcuggacaaguacuucaagaaccacaccagccccgacguggaucugggcgacaucagcggcaucaacgccagcguggugaacauccagaaggagaucgaccggcugaacgagguggccaagaaccugaacgagagccugaucgaccugcaggagcugggcaaguacgagcaguacaucaaguggccaugguacaucuggcugggcuucaucgccggccugaucgccaucgugauggugaccaucaugcugugcugcaugaccagcugcuguagcugccugaagggcugcugcagcugcggcagcugcugcaaguucgacgaggacgacagcgagcccgugcugaagggcgugaagcugcacuacaccugaggacuaguuauaagacugacuagcccgaugggccucccaacgggcccuccuccccuccuugcaccgagauuaauaaaaaaaaaaaaaaaaaaaaaaaaaaaaaaaaaaaaaaaaaaaaaaaaaaaaaaaaaaaaaaaaaaaaaaaaaaaaaaaaaaaaaaaaaaaaaaaaaaaa

SEQ ID NO: 25564 - RNA, 4011 nt, Artificial Sequence
  SARS-CoV-2/Wuhan/WIV05/2019__EPI_ISL_402128 spike protein mRNA gc (1-1273)(K986P_V987P_K986P_V987P_K417N_E484K_N501Y_D614G)
aggagaaagcuuaccauguucguguuccuggugcugcugccccuggugagcagccagugcgugaaccugaccacccggacccagcugcccccugccuacaccaacagcuucacccggggcguguacuaccccgacaagguguuccggagcagcgugcugcacagcacccaggaccuguuccugcccuucuucagcaacgugaccugguuccacgccauccacgugagcggcaccaacggcaccaagcgguucgacaacccagugcugcccuucaacgacggcguguacuucgccagcaccgagaagucaaacaucauccggggcuggaucuucggcaccacccuggacagcaagacacagagccugcugaucgugaacaacgccaccaacguggugaucaaggugugcgaguuucaguucugcaacgaccccuuccugggcguguacuaccacaagaacaacaagagcuggauggagagcgaguuccgggucuacagcagcgcuaacaauugcaccuucgaguacgugagccagcccuuccugauggaccucgagggcaagcagggcaacuucaagaaccugcgggaguucguguucaagaacaucgauggcuacuucaagaucuacagcaagcacacccccaucaaccuggugcgggaccugccccagggauucagcgcccuggagccucugguggaccugcccaucggcaucaacaucaccagguuccagacccugcuggcccugcaccggagcuaccugacccccggcgacagcagcagcggcuggaccgccggcgccgccgcauacuacgugggcuaccugcagccacggaccuuccugcugaaguacaacgagaacggcaccaucaccgacgccguggacugcgcccuggacccccugagcgagaccaagugcacccuaaagagcuucaccguggagaagggcaucuaccagaccagcaacuuccgggugcagcccacugagagcaucgugcgguuccccaacauuaccaaccugugucccuucggcgagguguucaacgccacccgguucgccagcguguacgccuggaaccggaagcggaucagcaacugcguggccgacuacagcgugcuguacaacagcgccagcuucagcaccuucaagugcuacggcgugagcccuaccaagcugaacgaccugugcuucaccaacguguacgcugacagcuucgugauccggggcgacgaggugcggcagaucgcccccggccagaccggcaacaucgccgacuacaacuacaagcugcccgacgacuucaccggcugcgugaucgccuggaacagcaacaaccuggacagcaaggugggcggcaacuacaacuaccuguaccggcuguuccguaagagcaaccugaagccauucgagcgggacaucagcaccgagaucuaccaggccggcagcacccccugcaacggugugaagggcuuuaacugcuacuucccccugcagagcuacggcuuccagcccaccuacggcgugggcuaccagcccuaccgggugguggugcugagcuucgagcugcugcacgcccccgccaccgugugcggcccuaaaaagagcaccaaccuggugaagaacaagugcgugaacuucaauuucaacggccugaccggcaccggcgugcugaccgagagcaacaagaaguuccugcccuuccagcaguucggccgggauaucgccgacaccaccgacgcagugcgggacccccagacccuggagauccuggacaucaccccaugcagcuucggcggcgugagcgucaucacccccggcacaaacaccagcaaccagguggccgugcuguaccagggagugaacugcaccgaggugcccguggccauccacgccgaccagcugacccccaccuggcggguguacagcaccggcagcaacguguuccagacccgggccggcugccugaucggcgccgagcacgugaacaacuccuacgagugcgacauccccaucggcgcuggcaucugcgccagcuaccagacccagaccaacagcccccggcgggcccggagcguggccagccagagcaucaucgccuacaccaugagcuuaggcgccgagaacagcguggccuacagcaacaacagcaucgcgaucccuaccaacuucaccaucagcgugaccaccgagauacugcccgugagcaugaccaagaccagcguggacuguaccauguacaucugcggcgacagcaccgagugcagcaaccugcugcugcaguacggcagcuucugcacccagcugaaccgggcccugaccggcaucgccguggagcaggacaagaacacccaagagguguucgcccaggugaagcagaucuacaagacucccccaaucaaggacuucggcggcuucaacuucagccagauccugcccgaccccagcaagcccagcaagcggagcuucaucgaggaccugcuguucaacaaggugacccuggccgacgccggcuucaucaagcaguacggcgacugccugggggauaucgccgcucgggaccugaucugcgcccagaaguucaacggccugaccgugcugcccccucugcugaccgacgagaugaucgcccaguacaccagcgcccugcuugccggcaccaucaccagcggcuggaccuucggcgccggcgcagcccugcagauccccuucgccaugcagauggccuaccgguucaacggcaucggcgugacccagaacgugcuguacgagaaccagaagcugaucgccaaccaguucaacagcgccaucggcaagauccaggacagccugagcagcaccgccagcgcccugggcaagcugcaggacguggugaaccagaacgcucaggcccugaacacccuggugaagcagcugagcagcaacuucggcgccaucagcucagugcugaaugacauccugagcaggcuggaucccccagaggccgaggugcagaucgaccggcugaucaccggccggcugcagagccugcagaccuacgugacccagcagcugauccgggccgccgagauccgggccagcgccaaccuggcagccaccaagaugagcgagugcgugcugggccagagcaagcggguggacuuuugcggcaagggcuaccaccugaugagcuucccccagagcgcuccccacggcgugguguuccuccacgugacauacguccccgcccaggagaagaacuucaccaccgcccccgccauuugccacgacggcaaggcccacuucccccgggagggaguguucgugagcaacggcacccacugguucgugacccagcggaacuucuacgagccucagaucaucaccaccgacaacaccuucgugagcggcaacugcgacguggugaucggcaucgugaacaacaccguguacgacccccugcagcccgagcuggacagcuucaaggaggagcuggacaaguacuucaagaaccacaccagcccagacguggaccugggcgacaucagcggcaucaacgccagcguggugaacauccagaaggagaucgaccggcugaacgagguggccaagaaccugaacgagagccugaucgaccugcaggagcugggcaaguacgagcaguacaucaaguggcccugguacaucuggcugggcuucaucgccggccugaucgccaucgugauggugaccaucaugcugugcugcaugaccagcugcuguagcugccugaagggcugcugcagcugcggcagcugcugcaaguucgacgaggacgacagcgagcccgugcugaagggcgugaagcugcacuacaccugaggacuaguuauaagacugacuagcccgaugggccucccaacgggcccuccuccccuccuugcaccgagauuaauaaaaaaaaaaaaaaaaaaaaaaaaaaaaaaaaaaaaaaaaaaaaaaaaaaaaaaaaaaaaaaaaaaaaaaaaaaaaaaaaaaaaaaaaaaaaaaaaaaaa

SEQ ID NO: 25565 - RNA, 4002 nt, Artificial Sequence
  SARS-CoV-2/Wuhan/WIV05/2019__EPI_ISL_402128 spike protein mRNA gc (1-1273)(K986P_V987P_K986P_V987P_L18F_D80A_D215G_L242del_A243del_ L244del_R246I_K417N_E484K_N501Y_D614G_A701V)
aggagaaagcuuaccauguucguguuccuggugcugcugccccuggugagcagccagugcgugaacuucaccacccggacccagcugcccccugccuacaccaacagcuucacccggggcguguacuaccccgacaagguguuccggagcagcgugcugcacagcacccaggaccuguuccugcccuucuucagcaacgugaccugguuccacgccauccacgugagcggcaccaacggcaccaagcgguucgccaacccagugcugcccuucaacgacggcguguacuucgccagcaccgagaagucaaacaucauccggggcuggaucuuuggcaccacccuggacagcaagacacagagccugcugaucgugaacaacgcuaccaacguggugaucaaggugugcgaguuccaguucugcaacgaccccuuccugggcguguacuaccacaagaacaacaagagcuggauggagagcgaguuccgggucuacagcagcgccaacaauugcaccuucgaguacgugagccagcccuuccugauggaccuggagggcaagcagggcaacuucaagaaccuccgggaguucguguucaagaacaucgacggcuacuucaagaucuacagcaagcacacccccaucaaccuggugcggggacugccccagggcuucagcgcccuggagccucugguggaucugcccaucggcaucaacaucaccagguuccagacccugcacaucagcuaccugacccccggcgacagcagcagcggcuggaccgccggcgccgccgcauacuacgugggcuaccugcagccacggaccuuccugcugaaguacaacgagaacggcaccaucaccgacgccguggacugcgcccuggacccccugagcgagaccaagugcacccuuaagagcuucaccguggagaagggcaucuaccagaccagcaacuuccgggugcagcccacugagagcauugugcgguuccccaacaucaccaaccugugucccuucggcgagguguucaacgccacccgguucgccagcguguacgccuggaaccggaagcggaucagcaacugcguggccgacuacagcgugcuguacaacagcgccagcuucagcaccuucaagugcuacggcgugagcccuaccaagcugaacgaccugugcuucaccaacguguacgcugacagcuucgugauccggggcgacgaggugcggcagaucgcccccggccagaccggcaacaucgccgacuacaacuacaagcugcccgacgacuucaccggcugcgugaucgccuggaacagcaacaaccuggacagcaaggugggcggcaacuacaacuaccuguaccggcuauuccguaagagcaaccugaagccauuugagcgggacaucagcaccgagaucuaccaggccgguagcacccccugcaacggcgugaagggcuucaacugcuacuucccccugcagagcuacggcuuccagcccaccuacggcgugggcuaccagcccuaccgggugguggugcugagcuucgagcugcugcacgcccccgccaccgugugcggcccuaaaaagagcaccaaccuggugaagaacaagugcgugaacuucaauuucaacggccugaccggcaccggcgugcugaccgagagcaacaagaaguuccugcccuuccagcaguucggccgggacaucgccgacaccaccgaugcagugcgggacccccagacccuggagauccuggacaucaccccaugcagcuucggcggcgugagcgucaucacccccggaacaaacaccagcaaccagguggccgugcuguaccagggcgugaacugcaccgaggugcccguggccauccacgccgaccagcugacccccaccuggcggguguacagcaccggcagcaacguguuccagacccgggccggcugccugaucggcgccgagcacgugaacaacuccuacgagugcgacauccccaucggcgcuggcaucugcgccagcuaccagacccagaccaacagcccccggcgggcccggagcguggccagccagagcaucaucgccuacaccaugagccugggcguggagaacagcguggccuacagcaacaacagcaucgccaucccuaccaacuucaccauaagcgugaccaccgagauccugcccgugagcaugaccaagaccagcguggacuguaccauguacaucugcggcgacagcaccgagugcagcaaccuguuacugcaguacggcagcuucugcacccagcugaaccgggcgcugaccggcaucgccguggagcaggacaagaacacccaagagguguucgcccaggugaagcagaucuacaagacucccccaaucaaggacuucggcggcuucaacuucagccagauccugcccgaccccagcaagcccagcaagcggagcuucaucgaggaccugcuguucaacaaggugacccuggccgacgccggcuucaucaagcaguacggggacugccugggcgacaucgccgcccgggaccugaucugcgcucagaaguucaacggccugaccgugcugcccccucugcugaccgaugagaugaucgcccaguacaccagcgcccugcuggccggcaccaucaccagcggcuggaccuucggcgccggcgccgcacugcagauccccuucgccaugcagauggccuaccgguucaacggcaucggcgugacccagaacgugcuguacgagaaccagaagcugaucgccaaccaguucaacagcgccaucggcaagauccaggacagccugagcagcaccgccagcgcccugggcaagcugcaggacguggugaaccagaacgcccaggcucugaacacccuggugaagcagcugagcagcaacuuuggcgccaucagcucagugcugaaugacauccugagccggcuggaucccccagaggccgaggugcagaucgacaggcugaucaccggccggcugcagagccugcagaccuacgugacccagcagcugauccgggccgccgagauucgggccagcgccaaccuggccgcaaccaagaugagcgagugcgugcugggccagagcaagcggguggacuucugcggcaagggcuaccaccugaugagcuucccccagagcgcuccccacggcgugguguuccugcacgucacauacgugcccgcccaggagaagaacuucaccaccgcccccgccaucugccacgacggaaaggcccacuucccccgggagggcguguucgugagcaacggcacccacugguucgugacccagcggaacuucuacgagccucagaucaucaccaccgacaacaccuucgugagcggcaacugcgacguggugaucggcaucgugaacaacaccguguacgacccccugcagcccgagcuggacagcuucaaggaggagcucgacaaguacuucaagaaccacaccagcccagacguggaccugggcgacaucagcggcaucaacgccagcguggugaacauccagaaggagaucgaccggcugaacgagguggccaagaaccugaacgagagccugaucgaccugcaggagcugggcaaguacgagcaguacaucaaguggcccugguacaucuggcugggcuucaucgccggccugaucgccaucgugauggugaccaucaugcugugcugcaugaccagcugcuguagcugccugaagggcugcugcagcugcggcagcugcugcaaguucgacgaggacgacagcgagcccgugcugaagggcgugaagcugcacuacaccugaggacuaguuauaagacugacuagcccgaugggccucccaacgggcccuccuccccuccuugcaccgagauuaauaaaaaaaaaaaaaaaaaaaaaaaaaaaaaaaaaaaaaaaaaaaaaaaaaaaaaaaaaaaaaaaaaaaaaaaaaaaaaaaaaaaaaaaaaaaaaaaaaaaa

SEQ ID NO: 25566 - RNA, 4011 nt, Artificial Sequence
  SARS-CoV-2/Wuhan/WIV05/2019__EPI_ISL_402128 spike protein mRNA gc (1-1273)(K986P_V987P_K986P_V987P_E484K_D614G)
aggagaaagcuuaccauguucguguuccuggugcugcugccccuggugagcagccagugcgugaaccugaccacccggacccagcugcccccugccuacaccaacagcuucacccggggcguguacuaccccgacaagguguuccggagcagcgugcugcacagcacccaggaccuguuccugcccuucuucagcaacgugaccugguuccacgccauccacgugagcggcaccaacggcaccaagcgguucgacaacccagugcugcccuucaacgacggcguguacuucgccagcaccgagaagucaaacaucauccggggcuggaucuucggcaccacccuggacagcaagacacagagccugcugaucgugaacaacgccaccaacguggugaucaaggugugcgaguuucaguucugcaacgaccccuuccugggcguguacuaccacaagaacaacaagagcuggauggagagcgaguuccgggucuacagcagcgcuaacaauugcaccuucgaguacgugagccagcccuuccugauggaccucgagggcaagcagggcaacuucaagaaccugcgggaguucguguucaagaacaucgauggcuacuucaagaucuacagcaagcacacccccaucaaccuggugcgggaccugccccagggauucagcgcccuggagccucugguggaccugcccaucggcaucaacaucaccagguuccagacccugcuggcccugcaccggagcuaccugacccccggcgacagcagcagcggcuggaccgccggcgccgccgcauacuacgugggcuaccugcagccacggaccuuccugcugaaguacaacgagaacggcaccaucaccgacgccguggacugcgcccuggacccccugagcgagaccaagugcacccuaaagagcuucaccguggagaagggcaucuaccagaccagcaacuuccgggugcagcccacugagagcaucgugcgguuccccaacauuaccaaccugugucccuucggcgagguguucaacgccacccgguucgccagcguguacgccuggaaccggaagcggaucagcaacugcguggccgacuacagcgugcuguacaacagcgccagcuucagcaccuucaagugcuacggcgugagcccuaccaagcugaacgaccugugcuucaccaacguguacgcugacagcuucgugauccggggcgacgaggugcggcagaucgcccccggccagaccggcaagaucgccgacuacaacuacaagcugcccgacgacuucaccggcugcgugaucgccuggaacagcaacaaccuggacagcaaggugggcggcaacuacaacuaccuguaccggcuguuccguaagagcaaccugaagccauucgagcgggacaucagcaccgagaucuaccaggccggcagcacccccugcaacggugugaagggcuuuaacugcuacuucccccugcagagcuacggcuuccagcccaccaacggcgugggcuaccagcccuaccgggugguggugcugagcuucgagcugcugcacgcccccgccaccgugugcggcccuaaaaagagcaccaaccuggugaagaacaagugcgugaacuucaauuucaacggccugaccggcaccggcgugcugaccgagagcaacaagaaguuccugcccuuccagcaguucggccgggauaucgccgacaccaccgacgcagugcgggacccccagacccuggagauccuggacaucaccccaugcagcuucggcggcgugagcgucaucacccccggcacaaacaccagcaaccagguggccgugcuguaccagggagugaacugcaccgaggugcccguggccauccacgccgaccagcugacccccaccuggcggguguacagcaccggcagcaacguguuccagacccgggccggcugccugaucggcgccgagcacgugaacaacuccuacgagugcgacauccccaucggcgcuggcaucugcgccagcuaccagacccagaccaacagcccccggcgggcccggagcguggccagccagagcaucaucgccuacaccaugagcuuaggcgccgagaacagcguggccuacagcaacaacagcaucgcgaucccuaccaacuucaccaucagcgugaccaccgagauacugcccgugagcaugaccaagaccagcguggacuguaccauguacaucugcggcgacagcaccgagugcagcaaccugcugcugcaguacggcagcuucugcacccagcugaaccgggcccugaccggcaucgccguggagcaggacaagaacacccaagagguguucgcccaggugaagcagaucuacaagacucccccaaucaaggacuucggcggcuucaacuucagccagauccugcccgaccccagcaagcccagcaagcggagcuucaucgaggaccugcuguucaacaaggugacccuggccgacgccggcuucaucaagcaguacggcgacugccugggggauaucgccgcucgggaccugaucugcgcccagaaguucaacggccugaccgugcugcccccucugcugaccgacgagaugaucgcccaguacaccagcgcccugcuugccggcaccaucaccagcggcuggaccuucggcgccggcgcagcccugcagauccccuucgccaugcagauggccuaccgguucaacggcaucggcgugacccagaacgugcuguacgagaaccagaagcugaucgccaaccaguucaacagcgccaucggcaagauccaggacagccugagcagcaccgccagcgcccugggcaagcugcaggacguggugaaccagaacgcucaggcccugaacacccuggugaagcagcugagcagcaacuucggcgccaucagcucagugcugaaugacauccugagcaggcuggaucccccagaggccgaggugcagaucgaccggcugaucaccggccggcugcagagccugcagaccuacgugacccagcagcugauccgggccgccgagauccgggccagcgccaaccuggcagccaccaagaugagcgagugcgugcugggccagagcaagcggguggacuuuugcggcaagggcuaccaccugaugagcuucccccagagcgcuccccacggcgugguguuccuccacgugacauacguccccgcccaggagaagaacuucaccaccgcccccgccauuugccacgacggcaaggcccacuucccccgggagggaguguucgugagcaacggcacccacugguucgugacccagcggaacuucuacgagccucagaucaucaccaccgacaacaccuucgugagcggcaacugcgacguggugaucggcaucgugaacaacaccguguacgacccccugcagcccgagcuggacagcuucaaggaggagcuggacaaguacuucaagaaccacaccagcccagacguggaccugggcgacaucagcggcaucaacgccagcguggugaacauccagaaggagaucgaccggcugaacgagguggccaagaaccugaacgagagccugaucgaccugcaggagcugggcaaguacgagcaguacaucaaguggcccugguacaucuggcugggcuucaucgccggccugaucgccaucgugauggugaccaucaugcugugcugcaugaccagcugcuguagcugccugaagggcugcugcagcugcggcagcugcugcaaguucgacgaggacgacagcgagcccgugcugaagggcgugaagcugcacuacaccugaggacuaguuauaagacugacuagcccgaugggccucccaacgggcccuccuccccuccuugcaccgagauuaauaaaaaaaaaaaaaaaaaaaaaaaaaaaaaaaaaaaaaaaaaaaaaaaaaaaaaaaaaaaaaaaaaaaaaaaaaaaaaaaaaaaaaaaaaaaaaaaaaaaa

SEQ ID NO: 25567 - RNA, 4011 nt, Artificial Sequence
  SARS-CoV-2/Wuhan/WIV05/2019__EPI_ISL_402128 spike protein mRNA gc (1-1273)(K986P_V987P_K986P_V987P_L18F_T20N_P26S_D138Y_R190S_K417T _E484K_N501Y_D614G_H655Y_T1027I)
aggagaaagcuuaccauguucguguuccuggugcugcugccccuggugagcagccagugcgugaacuucaccaaccggacccagcugcccagcgccuacaccaacagcuucacccggggcguguacuacccugacaagguguuccggagcagcgugcugcacagcacccaggaccuguuccugcccuucuucagcaacgugaccugguuccacgccauccacgugagcggcaccaacggcaccaagcgguucgacaaccccgugcugccauucaacgacggcguguacuucgccagcaccgagaagucaaacaucauccggggcuggaucuuuggcaccacccuggacagcaagacccagagccugcugaucgugaacaacgccacaaacguggugaucaaggugugcgaguuccaguucugcaacuaccccuuccugggcguguacuaccacaagaacaacaagagcuggauggagagcgaguuccgggucuacagcagcgcuaauaacugcaccuucgaguacgugagccagcccuuccugauggaccuggagggcaagcagggcaacuucaagaaccucagcgaguucguguucaagaacaucgacggcuacuucaagaucuacagcaagcacacccccaucaaccuggugcgggaucugccccagggauucagcgcccuggagccccugguggaccugccuaucggcaucaacaucacccgguuccagacccugcuggcccugcacaggagcuaccugacccccggcgacagcagcagcggcuggaccgccggcgccgccgcauacuacgugggcuaccugcagccccggaccuuccugcugaaguacaacgagaacggcaccaucaccgacgccguggacugcgcccuggacccacugagcgagaccaagugcacccuaaagagcuucaccguggagaagggcaucuaccagaccagcaacuuccgggugcagcccaccgagagcaucgugcgguuccccaacauuacuaaccugugucccuucggcgagguguucaacgccacccgguucgccagcguguacgccuggaaccggaagcggaucagcaacugcguggccgacuacagcgugcuguacaacagcgccagcuucagcaccuucaagugcuacggcgugagccccaccaagcugaacgaccugugcuucaccaacguguacgcugacagcuucgugauccggggcgacgaggugcggcagaucgccccuggccagaccggcaccaucgccgacuacaacuacaagcugcccgacgacuucaccggcugcgugaucgccuggaacagcaacaaccuggacagcaaggugggcggcaacuacaacuaccuguaccggcuguuccguaagagcaaccugaagcccuuugagcgggacaucagcaccgagaucuaccaggccggcagcaccccaugcaacggugugaagggcuucaacugcuacuucccccugcagagcuacggcuuccagcccaccuacggcgugggcuaccagcccuaccgggugguggugcugagcuucgagcugcugcacgcccccgccaccgugugcggccccaaaaagagcaccaaccuggugaagaacaagugcgugaacuucaauuucaacggccugaccggcaccggcgugcugaccgagagcaacaagaaguuccugccuuuccagcaguucggccgggacaucgccgauaccaccgacgcagugcgggacccccagacccuggagauccuggacaucacccccugcagcuucggcggcgugagcgucaucaccccaggcacaaacaccagcaaccagguggccgugcuguaccagggagugaacugcaccgaggugcccguggccauccacgccgaccagcugacccccaccuggcggguguacuccaccggcagcaacguguuccagacccgggccggcugccugaucggcgccgaguacgugaacaacagcuacgagugcgacauccccaucggcgcuggcaucugcgccagcuaccagacccagaccaacagcccccggcgggcccggagcguggccagccagagcaucaucgccuacaccaugagccugggcgccgagaacagcguggccuacagcaacaacagcaucgcgauccccaccaacuucaccaucagcgugaccaccgagauauuaccugugagcaugaccaagaccagcguggacuguaccauguacaucugcggcgacagcaccgagugcagcaaccugcugcugcaguacggcagcuucugcacccagcugaaccgggcccugaccggcaucgccguggagcaggacaagaacacccaagagguguucgcccaggugaagcagaucuacaagacuccacccaucaaggacuucggcggcuucaacuucagccagauccugcccgaccccagcaagcccagcaagcggagcuucaucgaggaccugcuguucaacaaggugacccuggccgacgccggcuucaucaagcaguacggcgacugccugggggacaucgccgcucgggaucugaucugcgcccagaaguucaacggccugaccgugcugccuccccugcugaccgacgagaugaucgcccaguacaccagcgcccugcuggccggcaccaucaccagcggcuggaccuucggcgccggcgcagcccuucagauccccuucgccaugcagauggccuaccgguucaacggcaucggcgugacccagaacgugcuguacgagaaccagaagcugaucgccaaccaguucaacagcgccaucggcaagauccaggacagccugagcagcaccgccagcgcccugggcaagcugcaggacguggugaaccagaacgcucaggcccugaacacccuggugaagcagcugagcucaaacuuuggcgccaucagcagcgugcugaaugacauccugagccggcuggacccacccgaggccgaggugcagaucgacaggcugaucaccggccggcugcagagccugcagaccuacgugacccagcagcugauccgggccgccgagauccgggccagcgccaaccuggcagccauuaagaugagcgagugcgugcugggccagagcaagcggguggacuucugcggcaagggcuaccaccugaugagcuucccccagagcgcuccccacggcgugguguuccugcacgugaccuacguccccgcccaggagaagaacuucacaaccgcccccgccaucugccacgacggcaaggcccacuucccccgggagggaguguucgugagcaacggcacccacugguucgugacccagcggaacuucuacgagccccagaucaucaccaccgacaacaccuucgugagcggcaacugcgacguggugaucggcaucgugaacaacaccguguacgacccucuccagcccgagcuggacagcuucaaggaggagcuggacaaguacuucaagaaccacaccagccccgacguggaccugggcgauaucagcggcaucaacgccagcguggugaacauccagaaggagaucgaccggcugaacgagguggccaagaaccugaacgagagccugaucgaccugcaggagcugggcaaguacgagcaguacaucaaguggccaugguacaucuggcugggcuucaucgccggccugaucgccaucgugauggugaccaucaugcugugcugcaugaccagcugcuguagcugccugaagggcugcugcagcugcggcagcugcugcaaguucgacgaggacgacagcgagcccgugcugaagggcgugaagcugcacuacaccugaggacuaguuauaagacugacuagcccgaugggccucccaacgggcccuccuccccuccuugcaccgagauuaauaaaaaaaaaaaaaaaaaaaaaaaaaaaaaaaaaaaaaaaaaaaaaaaaaaaaaaaaaaaaaaaaaaaaaaaaaaaaaaaaaaaaaaaaaaaaaaaaaaaa

SEQ ID NO: 25568 - RNA, 4011 nt, Artificial Sequence
  SARS-CoV-2/Wuhan/WIV05/2019__EPI_ISL_402128 spike protein mRNA gc (1-1273)(K986P_V987P_K986P_V987P_S13I_W152C_L452R_D614G)
aggagaaagcuuaccauguucguguuccuggugcugcugccccuggugagcauccagugcgugaaccugaccacccggacccagcugcccccugccuacaccaacagcuucacccggggcguguacuaccccgacaagguguuccggagcagcgugcugcacagcacccaggaccuguuccugcccuucuucagcaacgugaccugguuccacgccauccacgugagcggcaccaacggcaccaagcgguucgacaacccagugcugcccuucaacgacggcguguacuucgccagcaccgagaagucaaacaucauccggggcuggaucuucggcaccacccuggacagcaagacacagagccugcugaucgugaacaacgccaccaacguggugaucaaggugugcgaguuucaguucugcaacgaccccuuccugggcguguacuaccacaagaacaacaagagcugcauggagagcgaguuccgggucuacagcagcgcuaacaauugcaccuucgaguacgugagccagcccuuccugauggaccucgagggcaagcagggcaacuucaagaaccugcgggaguucguguucaagaacaucgauggcuacuucaagaucuacagcaagcacacccccaucaaccuggugcgggaccugccccagggauucagcgcccuggagccucugguggaccugcccaucggcaucaacaucaccagguuccagacccugcuggcccugcaccggagcuaccugacccccggcgacagcagcagcggcuggaccgccggcgccgccgcauacuacgugggcuaccugcagccacggaccuuccugcugaaguacaacgagaacggcaccaucaccgacgccguggacugcgcccuggacccccugagcgagaccaaguguacccuaaagagcuucaccguggagaagggcaucuaccagaccagcaacuuccgggugcagcccacugagagcauugugcgguuccccaacaucaccaaccugugccccuucggcgagguguucaacgccacccgguucgccagcguguacgccuggaaccggaagcggaucagcaacugcguggccgacuacagcgugcuguacaacagcgccagcuucagcaccuucaagugcuacggcgugagcccuaccaagcugaacgaccugugcuucaccaacguguacgcugacagcuucgugauccggggcgacgaggugcggcagaucgcccccggccagaccggcaagaucgccgacuacaacuacaagcugcccgacgacuucaccggcugcgugaucgccuggaacagcaacaaccuggacagcaaggugggcggcaacuacaacuaccgguaccggcuguuccguaagagcaaccugaagccauucgagcgggacaucagcaccgagaucuaccaggccggcagcacccccugcaacgguguggagggcuuuaacugcuacuucccccugcagagcuacggcuuccagcccaccaacggcgugggcuaccagcccuaccgggugguggugcugagcuucgagcugcugcacgcccccgccaccgugugcggcccuaaaaagagcaccaaccuggugaagaacaagugcgugaacuucaauuucaacggccugaccggcaccggcgugcugaccgagagcaacaagaaguuccugcccuuccagcaguucggccgggauaucgccgacaccaccgacgcagugcgggacccccagacccuggagauccuggacaucaccccaugcagcuucggcggcgugagcgucaucacccccggcacaaacaccagcaaccagguggccgugcuguaccagggagugaacugcaccgaggugcccguggccauccacgccgaccagcugacccccaccuggcggguguacagcaccggcagcaacguguuccagacccgggccggcugccugaucggcgccgagcacgugaacaacagcuacgagugcgacauccccaucggcgcuggcaucugugccuccuaccagacccagaccaacagcccccggcgggcccggagcguggccagccagagcaucaucgccuacaccaugagccugggcgccgagaacagcguggccuacagcaacaacagcaucgcgaucccuaccaacuucaccauaagcgugaccaccgagaucuuacccgugagcaugaccaagaccagcguggacugcaccauguacaucugcggcgacagcaccgagugcagcaaccugcugcugcaguacggcagcuucugcacccagcugaaccgggcccugaccggcaucgccguggagcaggacaagaacacccaagagguguucgcccaggugaagcagaucuacaagacucccccaaucaaggacuucggcggcuucaacuucagccagauccugcccgaccccagcaagcccagcaagcggagcuucaucgaggaccugcuguucaacaaggugacccuggccgacgccggcuucaucaagcaguacggcgacugccugggggauaucgccgcucgggaccugaucugcgcccagaaguucaacggccugaccgugcugcccccucugcugaccgacgagaugaucgcccaguacaccagcgcccugcuggccggcaccaucaccagcggcuggaccuucggcgccggcgcagcccuucagauccccuucgccaugcagauggccuacagguucaacggcaucggcgugacccagaacgugcuguacgagaaccagaagcugaucgccaaccaguucaacagcgccaucggcaagauccaggacagccugagcagcaccgccagcgcccugggcaagcugcaggacguggugaaccagaacgcucaggcccugaacacccuggugaagcagcugagcagcaacuucggcgccaucagcagcgugcugaaugacauccugucacggcuggaucccccagaggccgaggugcagaucgaccggcugaucaccggccggcugcagagccugcagaccuacgugacccagcagcugauccgggccgccgagauucgggccagcgccaaccuggcagccaccaagaugagcgagugcgugcugggccagagcaagcggguggacuuuugcggcaagggcuaccaccugaugagcuucccccagagcgcuccccacggcgugguguuccugcacgugacauacguccccgcccaggagaagaacuucaccaccgcccccgccaucugccacgacggcaaggcccacuucccccgggagggaguguucgugagcaacggcacccacugguucgugacccagcggaacuucuacgagccucagaucaucaccaccgacaacaccuucgugagcggcaacugcgacguggugaucggcaucgugaacaacaccguguacgacccccuccagcccgagcuggacagcuucaaggaggagcuggacaaguacuucaagaaccacaccagcccagacguggaccugggcgacaucagcggcaucaacgccagcguggugaacauccagaaggagaucgaccggcugaacgagguggccaagaaccugaacgagagccugaucgaccugcaggagcugggcaaguacgagcaguacaucaaguggcccugguacaucuggcugggcuucaucgccggccugaucgccaucgugauggugaccaucaugcugugcugcaugaccagcuguugcagcugccugaagggcugcugcagcugcggcagcugcugcaaguucgacgaggacgacagcgagcccgugcugaagggcgugaagcugcacuacaccugaggacuaguuauaagacugacuagcccgaugggccucccaacgggcccuccuccccuccuugcaccgagauuaauaaaaaaaaaaaaaaaaaaaaaaaaaaaaaaaaaaaaaaaaaaaaaaaaaaaaaaaaaaaaaaaaaaaaaaaaaaaaaaaaaaaaaaaaaaaaaaaaaaaa

SEQ ID NO: 25569 - RNA, 4011 nt, Artificial Sequence
  SARS-CoV-2/Wuhan/WIV05/2019__EPI_ISL_402128 spike protein mRNA gc mod (1-1273)(K986P_V987P)
aggagaaagcuuaccauguucguguuucuggugcugcugccccugguguccagccagugugugaaccugaccaccagaacacagcugccuccagccuacaccaacagcuucaccagaggcguguacuaccccgacaagguguucagauccagcgugcugcacucuacccaggaccuguuccugccuuucuucagcaacgugaccugguuccacgccauccacguguccggcaccaauggcaccaagagauucgacaaccccgugcugcccuucaacgacgggguguacuuugccagcaccgagaaguccaacaucaucagaggcuggaucuucggcaccacacuggacagcaagacccagagccugcugaucgugaacaacgccaccaacguggucaucaaagugugcgaguuccaguucugcaacgaccccuuccugggcgucuacuaccacaagaacaacaagagcuggauggaaagcgaguuccggguguacagcagcgccaacaacugcaccuucgaguacgugucccagccuuuccugauggaccuggaaggcaagcagggcaacuucaagaaccugcgcgaguucguguucaagaacaucgacggcuacuucaaaaucuacagcaagcacaccccuaucaaccucgugcgggaucugccucagggcuucucugcucuggaaccccugguggaucugcccaucggcaucaacaucacccgguuucagacacugcuggcccugcacagaagcuaccugacaccuggcgauagcagcagcggauggacagcuggugccgccgcuuacuaugugggcuaccugcagccuagaaccuuccugcugaaguacaacgagaacggcaccaucaccgacgccguggauugugcucuggauccucugagcgagacaaagugcacccugaaguccuucaccguggaaaagggcaucuaccagaccagcaacuuccgggugcagcccaccgaauccaucgugcgguuccccaauaucaccaaucugugccccuucggcgagguguucaaugccaccagauucgccucuguguacgccuggaaccggaagcggaucagcaauugcguggccgacuacuccgugcuguacaacuccgccagcuucagcaccuucaagugcuacggcguguccccuaccaagcugaacgaccugugcuucacaaacguguacgccgacagcuucgugauccggggagaugaagugcggcagauugccccuggacagacaggcaagaucgccgacuacaacuacaagcugcccgacgacuucaccggcugugugauugccuggaacagcaacaaccuggacuccaaagucggcggcaacuacaauuaccuguaccggcuguuccggaaguccaaucugaagcccuucgagcgggacaucagcaccgaaaucuaucaggccggcagcaccccuugcaacggcguggaaggcuucaacugcuacuucccacugcaguccuacggcuuucagcccacaaauggcgugggcuaucagcccuacagagugguggugcugagcuucgaacugcugcaugcuccugccacagugugcggcccuaagaaaagcaccaaucucgugaagaacaaaugcgugaacuucaacuucaacggccugaccggcaccggcgugcugacagagagcaacaagaaguuccugccauuccagcaguuuggccgggauaucgccgauaccacagacgccguuagagauccccagacacuggaaauccuggacaucaccccaugcagcuucggcggagugucugugaucaccccuggcaccaacaccagcaaucagguggcagugcuguaccaggacgugaacuguaccgaagugcccguggccauucacgccgaucagcugacaccuacauggcggguguacuccaccggcagcaauguguuucagaccagagccggcugucugaucggagccgagcacgugaacaauagcuacgagugcgacauccccaucggcgcuggcaucugugccagcuaccagacacagacaaacagccccagacgggcuagaagcguggccagccagagcaucauugccuacacaaugucucugggcgccgagaacagcguggccuacuccaacaacucuaucgcuauccccaccaacuucaccaucagcgugaccaccgagauccugccuguguccaugaccaagaccagcguggacugcaccauguacaucugcggcgauuccaccgagugcuccaaccugcugcugcaguacggcagcuucugcacccagcugaauagagcccugacagggaucgccguggaacaggacaagaacacccaagagguguucgcccaagugaagcaaaucuacaagaccccuccuaucaaggacuucggcggcuucaauuucagccagauucugcccgauccuagcaagcccagcaagcggagcuucaucgaggaccugcuguucaacaaagugacacuggccgacgccggcuucaucaagcaguauggcgauugucugggcgacauugccgccagggaucugauuugcgcccagaaguuuaacggacugacagugcugccuccucugcugaccgaugagaugaucgcccaguacacaucugcccugcuggccggcacaaucacaagcggcuggacauuuggagcuggcgccgcucugcagauccccuuugcuaugcagauggccuaccgguucaacggcaucggagugacccagaaugugcuguacgagaaccagaagcugaucgccaaccaguucaacagcgccaucggcaagauccaggacagccugagcagcacagcaagcgcccugggaaagcugcaggacguggucaaccagaaugcccaggcacugaacacccuggucaagcagcuguccuccaacuucggcgccaucagcucugugcugaacgauauccugagcagacuggacccuccugaggccgaggugcagaucgacagacugaucacaggcagacugcagagccuccagacauacgugacccagcagcugaucagagccgccgagauuagagccucugccaaucuggccgccaccaagaugucugagugugugcugggccagagcaagagaguggacuuuugcggcaagggcuaccaccugaugagcuucccucagucugccccucacggcgugguguuucugcacgugacauaugugcccgcucaagagaagaauuucaccaccgcuccagccaucugccacgacggcaaagcccacuuuccuagagaaggcguguucguguccaacggcacccauugguucgugacacagcggaacuucuacgagccccagaucaucaccaccgacaacaccuucgugucuggcaacugcgacguugugaucggcauugugaacaauaccguguacgacccucugcagcccgagcuggacagcuucaaagaggaacuggacaaguacuuuaagaaccacacaagccccgacguggaccugggcgauaucagcggaaucaaugccagcgucgugaacauccagaaagagaucgaccggcugaacgagguggccaagaaucugaacgagagccugaucgaccugcaagaacuggggaaguacgagcaguacaucaaguggcccugguacaucuggcugggcuuuaucgccggacugauugccaucgugauggucacaaucaugcuguguugcaugaccagcugcuguagcugccugaagggcuguuguagcuguggcagcugcugcaaguucgacgaggacgauucugagcccgugcugaagggcgugaaacugcacuacaccugaggacuaguuauaagacugacuagcccgaugggccucccaacgggcccuccuccccuccuugcaccgagauuaauaaaaaaaaaaaaaaaaaaaaaaaaaaaaaaaaaaaaaaaaaaaaaaaaaaaaaaaaaaaaaaaaaaaaaaaaaaaaaaaaaaaaaaaaaaaaaaaaaaaa

SEQ ID NO: 25570 - RNA, 4011 nt, Artificial Sequence
  SARS-CoV-2/Wuhan/WIV05/2019__EPI_ISL_402128 spike protein mRNA gc mod (1-1273)(K986P_V987P_ D614G)
aggagaaagcuuaccauguucguguuucuggugcugcugccccugguguccagccagugugugaaccugaccaccagaacacagcugccuccagccuacaccaacagcuucaccagaggcguguacuaccccgacaagguguucagauccagcgugcugcacucuacccaggaccuguuccugccuuucuucagcaacgugaccugguuccacgccauccacguguccggcaccaauggcaccaagagauucgacaaccccgugcugcccuucaacgacgggguguacuuugccagcaccgagaaguccaacaucaucagaggcuggaucuucggcaccacacuggacagcaagacccagagccugcugaucgugaacaacgccaccaacguggucaucaaagugugcgaguuccaguucugcaacgaccccuuccugggcgucuacuaccacaagaacaacaagagcuggauggaaagcgaguuccggguguacagcagcgccaacaacugcaccuucgaguacgugucccagccuuuccugauggaccuggaaggcaagcagggcaacuucaagaaccugcgcgaguucguguucaagaacaucgacggcuacuucaaaaucuacagcaagcacaccccuaucaaccucgugcgggaucugccucagggcuucucugcucuggaaccccugguggaucugcccaucggcaucaacaucacccgguuucagacacugcuggcccugcacagaagcuaccugacaccuggcgauagcagcagcggauggacagcuggugccgccgcuuacuaugugggcuaccugcagccuagaaccuuccugcugaaguacaacgagaacggcaccaucaccgacgccguggauugugcucuggauccucugagcgagacaaagugcacccugaaguccuucaccguggaaaagggcaucuaccagaccagcaacuuccgggugcagcccaccgaauccaucgugcgguuccccaauaucaccaaucugugccccuucggcgagguguucaaugccaccagauucgccucuguguacgccuggaaccggaagcggaucagcaauugcguggccgacuacuccgugcuguacaacuccgccagcuucagcaccuucaagugcuacggcguguccccuaccaagcugaacgaccugugcuucacaaacguguacgccgacagcuucgugauccggggagaugaagugcggcagauugccccuggacagacaggcaagaucgccgacuacaacuacaagcugcccgacgacuucaccggcugugugauugccuggaacagcaacaaccuggacuccaaagucggcggcaacuacaauuaccuguaccggcuguuccggaaguccaaucugaagcccuucgagcgggacaucagcaccgaaaucuaucaggccggcagcaccccuugcaacggcguggaaggcuucaacugcuacuucccacugcaguccuacggcuuucagcccacaaauggcgugggcuaucagcccuacagagugguggugcugagcuucgaacugcugcaugcuccugccacagugugcggcccuaagaaaagcaccaaucucgugaagaacaaaugcgugaacuucaacuucaacggccugaccggcaccggcgugcugacagagagcaacaagaaguuccugccauuccagcaguuuggccgggauaucgccgauaccacagacgccguuagagauccccagacacuggaaauccuggacaucaccccaugcagcuucggcggagugucugugaucaccccuggcaccaacaccagcaaucagguggcagugcuguaccagggcgugaacuguaccgaagugcccguggccauucacgccgaucagcugacaccuacauggcggguguacuccaccggcagcaauguguuucagaccagagccggcugucugaucggagccgagcacgugaacaauagcuacgagugcgacauccccaucggcgcuggcaucugugccagcuaccagacacagacaaacagccccagacgggcuagaagcguggccagccagagcaucauugccuacacaaugucucugggcgccgagaacagcguggccuacuccaacaacucuaucgcuauccccaccaacuucaccaucagcgugaccaccgagauccugccuguguccaugaccaagaccagcguggacugcaccauguacaucugcggcgauuccaccgagugcuccaaccugcugcugcaguacggcagcuucugcacccagcugaauagagcccugacagggaucgccguggaacaggacaagaacacccaagagguguucgcccaagugaagcaaaucuacaagaccccuccuaucaaggacuucggcggcuucaauuucagccagauucugcccgauccuagcaagcccagcaagcggagcuucaucgaggaccugcuguucaacaaagugacacuggccgacgccggcuucaucaagcaguauggcgauugucugggcgacauugccgccagggaucugauuugcgcccagaaguuuaacggacugacagugcugccuccucugcugaccgaugagaugaucgcccaguacacaucugcccugcuggccggcacaaucacaagcggcuggacauuuggagcuggcgccgcucugcagauccccuuugcuaugcagauggccuaccgguucaacggcaucggagugacccagaaugugcuguacgagaaccagaagcugaucgccaaccaguucaacagcgccaucggcaagauccaggacagccugagcagcacagcaagcgcccugggaaagcugcaggacguggucaaccagaaugcccaggcacugaacacccuggucaagcagcuguccuccaacuucggcgccaucagcucugugcugaacgauauccugagcagacuggacccuccugaggccgaggugcagaucgacagacugaucacaggcagacugcagagccuccagacauacgugacccagcagcugaucagagccgccgagauuagagccucugccaaucuggccgccaccaagaugucugagugugugcugggccagagcaagagaguggacuuuugcggcaagggcuaccaccugaugagcuucccucagucugccccucacggcgugguguuucugcacgugacauaugugcccgcucaagagaagaauuucaccaccgcuccagccaucugccacgacggcaaagcccacuuuccuagagaaggcguguucguguccaacggcacccauugguucgugacacagcggaacuucuacgagccccagaucaucaccaccgacaacaccuucgugucuggcaacugcgacguugugaucggcauugugaacaauaccguguacgacccucugcagcccgagcuggacagcuucaaagaggaacuggacaaguacuuuaagaaccacacaagccccgacguggaccugggcgauaucagcggaaucaaugccagcgucgugaacauccagaaagagaucgaccggcugaacgagguggccaagaaucugaacgagagccugaucgaccugcaagaacuggggaaguacgagcaguacaucaaguggcccugguacaucuggcugggcuuuaucgccggacugauugccaucgugauggucacaaucaugcuguguugcaugaccagcugcuguagcugccugaagggcuguuguagcuguggcagcugcugcaaguucgacgaggacgauucugagcccgugcugaagggcgugaaacugcacuacaccugaggacuaguuauaagacugacuagcccgaugggccucccaacgggcccuccuccccuccuugcaccgagauuaauaaaaaaaaaaaaaaaaaaaaaaaaaaaaaaaaaaaaaaaaaaaaaaaaaaaaaaaaaaaaaaaaaaaaaaaaaaaaaaaaaaaaaaaaaaaaaaaaaaaa

SEQ ID NO: 25571 - RNA, 4011 nt, Artificial Sequence
  SARS-CoV-2/Wuhan/WIV05/2019__EPI_ISL_402128 spike protein mRNA gc mod (1-1273)(K986P_V987P_A222V_D614G)
aggagaaagcuuaccauguucguguuucuggugcugcugccccugguguccagccagugugugaaccugaccaccagaacacagcugccuccagccuacaccaacagcuucaccagaggcguguacuaccccgacaagguguucagauccagcgugcugcacucuacccaggaccuguuccugccuuucuucagcaacgugaccugguuccacgccauccacguguccggcaccaauggcaccaagagauucgacaaccccgugcugcccuucaacgacgggguguacuuugccagcaccgagaaguccaacaucaucagaggcuggaucuucggcaccacacuggacagcaagacccagagccugcugaucgugaacaacgccaccaacguggucaucaaagugugcgaguuccaguucugcaacgaccccuuccugggcgucuacuaccacaagaacaacaagagcuggauggaaagcgaguuccggguguacagcagcgccaacaacugcaccuucgaguacgugucccagccuuuccugauggaccuggaaggcaagcagggcaacuucaagaaccugcgcgaguucguguucaagaacaucgacggcuacuucaaaaucuacagcaagcacaccccuaucaaccucgugcgggaucugccucagggcuucucugugcuggaaccccugguggaucugcccaucggcaucaacaucacccgguuucagacacugcuggcccugcacagaagcuaccugacaccuggcgauagcagcagcggauggacagcuggugccgccgcuuacuaugugggcuaccugcagccuagaaccuuccugcugaaguacaacgagaacggcaccaucaccgacgccguggauugugcucuggauccucugagcgagacaaagugcacccugaaguccuucaccguggaaaagggcaucuaccagaccagcaacuuccgggugcagcccaccgaauccaucgugcgguuccccaauaucaccaaucugugccccuucggcgagguguucaaugccaccagauucgccucuguguacgccuggaaccggaagcggaucagcaauugcguggccgacuacuccgugcuguacaacuccgccagcuucagcaccuucaagugcuacggcguguccccuaccaagcugaacgaccugugcuucacaaacguguacgccgacagcuucgugauccggggagaugaagugcggcagauugccccuggacagacaggcaagaucgccgacuacaacuacaagcugcccgacgacuucaccggcugugugauugccuggaacagcaacaaccuggacuccaaagucggcggcaacuacaauuaccuguaccggcuguuccggaaguccaaucugaagcccuucgagcgggacaucagcaccgaaaucuaucaggccggcagcaccccuugcaacggcguggaaggcuucaacugcuacuucccacugcaguccuacggcuuucagcccacaaauggcgugggcuaucagcccuacagagugguggugcugagcuucgaacugcugcaugcuccugccacagugugcggcccuaagaaaagcaccaaucucgugaagaacaaaugcgugaacuucaacuucaacggccugaccggcaccggcgugcugacagagagcaacaagaaguuccugccauuccagcaguuuggccgggauaucgccgauaccacagacgccguuagagauccccagacacuggaaauccuggacaucaccccaugcagcuucggcggagugucugugaucaccccuggcaccaacaccagcaaucagguggcagugcuguaccagggcgugaacuguaccgaagugcccguggccauucacgccgaucagcugacaccuacauggcggguguacuccaccggcagcaauguguuucagaccagagccggcugucugaucggagccgagcacgugaacaauagcuacgagugcgacauccccaucggcgcuggcaucugugccagcuaccagacacagacaaacagccccagacgggcuagaagcguggccagccagagcaucauugccuacacaaugucucugggcgccgagaacagcguggccuacuccaacaacucuaucgcuauccccaccaacuucaccaucagcgugaccaccgagauccugccuguguccaugaccaagaccagcguggacugcaccauguacaucugcggcgauuccaccgagugcuccaaccugcugcugcaguacggcagcuucugcacccagcugaauagagcccugacagggaucgccguggaacaggacaagaacacccaagagguguucgcccaagugaagcaaaucuacaagaccccuccuaucaaggacuucggcggcuucaauuucagccagauucugcccgauccuagcaagcccagcaagcggagcuucaucgaggaccugcuguucaacaaagugacacuggccgacgccggcuucaucaagcaguauggcgauugucugggcgacauugccgccagggaucugauuugcgcccagaaguuuaacggacugacagugcugccuccucugcugaccgaugagaugaucgcccaguacacaucugcccugcuggccggcacaaucacaagcggcuggacauuuggagcuggcgccgcucugcagauccccuuugcuaugcagauggccuaccgguucaacggcaucggagugacccagaaugugcuguacgagaaccagaagcugaucgccaaccaguucaacagcgccaucggcaagauccaggacagccugagcagcacagcaagcgcccugggaaagcugcaggacguggucaaccagaaugcccaggcacugaacacccuggucaagcagcuguccuccaacuucggcgccaucagcucugugcugaacgauauccugagcagacuggacccuccugaggccgaggugcagaucgacagacugaucacaggcagacugcagagccuccagacauacgugacccagcagcugaucagagccgccgagauuagagccucugccaaucuggccgccaccaagaugucugagugugugcugggccagagcaagagaguggacuuuugcggcaagggcuaccaccugaugagcuucccucagucugccccucacggcgugguguuucugcacgugacauaugugcccgcucaagagaagaauuucaccaccgcuccagccaucugccacgacggcaaagcccacuuuccuagagaaggcguguucguguccaacggcacccauugguucgugacacagcggaacuucuacgagccccagaucaucaccaccgacaacaccuucgugucuggcaacugcgacguugugaucggcauugugaacaauaccguguacgacccucugcagcccgagcuggacagcuucaaagaggaacuggacaaguacuuuaagaaccacacaagccccgacguggaccugggcgauaucagcggaaucaaugccagcgucgugaacauccagaaagagaucgaccggcugaacgagguggccaagaaucugaacgagagccugaucgaccugcaagaacuggggaaguacgagcaguacaucaaguggcccugguacaucuggcugggcuuuaucgccggacugauugccaucgugauggucacaaucaugcuguguugcaugaccagcugcuguagcugccugaagggcuguuguagcuguggcagcugcugcaaguucgacgaggacgauucugagcccgugcugaagggcgugaaacugcacuacaccugaggacuaguuauaagacugacuagcccgaugggccucccaacgggcccuccuccccuccuugcaccgagauuaauaaaaaaaaaaaaaaaaaaaaaaaaaaaaaaaaaaaaaaaaaaaaaaaaaaaaaaaaaaaaaaaaaaaaaaaaaaaaaaaaaaaaaaaaaaaaaaaaaaaa

SEQ ID NO: 25572 - RNA, 4011 nt, Artificial Sequence
  SARS-CoV-2/Wuhan/WIV05/2019__EPI_ISL_402128 spike protein mRNA gc mod (1-1273)(K986P_V987P_N439K_D614G)
aggagaaagcuuaccauguucguguuucuggugcugcugccccugguguccagccagugugugaaccugaccaccagaacacagcugccuccagccuacaccaacagcuucaccagaggcguguacuaccccgacaagguguucagauccagcgugcugcacucuacccaggaccuguuccugccuuucuucagcaacgugaccugguuccacgccauccacguguccggcaccaauggcaccaagagauucgacaaccccgugcugcccuucaacgacgggguguacuuugccagcaccgagaaguccaacaucaucagaggcuggaucuucggcaccacacuggacagcaagacccagagccugcugaucgugaacaacgccaccaacguggucaucaaagugugcgaguuccaguucugcaacgaccccuuccugggcgucuacuaccacaagaacaacaagagcuggauggaaagcgaguuccggguguacagcagcgccaacaacugcaccuucgaguacgugucccagccuuuccugauggaccuggaaggcaagcagggcaacuucaagaaccugcgcgaguucguguucaagaacaucgacggcuacuucaaaaucuacagcaagcacaccccuaucaaccucgugcgggaucugccucagggcuucucugcucuggaaccccugguggaucugcccaucggcaucaacaucacccgguuucagacacugcuggcccugcacagaagcuaccugacaccuggcgauagcagcagcggauggacagcuggugccgccgcuuacuaugugggcuaccugcagccuagaaccuuccugcugaaguacaacgagaacggcaccaucaccgacgccguggauugugcucuggauccucugagcgagacaaagugcacccugaaguccuucaccguggaaaagggcaucuaccagaccagcaacuuccgggugcagcccaccgaauccaucgugcgguuccccaauaucaccaaucugugccccuucggcgagguguucaaugccaccagauucgccucuguguacgccuggaaccggaagcggaucagcaauugcguggccgacuacuccgugcuguacaacuccgccagcuucagcaccuucaagugcuacggcguguccccuaccaagcugaacgaccugugcuucacaaacguguacgccgacagcuucgugauccggggagaugaagugcggcagauugccccuggacagacaggcaagaucgccgacuacaacuacaagcugcccgacgacuucaccggcugugugauugccuggaacagcaagaaccuggacuccaaagucggcggcaacuacaauuaccuguaccggcuguuccggaaguccaaucugaagcccuucgagcgggacaucagcaccgaaaucuaucaggccggcagcaccccuugcaacggcguggaaggcuucaacugcuacuucccacugcaguccuacggcuuucagcccacaaauggcgugggcuaucagcccuacagagugguggugcugagcuucgaacugcugcaugcuccugccacagugugcggcccuaagaaaagcaccaaucucgugaagaacaaaugcgugaacuucaacuucaacggccugaccggcaccggcgugcugacagagagcaacaagaaguuccugccauuccagcaguuuggccgggauaucgccgauaccacagacgccguuagagauccccagacacuggaaauccuggacaucaccccaugcagcuucggcggagugucugugaucaccccuggcaccaacaccagcaaucagguggcagugcuguaccagggcgugaacuguaccgaagugcccguggccauucacgccgaucagcugacaccuacauggcggguguacuccaccggcagcaauguguuucagaccagagccggcugucugaucggagccgagcacgugaacaauagcuacgagugcgacauccccaucggcgcuggcaucugugccagcuaccagacacagacaaacagccccagacgggcuagaagcguggccagccagagcaucauugccuacacaaugucucugggcgccgagaacagcguggccuacuccaacaacucuaucgcuauccccaccaacuucaccaucagcgugaccaccgagauccugccuguguccaugaccaagaccagcguggacugcaccauguacaucugcggcgauuccaccgagugcuccaaccugcugcugcaguacggcagcuucugcacccagcugaauagagcccugacagggaucgccguggaacaggacaagaacacccaagagguguucgcccaagugaagcaaaucuacaagaccccuccuaucaaggacuucggcggcuucaauuucagccagauucugcccgauccuagcaagcccagcaagcggagcuucaucgaggaccugcuguucaacaaagugacacuggccgacgccggcuucaucaagcaguauggcgauugucugggcgacauugccgccagggaucugauuugcgcccagaaguuuaacggacugacagugcugccuccucugcugaccgaugagaugaucgcccaguacacaucugcccugcuggccggcacaaucacaagcggcuggacauuuggagcuggcgccgcucugcagauccccuuugcuaugcagauggccuaccgguucaacggcaucggagugacccagaaugugcuguacgagaaccagaagcugaucgccaaccaguucaacagcgccaucggcaagauccaggacagccugagcagcacagcaagcgcccugggaaagcugcaggacguggucaaccagaaugcccaggcacugaacacccuggucaagcagcuguccuccaacuucggcgccaucagcucugugcugaacgauauccugagcagacuggacccuccugaggccgaggugcagaucgacagacugaucacaggcagacugcagagccuccagacauacgugacccagcagcugaucagagccgccgagauuagagccucugccaaucuggccgccaccaagaugucugagugugugcugggccagagcaagagaguggacuuuugcggcaagggcuaccaccugaugagcuucccucagucugccccucacggcgugguguuucugcacgugacauaugugcccgcucaagagaagaauuucaccaccgcuccagccaucugccacgacggcaaagcccacuuuccuagagaaggcguguucguguccaacggcacccauugguucgugacacagcggaacuucuacgagccccagaucaucaccaccgacaacaccuucgugucuggcaacugcgacguugugaucggcauugugaacaauaccguguacgacccucugcagcccgagcuggacagcuucaaagaggaacuggacaaguacuuuaagaaccacacaagccccgacguggaccugggcgauaucagcggaaucaaugccagcgucgugaacauccagaaagagaucgaccggcugaacgagguggccaagaaucugaacgagagccugaucgaccugcaagaacuggggaaguacgagcaguacaucaaguggcccugguacaucuggcugggcuuuaucgccggacugauugccaucgugauggucacaaucaugcuguguugcaugaccagcugcuguagcugccugaagggcuguuguagcuguggcagcugcugcaaguucgacgaggacgauucugagcccgugcugaagggcgugaaacugcacuacaccugaggacuaguuauaagacugacuagcccgaugggccucccaacgggcccuccuccccuccuugcaccgagauuaauaaaaaaaaaaaaaaaaaaaaaaaaaaaaaaaaaaaaaaaaaaaaaaaaaaaaaaaaaaaaaaaaaaaaaaaaaaaaaaaaaaaaaaaaaaaaaaaaaaaa

SEQ ID NO: 25573 - RNA, 4011 nt, Artificial Sequence
  SARS-CoV-2/Wuhan/WIV05/2019__EPI_ISL_402128 spike protein mRNA gc mod (1-1273)(K986P_V987P_S477N_D614G)
aggagaaagcuuaccauguucguguuucuggugcugcugccccugguguccagccagugugugaaccugaccaccagaacacagcugccuccagccuacaccaacagcuucaccagaggcguguacuaccccgacaagguguucagauccagcgugcugcacucuacccaggaccuguuccugccuuucuucagcaacgugaccugguuccacgccauccacguguccggcaccaauggcaccaagagauucgacaaccccgugcugcccuucaacgacgggguguacuuugccagcaccgagaaguccaacaucaucagaggcuggaucuucggcaccacacuggacagcaagacccagagccugcugaucgugaacaacgccaccaacguggucaucaaagugugcgaguuccaguucugcaacgaccccuuccugggcgucuacuaccacaagaacaacaagagcuggauggaaagcgaguuccggguguacagcagcgccaacaacugcaccuucgaguacgugucccagccuuuccugauggaccuggaaggcaagcagggcaacuucaagaaccugcgcgaguucguguucaagaacaucgacggcuacuucaaaaucuacagcaagcacaccccuaucaaccucgugcgggaucugccucagggcuucucugcucuggaaccccugguggaucugcccaucggcaucaacaucacccgguuucagacacugcuggcccugcacagaagcuaccugacaccuggcgauagcagcagcggauggacagcuggugccgccgcuuacuaugugggcuaccugcagccuagaaccuuccugcugaaguacaacgagaacggcaccaucaccgacgccguggauugugcucuggauccucugagcgagacaaagugcacccugaaguccuucaccguggaaaagggcaucuaccagaccagcaacuuccgggugcagcccaccgaauccaucgugcgguuccccaauaucaccaaucugugccccuucggcgagguguucaaugccaccagauucgccucuguguacgccuggaaccggaagcggaucagcaauugcguggccgacuacuccgugcuguacaacuccgccagcuucagcaccuucaagugcuacggcguguccccuaccaagcugaacgaccugugcuucacaaacguguacgccgacagcuucgugauccggggagaugaagugcggcagauugccccuggacagacaggcaagaucgccgacuacaacuacaagcugcccgacgacuucaccggcugugugauugccuggaacagcaacaaccuggacuccaaagucggcggcaacuacaauuaccuguaccggcuguuccggaaguccaaucugaagcccuucgagcgggacaucagcaccgaaaucuaucaggccggcaacaccccuugcaacggcguggaaggcuucaacugcuacuucccacugcaguccuacggcuuucagcccacaaauggcgugggcuaucagcccuacagagugguggugcugagcuucgaacugcugcaugcuccugccacagugugcggcccuaagaaaagcaccaaucucgugaagaacaaaugcgugaacuucaacuucaacggccugaccggcaccggcgugcugacagagagcaacaagaaguuccugccauuccagcaguuuggccgggauaucgccgauaccacagacgccguuagagauccccagacacuggaaauccuggacaucaccccaugcagcuucggcggagugucugugaucaccccuggcaccaacaccagcaaucagguggcagugcuguaccagggcgugaacuguaccgaagugcccguggccauucacgccgaucagcugacaccuacauggcggguguacuccaccggcagcaauguguuucagaccagagccggcugucugaucggagccgagcacgugaacaauagcuacgagugcgacauccccaucggcgcuggcaucugugccagcuaccagacacagacaaacagccccagacgggcuagaagcguggccagccagagcaucauugccuacacaaugucucugggcgccgagaacagcguggccuacuccaacaacucuaucgcuauccccaccaacuucaccaucagcgugaccaccgagauccugccuguguccaugaccaagaccagcguggacugcaccauguacaucugcggcgauuccaccgagugcuccaaccugcugcugcaguacggcagcuucugcacccagcugaauagagcccugacagggaucgccguggaacaggacaagaacacccaagagguguucgcccaagugaagcaaaucuacaagaccccuccuaucaaggacuucggcggcuucaauuucagccagauucugcccgauccuagcaagcccagcaagcggagcuucaucgaggaccugcuguucaacaaagugacacuggccgacgccggcuucaucaagcaguauggcgauugucugggcgacauugccgccagggaucugauuugcgcccagaaguuuaacggacugacagugcugccuccucugcugaccgaugagaugaucgcccaguacacaucugcccugcuggccggcacaaucacaagcggcuggacauuuggagcuggcgccgcucugcagauccccuuugcuaugcagauggccuaccgguucaacggcaucggagugacccagaaugugcuguacgagaaccagaagcugaucgccaaccaguucaacagcgccaucggcaagauccaggacagccugagcagcacagcaagcgcccugggaaagcugcaggacguggucaaccagaaugcccaggcacugaacacccuggucaagcagcuguccuccaacuucggcgccaucagcucugugcugaacgauauccugagcagacuggacccuccugaggccgaggugcagaucgacagacugaucacaggcagacugcagagccuccagacauacgugacccagcagcugaucagagccgccgagauuagagccucugccaaucuggccgccaccaagaugucugagugugugcugggccagagcaagagaguggacuuuugcggcaagggcuaccaccugaugagcuucccucagucugccccucacggcgugguguuucugcacgugacauaugugcccgcucaagagaagaauuucaccaccgcuccagccaucugccacgacggcaaagcccacuuuccuagagaaggcguguucguguccaacggcacccauugguucgugacacagcggaacuucuacgagccccagaucaucaccaccgacaacaccuucgugucuggcaacugcgacguugugaucggcauugugaacaauaccguguacgacccucugcagcccgagcuggacagcuucaaagaggaacuggacaaguacuuuaagaaccacacaagccccgacguggaccugggcgauaucagcggaaucaaugccagcgucgugaacauccagaaagagaucgaccggcugaacgagguggccaagaaucugaacgagagccugaucgaccugcaagaacuggggaaguacgagcaguacaucaaguggcccugguacaucuggcugggcuuuaucgccggacugauugccaucgugauggucacaaucaugcuguguugcaugaccagcugcuguagcugccugaagggcuguuguagcuguggcagcugcugcaaguucgacgaggacgauucugagcccgugcugaagggcgugaaacugcacuacaccugaggacuaguuauaagacugacuagcccgaugggccucccaacgggcccuccuccccuccuugcaccgagauuaauaaaaaaaaaaaaaaaaaaaaaaaaaaaaaaaaaaaaaaaaaaaaaaaaaaaaaaaaaaaaaaaaaaaaaaaaaaaaaaaaaaaaaaaaaaaaaaaaaaaa

SEQ ID NO: 25574 - RNA, 4011 nt, Artificial Sequence
  SARS-CoV-2/Wuhan/WIV05/2019__EPI_ISL_402128 spike protein mRNA gc mod (1-1273)(K986P_V987P_N501Y_D614G)
aggagaaagcuuaccauguucguguuucuggugcugcugccccugguguccagccagugugugaaccugaccaccagaacacagcugccuccagccuacaccaacagcuucaccagaggcguguacuaccccgacaagguguucagauccagcgugcugcacucuacccaggaccuguuccugccuuucuucagcaacgugaccugguuccacgccauccacguguccggcaccaauggcaccaagagauucgacaaccccgugcugcccuucaacgacgggguguacuuugccagcaccgagaaguccaacaucaucagaggcuggaucuucggcaccacacuggacagcaagacccagagccugcugaucgugaacaacgccaccaacguggucaucaaagugugcgaguuccaguucugcaacgaccccuuccugggcgucuacuaccacaagaacaacaagagcuggauggaaagcgaguuccggguguacagcagcgccaacaacugcaccuucgaguacgugucccagccuuuccugauggaccuggaaggcaagcagggcaacuucaagaaccugcgcgaguucguguucaagaacaucgacggcuacuucaaaaucuacagcaagcacaccccuaucaaccucgugcgggaucugccucagggcuucucugcucuggaaccccugguggaucugcccaucggcaucaacaucacccgguuucagacacugcuggcccugcacagaagcuaccugacaccuggcgauagcagcagcggauggacagcuggugccgccgcuuacuaugugggcuaccugcagccuagaaccuuccugcugaaguacaacgagaacggcaccaucaccgacgccguggauugugcucuggauccucugagcgagacaaagugcacccugaaguccuucaccguggaaaagggcaucuaccagaccagcaacuuccgggugcagcccaccgaauccaucgugcgguuccccaauaucaccaaucugugccccuucggcgagguguucaaugccaccagauucgccucuguguacgccuggaaccggaagcggaucagcaauugcguggccgacuacuccgugcuguacaacuccgccagcuucagcaccuucaagugcuacggcguguccccuaccaagcugaacgaccugugcuucacaaacguguacgccgacagcuucgugauccggggagaugaagugcggcagauugccccuggacagacaggcaagaucgccgacuacaacuacaagcugcccgacgacuucaccggcugugugauugccuggaacagcaacaaccuggacuccaaagucggcggcaacuacaauuaccuguaccggcuguuccggaaguccaaucugaagcccuucgagcgggacaucagcaccgaaaucuaucaggccggcagcaccccuugcaacggcguggaaggcuucaacugcuacuucccacugcaguccuacggcuuucagcccacauacggcgugggcuaucagcccuacagagugguggugcugagcuucgaacugcugcaugcuccugccacagugugcggcccuaagaaaagcaccaaucucgugaagaacaaaugcgugaacuucaacuucaacggccugaccggcaccggcgugcugacagagagcaacaagaaguuccugccauuccagcaguuuggccgggauaucgccgauaccacagacgccguuagagauccccagacacuggaaauccuggacaucaccccaugcagcuucggcggagugucugugaucaccccuggcaccaacaccagcaaucagguggcagugcuguaccagggcgugaacuguaccgaagugcccguggccauucacgccgaucagcugacaccuacauggcggguguacuccaccggcagcaauguguuucagaccagagccggcugucugaucggagccgagcacgugaacaauagcuacgagugcgacauccccaucggcgcuggcaucugugccagcuaccagacacagacaaacagccccagacgggcuagaagcguggccagccagagcaucauugccuacacaaugucucugggcgccgagaacagcguggccuacuccaacaacucuaucgcuauccccaccaacuucaccaucagcgugaccaccgagauccugccuguguccaugaccaagaccagcguggacugcaccauguacaucugcggcgauuccaccgagugcuccaaccugcugcugcaguacggcagcuucugcacccagcugaauagagcccugacagggaucgccguggaacaggacaagaacacccaagagguguucgcccaagugaagcaaaucuacaagaccccuccuaucaaggacuucggcggcuucaauuucagccagauucugcccgauccuagcaagcccagcaagcggagcuucaucgaggaccugcuguucaacaaagugacacuggccgacgccggcuucaucaagcaguauggcgauugucugggcgacauugccgccagggaucugauuugcgcccagaaguuuaacggacugacagugcugccuccucugcugaccgaugagaugaucgcccaguacacaucugcccugcuggccggcacaaucacaagcggcuggacauuuggagcuggcgccgcucugcagauccccuuugcuaugcagauggccuaccgguucaacggcaucggagugacccagaaugugcuguacgagaaccagaagcugaucgccaaccaguucaacagcgccaucggcaagauccaggacagccugagcagcacagcaagcgcccugggaaagcugcaggacguggucaaccagaaugcccaggcacugaacacccuggucaagcagcuguccuccaacuucggcgccaucagcucugugcugaacgauauccugagcagacuggacccuccugaggccgaggugcagaucgacagacugaucacaggcagacugcagagccuccagacauacgugacccagcagcugaucagagccgccgagauuagagccucugccaaucuggccgccaccaagaugucugagugugugcugggccagagcaagagaguggacuuuugcggcaagggcuaccaccugaugagcuucccucagucugccccucacggcgugguguuucugcacgugacauaugugcccgcucaagagaagaauuucaccaccgcuccagccaucugccacgacggcaaagcccacuuuccuagagaaggcguguucguguccaacggcacccauugguucgugacacagcggaacuucuacgagccccagaucaucaccaccgacaacaccuucgugucuggcaacugcgacguugugaucggcauugugaacaauaccguguacgacccucugcagcccgagcuggacagcuucaaagaggaacuggacaaguacuuuaagaaccacacaagccccgacguggaccugggcgauaucagcggaaucaaugccagcgucgugaacauccagaaagagaucgaccggcugaacgagguggccaagaaucugaacgagagccugaucgaccugcaagaacuggggaaguacgagcaguacaucaaguggcccugguacaucuggcugggcuuuaucgccggacugauugccaucgugauggucacaaucaugcuguguugcaugaccagcugcuguagcugccugaagggcuguuguagcuguggcagcugcugcaaguucgacgaggacgauucugagcccgugcugaagggcgugaaacugcacuacaccugaggacuaguuauaagacugacuagcccgaugggccucccaacgggcccuccuccccuccuugcaccgagauuaauaaaaaaaaaaaaaaaaaaaaaaaaaaaaaaaaaaaaaaaaaaaaaaaaaaaaaaaaaaaaaaaaaaaaaaaaaaaaaaaaaaaaaaaaaaaaaaaaaaaa

SEQ ID NO: 25575 - RNA, 4005 nt, Artificial Sequence
  SARS-CoV-2/Wuhan/WIV05/2019__EPI_ISL_402128 spike protein mRNA gc mod (1-1273)(K986P_V987P_H69del_V70del_D614G)
aggagaaagcuuaccauguucguguuucuggugcugcugccccugguguccagccagugugugaaccugaccaccagaacacagcugccuccagccuacaccaacagcuucaccagaggcguguacuaccccgacaagguguucagauccagcgugcugcacucuacccaggaccuguuccugccuuucuucagcaacgugaccugguuccacgccaucuccggcaccaauggcaccaagagauucgacaaccccgugcugcccuucaacgacgggguguacuuugccagcaccgagaaguccaacaucaucagaggcuggaucuucggcaccacacuggacagcaagacccagagccugcugaucgugaacaacgccaccaacguggucaucaaagugugcgaguuccaguucugcaacgaccccuuccugggcgucuacuaccacaagaacaacaagagcuggauggaaagcgaguuccggguguacagcagcgccaacaacugcaccuucgaguacgugucccagccuuuccugauggaccuggaaggcaagcagggcaacuucaagaaccugcgcgaguucguguucaagaacaucgacggcuacuucaaaaucuacagcaagcacaccccuaucaaccucgugcgggaucugccucagggcuucucugcucuggaaccccugguggaucugcccaucggcaucaacaucacccgguuucagacacugcuggcccugcacagaagcuaccugacaccuggcgauagcagcagcggauggacagcuggugccgccgcuuacuaugugggcuaccugcagccuagaaccuuccugcugaaguacaacgagaacggcaccaucaccgacgccguggauugugcucuggauccucugagcgagacaaagugcacccugaaguccuucaccguggaaaagggcaucuaccagaccagcaacuuccgggugcagcccaccgaauccaucgugcgguuccccaauaucaccaaucugugccccuucggcgagguguucaaugccaccagauucgccucuguguacgccuggaaccggaagcggaucagcaauugcguggccgacuacuccgugcuguacaacuccgccagcuucagcaccuucaagugcuacggcguguccccuaccaagcugaacgaccugugcuucacaaacguguacgccgacagcuucgugauccggggagaugaagugcggcagauugccccuggacagacaggcaagaucgccgacuacaacuacaagcugcccgacgacuucaccggcugugugauugccuggaacagcaacaaccuggacuccaaagucggcggcaacuacaauuaccuguaccggcuguuccggaaguccaaucugaagcccuucgagcgggacaucagcaccgaaaucuaucaggccggcagcaccccuugcaacggcguggaaggcuucaacugcuacuucccacugcaguccuacggcuuucagcccacaaauggcgugggcuaucagcccuacagagugguggugcugagcuucgaacugcugcaugcuccugccacagugugcggcccuaagaaaagcaccaaucucgugaagaacaaaugcgugaacuucaacuucaacggccugaccggcaccggcgugcugacagagagcaacaagaaguuccugccauuccagcaguuuggccgggauaucgccgauaccacagacgccguuagagauccccagacacuggaaauccuggacaucaccccaugcagcuucggcggagugucugugaucaccccuggcaccaacaccagcaaucagguggcagugcuguaccagggcgugaacuguaccgaagugcccguggccauucacgccgaucagcugacaccuacauggcggguguacuccaccggcagcaauguguuucagaccagagccggcugucugaucggagccgagcacgugaacaauagcuacgagugcgacauccccaucggcgcuggcaucugugccagcuaccagacacagacaaacagccccagacgggcuagaagcguggccagccagagcaucauugccuacacaaugucucugggcgccgagaacagcguggccuacuccaacaacucuaucgcuauccccaccaacuucaccaucagcgugaccaccgagauccugccuguguccaugaccaagaccagcguggacugcaccauguacaucugcggcgauuccaccgagugcuccaaccugcugcugcaguacggcagcuucugcacccagcugaauagagcccugacagggaucgccguggaacaggacaagaacacccaagagguguucgcccaagugaagcaaaucuacaagaccccuccuaucaaggacuucggcggcuucaauuucagccagauucugcccgauccuagcaagcccagcaagcggagcuucaucgaggaccugcuguucaacaaagugacacuggccgacgccggcuucaucaagcaguauggcgauugucugggcgacauugccgccagggaucugauuugcgcccagaaguuuaacggacugacagugcugccuccucugcugaccgaugagaugaucgcccaguacacaucugcccugcuggccggcacaaucacaagcggcuggacauuuggagcuggcgccgcucugcagauccccuuugcuaugcagauggccuaccgguucaacggcaucggagugacccagaaugugcuguacgagaaccagaagcugaucgccaaccaguucaacagcgccaucggcaagauccaggacagccugagcagcacagcaagcgcccugggaaagcugcaggacguggucaaccagaaugcccaggcacugaacacccuggucaagcagcuguccuccaacuucggcgccaucagcucugugcugaacgauauccugagcagacuggacccuccugaggccgaggugcagaucgacagacugaucacaggcagacugcagagccuccagacauacgugacccagcagcugaucagagccgccgagauuagagccucugccaaucuggccgccaccaagaugucugagugugugcugggccagagcaagagaguggacuuuugcggcaagggcuaccaccugaugagcuucccucagucugccccucacggcgugguguuucugcacgugacauaugugcccgcucaagagaagaauuucaccaccgcuccagccaucugccacgacggcaaagcccacuuuccuagagaaggcguguucguguccaacggcacccauugguucgugacacagcggaacuucuacgagccccagaucaucaccaccgacaacaccuucgugucuggcaacugcgacguugugaucggcauugugaacaauaccguguacgacccucugcagcccgagcuggacagcuucaaagaggaacuggacaaguacuuuaagaaccacacaagccccgacguggaccugggcgauaucagcggaaucaaugccagcgucgugaacauccagaaagagaucgaccggcugaacgagguggccaagaaucugaacgagagccugaucgaccugcaagaacuggggaaguacgagcaguacaucaaguggcccugguacaucuggcugggcuuuaucgccggacugauugccaucgugauggucacaaucaugcuguguugcaugaccagcugcuguagcugccugaagggcuguuguagcuguggcagcugcugcaaguucgacgaggacgauucugagcccgugcugaagggcgugaaacugcacuacaccugaggacuaguuauaagacugacuagcccgaugggccucccaacgggcccuccuccccuccuugcaccgagauuaauaaaaaaaaaaaaaaaaaaaaaaaaaaaaaaaaaaaaaaaaaaaaaaaaaaaaaaaaaaaaaaaaaaaaaaaaaaaaaaaaaaaaaaaaaaaaaaaaaaaa

SEQ ID NO: 25576 - RNA, 4011 nt, Artificial Sequence
  SARS-CoV-2/Wuhan/WIV05/2019__EPI_ISL_402128 spike protein mRNA gc mod (1-1273)(K986P_V987P_Y453F_D614G)
aggagaaagcuuaccauguucguguuucuggugcugcugccccugguguccagccagugugugaaccugaccaccagaacacagcugccuccagccuacaccaacagcuucaccagaggcguguacuaccccgacaagguguucagauccagcgugcugcacucuacccaggaccuguuccugccuuucuucagcaacgugaccugguuccacgccauccacguguccggcaccaauggcaccaagagauucgacaaccccgugcugcccuucaacgacgggguguacuuugccagcaccgagaaguccaacaucaucagaggcuggaucuucggcaccacacuggacagcaagacccagagccugcugaucgugaacaacgccaccaacguggucaucaaagugugcgaguuccaguucugcaacgaccccuuccugggcgucuacuaccacaagaacaacaagagcuggauggaaagcgaguuccggguguacagcagcgccaacaacugcaccuucgaguacgugucccagccuuuccugauggaccuggaaggcaagcagggcaacuucaagaaccugcgcgaguucguguucaagaacaucgacggcuacuucaaaaucuacagcaagcacaccccuaucaaccucgugcgggaucugccucagggcuucucugcucuggaaccccugguggaucugcccaucggcaucaacaucacccgguuucagacacugcuggcccugcacagaagcuaccugacaccuggcgauagcagcagcggauggacagcuggugccgccgcuuacuaugugggcuaccugcagccuagaaccuuccugcugaaguacaacgagaacggcaccaucaccgacgccguggauugugcucuggauccucugagcgagacaaagugcacccugaaguccuucaccguggaaaagggcaucuaccagaccagcaacuuccgggugcagcccaccgaauccaucgugcgguuccccaauaucaccaaucugugccccuucggcgagguguucaaugccaccagauucgccucuguguacgccuggaaccggaagcggaucagcaauugcguggccgacuacuccgugcuguacaacuccgccagcuucagcaccuucaagugcuacggcguguccccuaccaagcugaacgaccugugcuucacaaacguguacgccgacagcuucgugauccggggagaugaagugcggcagauugccccuggacagacaggcaagaucgccgacuacaacuacaagcugcccgacgacuucaccggcugugugauugccuggaacagcaacaaccuggacuccaaagucggcggcaacuacaauuaccuguuccggcuguuccggaaguccaaucugaagcccuucgagcgggacaucagcaccgaaaucuaucaggccggcagcaccccuugcaacggcguggaaggcuucaacugcuacuucccacugcaguccuacggcuuucagcccacaaauggcgugggcuaucagcccuacagagugguggugcugagcuucgaacugcugcaugcuccugccacagugugcggcccuaagaaaagcaccaaucucgugaagaacaaaugcgugaacuucaacuucaacggccugaccggcaccggcgugcugacagagagcaacaagaaguuccugccauuccagcaguuuggccgggauaucgccgauaccacagacgccguuagagauccccagacacuggaaauccuggacaucaccccaugcagcuucggcggagugucugugaucaccccuggcaccaacaccagcaaucagguggcagugcuguaccagggcgugaacuguaccgaagugcccguggccauucacgccgaucagcugacaccuacauggcggguguacuccaccggcagcaauguguuucagaccagagccggcugucugaucggagccgagcacgugaacaauagcuacgagugcgacauccccaucggcgcuggcaucugugccagcuaccagacacagacaaacagccccagacgggcuagaagcguggccagccagagcaucauugccuacacaaugucucugggcgccgagaacagcguggccuacuccaacaacucuaucgcuauccccaccaacuucaccaucagcgugaccaccgagauccugccuguguccaugaccaagaccagcguggacugcaccauguacaucugcggcgauuccaccgagugcuccaaccugcugcugcaguacggcagcuucugcacccagcugaauagagcccugacagggaucgccguggaacaggacaagaacacccaagagguguucgcccaagugaagcaaaucuacaagaccccuccuaucaaggacuucggcggcuucaauuucagccagauucugcccgauccuagcaagcccagcaagcggagcuucaucgaggaccugcuguucaacaaagugacacuggccgacgccggcuucaucaagcaguauggcgauugucugggcgacauugccgccagggaucugauuugcgcccagaaguuuaacggacugacagugcugccuccucugcugaccgaugagaugaucgcccaguacacaucugcccugcuggccggcacaaucacaagcggcuggacauuuggagcuggcgccgcucugcagauccccuuugcuaugcagauggccuaccgguucaacggcaucggagugacccagaaugugcuguacgagaaccagaagcugaucgccaaccaguucaacagcgccaucggcaagauccaggacagccugagcagcacagcaagcgcccugggaaagcugcaggacguggucaaccagaaugcccaggcacugaacacccuggucaagcagcuguccuccaacuucggcgccaucagcucugugcugaacgauauccugagcagacuggacccuccugaggccgaggugcagaucgacagacugaucacaggcagacugcagagccuccagacauacgugacccagcagcugaucagagccgccgagauuagagccucugccaaucuggccgccaccaagaugucugagugugugcugggccagagcaagagaguggacuuuugcggcaagggcuaccaccugaugagcuucccucagucugccccucacggcgugguguuucugcacgugacauaugugcccgcucaagagaagaauuucaccaccgcuccagccaucugccacgacggcaaagcccacuuuccuagagaaggcguguucguguccaacggcacccauugguucgugacacagcggaacuucuacgagccccagaucaucaccaccgacaacaccuucgugucuggcaacugcgacguugugaucggcauugugaacaauaccguguacgacccucugcagcccgagcuggacagcuucaaagaggaacuggacaaguacuuuaagaaccacacaagccccgacguggaccugggcgauaucagcggaaucaaugccagcgucgugaacauccagaaagagaucgaccggcugaacgagguggccaagaaucugaacgagagccugaucgaccugcaagaacuggggaaguacgagcaguacaucaaguggcccugguacaucuggcugggcuuuaucgccggacugauugccaucgugauggucacaaucaugcuguguugcaugaccagcugcuguagcugccugaagggcuguuguagcuguggcagcugcugcaaguucgacgaggacgauucugagcccgugcugaagggcgugaaacugcacuacaccugaggacuaguuauaagacugacuagcccgaugggccucccaacgggcccuccuccccuccuugcaccgagauuaauaaaaaaaaaaaaaaaaaaaaaaaaaaaaaaaaaaaaaaaaaaaaaaaaaaaaaaaaaaaaaaaaaaaaaaaaaaaaaaaaaaaaaaaaaaaaaaaaaaaa

SEQ ID NO: 25577 - RNA, 4011 nt, Artificial Sequence
  SARS-CoV-2/Wuhan/WIV05/2019__EPI_ISL_402128 spike protein mRNA gc mod (1-1273)(K986P_V987P_D614G_I692V)
aggagaaagcuuaccauguucguguuucuggugcugcugccccugguguccagccagugugugaaccugaccaccagaacacagcugccuccagccuacaccaacagcuucaccagaggcguguacuaccccgacaagguguucagauccagcgugcugcacucuacccaggaccuguuccugccuuucuucagcaacgugaccugguuccacgccauccacguguccggcaccaauggcaccaagagauucgacaaccccgugcugcccuucaacgacgggguguacuuugccagcaccgagaaguccaacaucaucagaggcuggaucuucggcaccacacuggacagcaagacccagagccugcugaucgugaacaacgccaccaacguggucaucaaagugugcgaguuccaguucugcaacgaccccuuccugggcgucuacuaccacaagaacaacaagagcuggauggaaagcgaguuccggguguacagcagcgccaacaacugcaccuucgaguacgugucccagccuuuccugauggaccuggaaggcaagcagggcaacuucaagaaccugcgcgaguucguguucaagaacaucgacggcuacuucaaaaucuacagcaagcacaccccuaucaaccucgugcgggaucugccucagggcuucucugcucuggaaccccugguggaucugcccaucggcaucaacaucacccgguuucagacacugcuggcccugcacagaagcuaccugacaccuggcgauagcagcagcggauggacagcuggugccgccgcuuacuaugugggcuaccugcagccuagaaccuuccugcugaaguacaacgagaacggcaccaucaccgacgccguggauugugcucuggauccucugagcgagacaaagugcacccugaaguccuucaccguggaaaagggcaucuaccagaccagcaacuuccgggugcagcccaccgaauccaucgugcgguuccccaauaucaccaaucugugccccuucggcgagguguucaaugccaccagauucgccucuguguacgccuggaaccggaagcggaucagcaauugcguggccgacuacuccgugcuguacaacuccgccagcuucagcaccuucaagugcuacggcguguccccuaccaagcugaacgaccugugcuucacaaacguguacgccgacagcuucgugauccggggagaugaagugcggcagauugccccuggacagacaggcaagaucgccgacuacaacuacaagcugcccgacgacuucaccggcugugugauugccuggaacagcaacaaccuggacuccaaagucggcggcaacuacaauuaccuguaccggcuguuccggaaguccaaucugaagcccuucgagcgggacaucagcaccgaaaucuaucaggccggcagcaccccuugcaacggcguggaaggcuucaacugcuacuucccacugcaguccuacggcuuucagcccacaaauggcgugggcuaucagcccuacagagugguggugcugagcuucgaacugcugcaugcuccugccacagugugcggcccuaagaaaagcaccaaucucgugaagaacaaaugcgugaacuucaacuucaacggccugaccggcaccggcgugcugacagagagcaacaagaaguuccugccauuccagcaguuuggccgggauaucgccgauaccacagacgccguuagagauccccagacacuggaaauccuggacaucaccccaugcagcuucggcggagugucugugaucaccccuggcaccaacaccagcaaucagguggcagugcuguaccagggcgugaacuguaccgaagugcccguggccauucacgccgaucagcugacaccuacauggcggguguacuccaccggcagcaauguguuucagaccagagccggcugucugaucggagccgagcacgugaacaauagcuacgagugcgacauccccaucggcgcuggcaucugugccagcuaccagacacagacaaacagccccagacgggcuagaagcguggccagccagagcgugauugccuacacaaugucucugggcgccgagaacagcguggccuacuccaacaacucuaucgcuauccccaccaacuucaccaucagcgugaccaccgagauccugccuguguccaugaccaagaccagcguggacugcaccauguacaucugcggcgauuccaccgagugcuccaaccugcugcugcaguacggcagcuucugcacccagcugaauagagcccugacagggaucgccguggaacaggacaagaacacccaagagguguucgcccaagugaagcaaaucuacaagaccccuccuaucaaggacuucggcggcuucaauuucagccagauucugcccgauccuagcaagcccagcaagcggagcuucaucgaggaccugcuguucaacaaagugacacuggccgacgccggcuucaucaagcaguauggcgauugucugggcgacauugccgccagggaucugauuugcgcccagaaguuuaacggacugacagugcugccuccucugcugaccgaugagaugaucgcccaguacacaucugcccugcuggccggcacaaucacaagcggcuggacauuuggagcuggcgccgcucugcagauccccuuugcuaugcagauggccuaccgguucaacggcaucggagugacccagaaugugcuguacgagaaccagaagcugaucgccaaccaguucaacagcgccaucggcaagauccaggacagccugagcagcacagcaagcgcccugggaaagcugcaggacguggucaaccagaaugcccaggcacugaacacccuggucaagcagcuguccuccaacuucggcgccaucagcucugugcugaacgauauccugagcagacuggacccuccugaggccgaggugcagaucgacagacugaucacaggcagacugcagagccuccagacauacgugacccagcagcugaucagagccgccgagauuagagccucugccaaucuggccgccaccaagaugucugagugugugcugggccagagcaagagaguggacuuuugcggcaagggcuaccaccugaugagcuucccucagucugccccucacggcgugguguuucugcacgugacauaugugcccgcucaagagaagaauuucaccaccgcuccagccaucugccacgacggcaaagcccacuuuccuagagaaggcguguucguguccaacggcacccauugguucgugacacagcggaacuucuacgagccccagaucaucaccaccgacaacaccuucgugucuggcaacugcgacguugugaucggcauugugaacaauaccguguacgacccucugcagcccgagcuggacagcuucaaagaggaacuggacaaguacuuuaagaaccacacaagccccgacguggaccugggcgauaucagcggaaucaaugccagcgucgugaacauccagaaagagaucgaccggcugaacgagguggccaagaaucugaacgagagccugaucgaccugcaagaacuggggaaguacgagcaguacaucaaguggcccugguacaucuggcugggcuuuaucgccggacugauugccaucgugauggucacaaucaugcuguguugcaugaccagcugcuguagcugccugaagggcuguuguagcuguggcagcugcugcaaguucgacgaggacgauucugagcccgugcugaagggcgugaaacugcacuacaccugaggacuaguuauaagacugacuagcccgaugggccucccaacgggcccuccuccccuccuugcaccgagauuaauaaaaaaaaaaaaaaaaaaaaaaaaaaaaaaaaaaaaaaaaaaaaaaaaaaaaaaaaaaaaaaaaaaaaaaaaaaaaaaaaaaaaaaaaaaaaaaaaaaaa

SEQ ID NO: 25578 - RNA, 4011 nt, Artificial Sequence
  SARS-CoV-2/Wuhan/WIV05/2019__EPI_ISL_402128 spike protein mRNA gc mod (1-1273)(K986P_V987P_D614G_M1229I)
aggagaaagcuuaccauguucguguuucuggugcugcugccccugguguccagccagugugugaaccugaccaccagaacacagcugccuccagccuacaccaacagcuucaccagaggcguguacuaccccgacaagguguucagauccagcgugcugcacucuacccaggaccuguuccugccuuucuucagcaacgugaccugguuccacgccauccacguguccggcaccaauggcaccaagagauucgacaaccccgugcugcccuucaacgacgggguguacuuugccagcaccgagaaguccaacaucaucagaggcuggaucuucggcaccacacuggacagcaagacccagagccugcugaucgugaacaacgccaccaacguggucaucaaagugugcgaguuccaguucugcaacgaccccuuccugggcgucuacuaccacaagaacaacaagagcuggauggaaagcgaguuccggguguacagcagcgccaacaacugcaccuucgaguacgugucccagccuuuccugauggaccuggaaggcaagcagggcaacuucaagaaccugcgcgaguucguguucaagaacaucgacggcuacuucaaaaucuacagcaagcacaccccuaucaaccucgugcgggaucugccucagggcuucucugcucuggaaccccugguggaucugcccaucggcaucaacaucacccgguuucagacacugcuggcccugcacagaagcuaccugacaccuggcgauagcagcagcggauggacagcuggugccgccgcuuacuaugugggcuaccugcagccuagaaccuuccugcugaaguacaacgagaacggcaccaucaccgacgccguggauugugcucuggauccucugagcgagacaaagugcacccugaaguccuucaccguggaaaagggcaucuaccagaccagcaacuuccgggugcagcccaccgaauccaucgugcgguuccccaauaucaccaaucugugccccuucggcgagguguucaaugccaccagauucgccucuguguacgccuggaaccggaagcggaucagcaauugcguggccgacuacuccgugcuguacaacuccgccagcuucagcaccuucaagugcuacggcguguccccuaccaagcugaacgaccugugcuucacaaacguguacgccgacagcuucgugauccggggagaugaagugcggcagauugccccuggacagacaggcaagaucgccgacuacaacuacaagcugcccgacgacuucaccggcugugugauugccuggaacagcaacaaccuggacuccaaagucggcggcaacuacaauuaccuguaccggcuguuccggaaguccaaucugaagcccuucgagcgggacaucagcaccgaaaucuaucaggccggcagcaccccuugcaacggcguggaaggcuucaacugcuacuucccacugcaguccuacggcuuucagcccacaaauggcgugggcuaucagcccuacagagugguggugcugagcuucgaacugcugcaugcuccugccacagugugcggcccuaagaaaagcaccaaucucgugaagaacaaaugcgugaacuucaacuucaacggccugaccggcaccggcgugcugacagagagcaacaagaaguuccugccauuccagcaguuuggccgggauaucgccgauaccacagacgccguuagagauccccagacacuggaaauccuggacaucaccccaugcagcuucggcggagugucugugaucaccccuggcaccaacaccagcaaucagguggcagugcuguaccagggcgugaacuguaccgaagugcccguggccauucacgccgaucagcugacaccuacauggcggguguacuccaccggcagcaauguguuucagaccagagccggcugucugaucggagccgagcacgugaacaauagcuacgagugcgacauccccaucggcgcuggcaucugugccagcuaccagacacagacaaacagccccagacgggcuagaagcguggccagccagagcaucauugccuacacaaugucucugggcgccgagaacagcguggccuacuccaacaacucuaucgcuauccccaccaacuucaccaucagcgugaccaccgagauccugccuguguccaugaccaagaccagcguggacugcaccauguacaucugcggcgauuccaccgagugcuccaaccugcugcugcaguacggcagcuucugcacccagcugaauagagcccugacagggaucgccguggaacaggacaagaacacccaagagguguucgcccaagugaagcaaaucuacaagaccccuccuaucaaggacuucggcggcuucaauuucagccagauucugcccgauccuagcaagcccagcaagcggagcuucaucgaggaccugcuguucaacaaagugacacuggccgacgccggcuucaucaagcaguauggcgauugucugggcgacauugccgccagggaucugauuugcgcccagaaguuuaacggacugacagugcugccuccucugcugaccgaugagaugaucgcccaguacacaucugcccugcuggccggcacaaucacaagcggcuggacauuuggagcuggcgccgcucugcagauccccuuugcuaugcagauggccuaccgguucaacggcaucggagugacccagaaugugcuguacgagaaccagaagcugaucgccaaccaguucaacagcgccaucggcaagauccaggacagccugagcagcacagcaagcgcccugggaaagcugcaggacguggucaaccagaaugcccaggcacugaacacccuggucaagcagcuguccuccaacuucggcgccaucagcucugugcugaacgauauccugagcagacuggacccuccugaggccgaggugcagaucgacagacugaucacaggcagacugcagagccuccagacauacgugacccagcagcugaucagagccgccgagauuagagccucugccaaucuggccgccaccaagaugucugagugugugcugggccagagcaagagaguggacuuuugcggcaagggcuaccaccugaugagcuucccucagucugccccucacggcgugguguuucugcacgugacauaugugcccgcucaagagaagaauuucaccaccgcuccagccaucugccacgacggcaaagcccacuuuccuagagaaggcguguucguguccaacggcacccauugguucgugacacagcggaacuucuacgagccccagaucaucaccaccgacaacaccuucgugucuggcaacugcgacguugugaucggcauugugaacaauaccguguacgacccucugcagcccgagcuggacagcuucaaagaggaacuggacaaguacuuuaagaaccacacaagccccgacguggaccugggcgauaucagcggaaucaaugccagcgucgugaacauccagaaagagaucgaccggcugaacgagguggccaagaaucugaacgagagccugaucgaccugcaagaacuggggaaguacgagcaguacaucaaguggcccugguacaucuggcugggcuuuaucgccggacugauugccaucgugaucgucacaaucaugcuguguugcaugaccagcugcuguagcugccugaagggcuguuguagcuguggcagcugcugcaaguucgacgaggacgauucugagcccgugcugaagggcgugaaacugcacuacaccugaggacuaguuauaagacugacuagcccgaugggccucccaacgggcccuccuccccuccuugcaccgagauuaauaaaaaaaaaaaaaaaaaaaaaaaaaaaaaaaaaaaaaaaaaaaaaaaaaaaaaaaaaaaaaaaaaaaaaaaaaaaaaaaaaaaaaaaaaaaaaaaaaaaa

SEQ ID NO: 25579 - RNA, 4005 nt, Artificial Sequence
  SARS-CoV-2/Wuhan/WIV05/2019__EPI_ISL_402128 spike protein mRNA gc mod (1-1273)(K986P_V987P_H69del_V70del_A222V_Y453F_S477N_D614G_I692V)
aggagaaagcuuaccauguucguguuucuggugcugcugccccugguguccagccagugugugaaccugaccaccagaacacagcugccuccagccuacaccaacagcuucaccagaggcguguacuaccccgacaagguguucagauccagcgugcugcacucuacccaggaccuguuccugccuuucuucagcaacgugaccugguuccacgccaucuccggcaccaauggcaccaagagauucgacaaccccgugcugcccuucaacgacgggguguacuuugccagcaccgagaaguccaacaucaucagaggcuggaucuucggcaccacacuggacagcaagacccagagccugcugaucgugaacaacgccaccaacguggucaucaaagugugcgaguuccaguucugcaacgaccccuuccugggcgucuacuaccacaagaacaacaagagcuggauggaaagcgaguuccggguguacagcagcgccaacaacugcaccuucgaguacgugucccagccuuuccugauggaccuggaaggcaagcagggcaacuucaagaaccugcgcgaguucguguucaagaacaucgacggcuacuucaaaaucuacagcaagcacaccccuaucaaccucgugcgggaucugccucagggcuucucugugcuggaaccccugguggaucugcccaucggcaucaacaucacccgguuucagacacugcuggcccugcacagaagcuaccugacaccuggcgauagcagcagcggauggacagcuggugccgccgcuuacuaugugggcuaccugcagccuagaaccuuccugcugaaguacaacgagaacggcaccaucaccgacgccguggauugugcucuggauccucugagcgagacaaagugcacccugaaguccuucaccguggaaaagggcaucuaccagaccagcaacuuccgggugcagcccaccgaauccaucgugcgguuccccaauaucaccaaucugugccccuucggcgagguguucaaugccaccagauucgccucuguguacgccuggaaccggaagcggaucagcaauugcguggccgacuacuccgugcuguacaacuccgccagcuucagcaccuucaagugcuacggcguguccccuaccaagcugaacgaccugugcuucacaaacguguacgccgacagcuucgugauccggggagaugaagugcggcagauugccccuggacagacaggcaagaucgccgacuacaacuacaagcugcccgacgacuucaccggcugugugauugccuggaacagcaacaaccuggacuccaaagucggcggcaacuacaauuaccuguuccggcuguuccggaaguccaaucugaagcccuucgagcgggacaucagcaccgaaaucuaucaggccggcaacaccccuugcaacggcguggaaggcuucaacugcuacuucccacugcaguccuacggcuuucagcccacaaauggcgugggcuaucagcccuacagagugguggugcugagcuucgaacugcugcaugcuccugccacagugugcggcccuaagaaaagcaccaaucucgugaagaacaaaugcgugaacuucaacuucaacggccugaccggcaccggcgugcugacagagagcaacaagaaguuccugccauuccagcaguuuggccgggauaucgccgauaccacagacgccguuagagauccccagacacuggaaauccuggacaucaccccaugcagcuucggcggagugucugugaucaccccuggcaccaacaccagcaaucagguggcagugcuguaccagggcgugaacuguaccgaagugcccguggccauucacgccgaucagcugacaccuacauggcggguguacuccaccggcagcaauguguuucagaccagagccggcugucugaucggagccgagcacgugaacaauagcuacgagugcgacauccccaucggcgcuggcaucugugccagcuaccagacacagacaaacagccccagacgggcuagaagcguggccagccagagcgugauugccuacacaaugucucugggcgccgagaacagcguggccuacuccaacaacucuaucgcuauccccaccaacuucaccaucagcgugaccaccgagauccugccuguguccaugaccaagaccagcguggacugcaccauguacaucugcggcgauuccaccgagugcuccaaccugcugcugcaguacggcagcuucugcacccagcugaauagagcccugacagggaucgccguggaacaggacaagaacacccaagagguguucgcccaagugaagcaaaucuacaagaccccuccuaucaaggacuucggcggcuucaauuucagccagauucugcccgauccuagcaagcccagcaagcggagcuucaucgaggaccugcuguucaacaaagugacacuggccgacgccggcuucaucaagcaguauggcgauugucugggcgacauugccgccagggaucugauuugcgcccagaaguuuaacggacugacagugcugccuccucugcugaccgaugagaugaucgcccaguacacaucugcccugcuggccggcacaaucacaagcggcuggacauuuggagcuggcgccgcucugcagauccccuuugcuaugcagauggccuaccgguucaacggcaucggagugacccagaaugugcuguacgagaaccagaagcugaucgccaaccaguucaacagcgccaucggcaagauccaggacagccugagcagcacagcaagcgcccugggaaagcugcaggacguggucaaccagaaugcccaggcacugaacacccuggucaagcagcuguccuccaacuucggcgccaucagcucugugcugaacgauauccugagcagacuggacccuccugaggccgaggugcagaucgacagacugaucacaggcagacugcagagccuccagacauacgugacccagcagcugaucagagccgccgagauuagagccucugccaaucuggccgccaccaagaugucugagugugugcugggccagagcaagagaguggacuuuugcggcaagggcuaccaccugaugagcuucccucagucugccccucacggcgugguguuucugcacgugacauaugugcccgcucaagagaagaauuucaccaccgcuccagccaucugccacgacggcaaagcccacuuuccuagagaaggcguguucguguccaacggcacccauugguucgugacacagcggaacuucuacgagccccagaucaucaccaccgacaacaccuucgugucuggcaacugcgacguugugaucggcauugugaacaauaccguguacgacccucugcagcccgagcuggacagcuucaaagaggaacuggacaaguacuuuaagaaccacacaagccccgacguggaccugggcgauaucagcggaaucaaugccagcgucgugaacauccagaaagagaucgaccggcugaacgagguggccaagaaucugaacgagagccugaucgaccugcaagaacuggggaaguacgagcaguacaucaaguggcccugguacaucuggcugggcuuuaucgccggacugauugccaucgugauggucacaaucaugcuguguugcaugaccagcugcuguagcugccugaagggcuguuguagcuguggcagcugcugcaaguucgacgaggacgauucugagcccgugcugaagggcgugaaacugcacuacaccugaggacuaguuauaagacugacuagcccgaugggccucccaacgggcccuccuccccuccuugcaccgagauuaauaaaaaaaaaaaaaaaaaaaaaaaaaaaaaaaaaaaaaaaaaaaaaaaaaaaaaaaaaaaaaaaaaaaaaaaaaaaaaaaaaaaaaaaaaaaaaaaaaaaa

SEQ ID NO: 25580 - RNA, 4005 nt, Artificial Sequence
  SARS-CoV-2/Wuhan/WIV05/2019__EPI_ISL_402128 spike protein mRNA gc mod (1-1273)(K986P_V987P_H69del_V70del_Y453F_D614G_I692V_M1229I)
aggagaaagcuuaccauguucguguuucuggugcugcugccccugguguccagccagugugugaaccugaccaccagaacacagcugccuccagccuacaccaacagcuucaccagaggcguguacuaccccgacaagguguucagauccagcgugcugcacucuacccaggaccuguuccugccuuucuucagcaacgugaccugguuccacgccaucuccggcaccaauggcaccaagagauucgacaaccccgugcugcccuucaacgacgggguguacuuugccagcaccgagaaguccaacaucaucagaggcuggaucuucggcaccacacuggacagcaagacccagagccugcugaucgugaacaacgccaccaacguggucaucaaagugugcgaguuccaguucugcaacgaccccuuccugggcgucuacuaccacaagaacaacaagagcuggauggaaagcgaguuccggguguacagcagcgccaacaacugcaccuucgaguacgugucccagccuuuccugauggaccuggaaggcaagcagggcaacuucaagaaccugcgcgaguucguguucaagaacaucgacggcuacuucaaaaucuacagcaagcacaccccuaucaaccucgugcgggaucugccucagggcuucucugcucuggaaccccugguggaucugcccaucggcaucaacaucacccgguuucagacacugcuggcccugcacagaagcuaccugacaccuggcgauagcagcagcggauggacagcuggugccgccgcuuacuaugugggcuaccugcagccuagaaccuuccugcugaaguacaacgagaacggcaccaucaccgacgccguggauugugcucuggauccucugagcgagacaaagugcacccugaaguccuucaccguggaaaagggcaucuaccagaccagcaacuuccgggugcagcccaccgaauccaucgugcgguuccccaauaucaccaaucugugccccuucggcgagguguucaaugccaccagauucgccucuguguacgccuggaaccggaagcggaucagcaauugcguggccgacuacuccgugcuguacaacuccgccagcuucagcaccuucaagugcuacggcguguccccuaccaagcugaacgaccugugcuucacaaacguguacgccgacagcuucgugauccggggagaugaagugcggcagauugccccuggacagacaggcaagaucgccgacuacaacuacaagcugcccgacgacuucaccggcugugugauugccuggaacagcaacaaccuggacuccaaagucggcggcaacuacaauuaccuguuccggcuguuccggaaguccaaucugaagcccuucgagcgggacaucagcaccgaaaucuaucaggccggcagcaccccuugcaacggcguggaaggcuucaacugcuacuucccacugcaguccuacggcuuucagcccacaaauggcgugggcuaucagcccuacagagugguggugcugagcuucgaacugcugcaugcuccugccacagugugcggcccuaagaaaagcaccaaucucgugaagaacaaaugcgugaacuucaacuucaacggccugaccggcaccggcgugcugacagagagcaacaagaaguuccugccauuccagcaguuuggccgggauaucgccgauaccacagacgccguuagagauccccagacacuggaaauccuggacaucaccccaugcagcuucggcggagugucugugaucaccccuggcaccaacaccagcaaucagguggcagugcuguaccagggcgugaacuguaccgaagugcccguggccauucacgccgaucagcugacaccuacauggcggguguacuccaccggcagcaauguguuucagaccagagccggcugucugaucggagccgagcacgugaacaauagcuacgagugcgacauccccaucggcgcuggcaucugugccagcuaccagacacagacaaacagccccagacgggcuagaagcguggccagccagagcgugauugccuacacaaugucucugggcgccgagaacagcguggccuacuccaacaacucuaucgcuauccccaccaacuucaccaucagcgugaccaccgagauccugccuguguccaugaccaagaccagcguggacugcaccauguacaucugcggcgauuccaccgagugcuccaaccugcugcugcaguacggcagcuucugcacccagcugaauagagcccugacagggaucgccguggaacaggacaagaacacccaagagguguucgcccaagugaagcaaaucuacaagaccccuccuaucaaggacuucggcggcuucaauuucagccagauucugcccgauccuagcaagcccagcaagcggagcuucaucgaggaccugcuguucaacaaagugacacuggccgacgccggcuucaucaagcaguauggcgauugucugggcgacauugccgccagggaucugauuugcgcccagaaguuuaacggacugacagugcugccuccucugcugaccgaugagaugaucgcccaguacacaucugcccugcuggccggcacaaucacaagcggcuggacauuuggagcuggcgccgcucugcagauccccuuugcuaugcagauggccuaccgguucaacggcaucggagugacccagaaugugcuguacgagaaccagaagcugaucgccaaccaguucaacagcgccaucggcaagauccaggacagccugagcagcacagcaagcgcccugggaaagcugcaggacguggucaaccagaaugcccaggcacugaacacccuggucaagcagcuguccuccaacuucggcgccaucagcucugugcugaacgauauccugagcagacuggacccuccugaggccgaggugcagaucgacagacugaucacaggcagacugcagagccuccagacauacgugacccagcagcugaucagagccgccgagauuagagccucugccaaucuggccgccaccaagaugucugagugugugcugggccagagcaagagaguggacuuuugcggcaagggcuaccaccugaugagcuucccucagucugccccucacggcgugguguuucugcacgugacauaugugcccgcucaagagaagaauuucaccaccgcuccagccaucugccacgacggcaaagcccacuuuccuagagaaggcguguucguguccaacggcacccauugguucgugacacagcggaacuucuacgagccccagaucaucaccaccgacaacaccuucgugucuggcaacugcgacguugugaucggcauugugaacaauaccguguacgacccucugcagcccgagcuggacagcuucaaagaggaacuggacaaguacuuuaagaaccacacaagccccgacguggaccugggcgauaucagcggaaucaaugccagcgucgugaacauccagaaagagaucgaccggcugaacgagguggccaagaaucugaacgagagccugaucgaccugcaagaacuggggaaguacgagcaguacaucaaguggcccugguacaucuggcugggcuuuaucgccggacugauugccaucgugaucgucacaaucaugcuguguugcaugaccagcugcuguagcugccugaagggcuguuguagcuguggcagcugcugcaaguucgacgaggacgauucugagcccgugcugaagggcgugaaacugcacuacaccugaggacuaguuauaagacugacuagcccgaugggccucccaacgggcccuccuccccuccuugcaccgagauuaauaaaaaaaaaaaaaaaaaaaaaaaaaaaaaaaaaaaaaaaaaaaaaaaaaaaaaaaaaaaaaaaaaaaaaaaaaaaaaaaaaaaaaaaaaaaaaaaaaaaa

SEQ ID NO: 25581 - RNA, 4002 nt, Artificial Sequence
  SARS-CoV-2/Wuhan/WIV05/2019__EPI_ISL_402128 spike protein mRNA gc mod (1-1273)(K986P_V987P_K986P_V987P_H69del_V70del_Y144del_N501Y_A570 D_D614G_P681H_T716I_S982A_D1118H)
aggagaaagcuuaccauguucguguuucuggugcugcugccccugguguccagccagugugugaaccugaccaccagaacacagcugccuccagccuacaccaacagcuucaccagaggcguguacuaccccgacaagguguucagauccagcgugcugcacucuacccaggaccuguuccugccuuucuucagcaacgugaccugguuccacgccaucuccggcaccaauggcaccaagagauucgacaaccccgugcugcccuucaacgacgggguguacuuugccagcaccgagaaguccaacaucaucagaggcuggaucuucggcaccacacuggacagcaagacccagagccugcugaucgugaacaacgccaccaacguggucaucaaagugugcgaguuccaguucugcaacgaccccuuccugggcgucuaccacaagaacaacaagagcuggauggaaagcgaguuccggguguacagcagcgccaacaacugcaccuucgaguacgugucccagccuuuccugauggaccuggaaggcaagcagggcaacuucaagaaccugcgcgaguucguguucaagaacaucgacggcuacuucaaaaucuacagcaagcacaccccuaucaaccucgugcgggaucugccucagggcuucucugcucuggaaccccugguggaucugcccaucggcaucaacaucacccgguuucagacacugcuggcccugcacagaagcuaccugacaccuggcgauagcagcagcggauggacagcuggugccgccgcuuacuaugugggcuaccugcagccuagaaccuuccugcugaaguacaacgagaacggcaccaucaccgacgccguggauugugcucuggauccucugagcgagacaaagugcacccugaaguccuucaccguggaaaagggcaucuaccagaccagcaacuuccgggugcagcccaccgaauccaucgugcgguuccccaauaucaccaaucugugccccuucggcgagguguucaaugccaccagauucgccucuguguacgccuggaaccggaagcggaucagcaauugcguggccgacuacuccgugcuguacaacuccgccagcuucagcaccuucaagugcuacggcguguccccuaccaagcugaacgaccugugcuucacaaacguguacgccgacagcuucgugauccggggagaugaagugcggcagauugccccuggacagacaggcaagaucgccgacuacaacuacaagcugcccgacgacuucaccggcugugugauugccuggaacagcaacaaccuggacuccaaagucggcggcaacuacaauuaccuguaccggcuguuccggaaguccaaucugaagcccuucgagcgggacaucagcaccgaaaucuaucaggccggcagcaccccuugcaacggcguggaaggcuucaacugcuacuucccacugcaguccuacggcuuucagcccacauacggcgugggcuaucagcccuacagagugguggugcugagcuucgaacugcugcaugcuccugccacagugugcggcccuaagaaaagcaccaaucucgugaagaacaaaugcgugaacuucaacuucaacggccugaccggcaccggcgugcugacagagagcaacaagaaguuccugccauuccagcaguuuggccgggauaucgacgauaccacagacgccguuagagauccccagacacuggaaauccuggacaucaccccaugcagcuucggcggagugucugugaucaccccuggcaccaacaccagcaaucagguggcagugcuguaccagggcgugaacuguaccgaagugcccguggccauucacgccgaucagcugacaccuacauggcggguguacuccaccggcagcaauguguuucagaccagagccggcugucugaucggagccgagcacgugaacaauagcuacgagugcgacauccccaucggcgcuggcaucugugccagcuaccagacacagacaaacagccacagacgggcuagaagcguggccagccagagcaucauugccuacacaaugucucugggcgccgagaacagcguggccuacuccaacaacucuaucgcuauccccaucaacuucaccaucagcgugaccaccgagauccugccuguguccaugaccaagaccagcguggacugcaccauguacaucugcggcgauuccaccgagugcuccaaccugcugcugcaguacggcagcuucugcacccagcugaauagagcccugacagggaucgccguggaacaggacaagaacacccaagagguguucgcccaagugaagcaaaucuacaagaccccuccuaucaaggacuucggcggcuucaauuucagccagauucugcccgauccuagcaagcccagcaagcggagcuucaucgaggaccugcuguucaacaaagugacacuggccgacgccggcuucaucaagcaguauggcgauugucugggcgacauugccgccagggaucugauuugcgcccagaaguuuaacggacugacagugcugccuccucugcugaccgaugagaugaucgcccaguacacaucugcccugcuggccggcacaaucacaagcggcuggacauuuggagcuggcgccgcucugcagauccccuuugcuaugcagauggccuaccgguucaacggcaucggagugacccagaaugugcuguacgagaaccagaagcugaucgccaaccaguucaacagcgccaucggcaagauccaggacagccugagcagcacagcaagcgcccugggaaagcugcaggacguggucaaccagaaugcccaggcacugaacacccuggucaagcagcuguccuccaacuucggcgccaucagcucugugcugaacgauauccuggccagacuggacccuccugaggccgaggugcagaucgacagacugaucacaggcagacugcagagccuccagacauacgugacccagcagcugaucagagccgccgagauuagagccucugccaaucuggccgccaccaagaugucugagugugugcugggccagagcaagagaguggacuuuugcggcaagggcuaccaccugaugagcuucccucagucugccccucacggcgugguguuucugcacgugacauaugugcccgcucaagagaagaauuucaccaccgcuccagccaucugccacgacggcaaagcccacuuuccuagagaaggcguguucguguccaacggcacccauugguucgugacacagcggaacuucuacgagccccagaucaucaccacccacaacaccuucgugucuggcaacugcgacguugugaucggcauugugaacaauaccguguacgacccucugcagcccgagcuggacagcuucaaagaggaacuggacaaguacuuuaagaaccacacaagccccgacguggaccugggcgauaucagcggaaucaaugccagcgucgugaacauccagaaagagaucgaccggcugaacgagguggccaagaaucugaacgagagccugaucgaccugcaagaacuggggaaguacgagcaguacaucaaguggcccugguacaucuggcugggcuuuaucgccggacugauugccaucgugauggucacaaucaugcuguguugcaugaccagcugcuguagcugccugaagggcuguuguagcuguggcagcugcugcaaguucgacgaggacgauucugagcccgugcugaagggcgugaaacugcacuacaccugaggacuaguuauaagacugacuagcccgaugggccucccaacgggcccuccuccccuccuugcaccgagauuaauaaaaaaaaaaaaaaaaaaaaaaaaaaaaaaaaaaaaaaaaaaaaaaaaaaaaaaaaaaaaaaaaaaaaaaaaaaaaaaaaaaaaaaaaaaaaaaaaaaaa

SEQ ID NO: 25582 - RNA, 4011 nt, Artificial Sequence
  SARS-CoV-2/Wuhan/WIV05/2019__EPI_ISL_402128 spike protein mRNA gc mod (1-1273)(K986P_V987P_K986P_V987P_K417N_E484K_N501Y_D614G)
aggagaaagcuuaccauguucguguuucuggugcugcugccccugguguccagccagugugugaaccugaccaccagaacacagcugccuccagccuacaccaacagcuucaccagaggcguguacuaccccgacaagguguucagauccagcgugcugcacucuacccaggaccuguuccugccuuucuucagcaacgugaccugguuccacgccauccacguguccggcaccaauggcaccaagagauucgacaaccccgugcugcccuucaacgacgggguguacuuugccagcaccgagaaguccaacaucaucagaggcuggaucuucggcaccacacuggacagcaagacccagagccugcugaucgugaacaacgccaccaacguggucaucaaagugugcgaguuccaguucugcaacgaccccuuccugggcgucuacuaccacaagaacaacaagagcuggauggaaagcgaguuccggguguacagcagcgccaacaacugcaccuucgaguacgugucccagccuuuccugauggaccuggaaggcaagcagggcaacuucaagaaccugcgcgaguucguguucaagaacaucgacggcuacuucaaaaucuacagcaagcacaccccuaucaaccucgugcgggaucugccucagggcuucucugcucuggaaccccugguggaucugcccaucggcaucaacaucacccgguuucagacacugcuggcccugcacagaagcuaccugacaccuggcgauagcagcagcggauggacagcuggugccgccgcuuacuaugugggcuaccugcagccuagaaccuuccugcugaaguacaacgagaacggcaccaucaccgacgccguggauugugcucuggauccucugagcgagacaaagugcacccugaaguccuucaccguggaaaagggcaucuaccagaccagcaacuuccgggugcagcccaccgaauccaucgugcgguuccccaauaucaccaaucugugccccuucggcgagguguucaaugccaccagauucgccucuguguacgccuggaaccggaagcggaucagcaauugcguggccgacuacuccgugcuguacaacuccgccagcuucagcaccuucaagugcuacggcguguccccuaccaagcugaacgaccugugcuucacaaacguguacgccgacagcuucgugauccggggagaugaagugcggcagauugccccuggacagacaggcaacaucgccgacuacaacuacaagcugcccgacgacuucaccggcugugugauugccuggaacagcaacaaccuggacuccaaagucggcggcaacuacaauuaccuguaccggcuguuccggaaguccaaucugaagcccuucgagcgggacaucagcaccgaaaucuaucaggccggcagcaccccuugcaacggcgugaagggcuucaacugcuacuucccacugcaguccuacggcuuucagcccacauacggcgugggcuaucagcccuacagagugguggugcugagcuucgaacugcugcaugcuccugccacagugugcggcccuaagaaaagcaccaaucucgugaagaacaaaugcgugaacuucaacuucaacggccugaccggcaccggcgugcugacagagagcaacaagaaguuccugccauuccagcaguuuggccgggauaucgccgauaccacagacgccguuagagauccccagacacuggaaauccuggacaucaccccaugcagcuucggcggagugucugugaucaccccuggcaccaacaccagcaaucagguggcagugcuguaccagggcgugaacuguaccgaagugcccguggccauucacgccgaucagcugacaccuacauggcggguguacuccaccggcagcaauguguuucagaccagagccggcugucugaucggagccgagcacgugaacaauagcuacgagugcgacauccccaucggcgcuggcaucugugccagcuaccagacacagacaaacagccccagacgggcuagaagcguggccagccagagcaucauugccuacacaaugucucugggcgccgagaacagcguggccuacuccaacaacucuaucgcuauccccaccaacuucaccaucagcgugaccaccgagauccugccuguguccaugaccaagaccagcguggacugcaccauguacaucugcggcgauuccaccgagugcuccaaccugcugcugcaguacggcagcuucugcacccagcugaauagagcccugacagggaucgccguggaacaggacaagaacacccaagagguguucgcccaagugaagcaaaucuacaagaccccuccuaucaaggacuucggcggcuucaauuucagccagauucugcccgauccuagcaagcccagcaagcggagcuucaucgaggaccugcuguucaacaaagugacacuggccgacgccggcuucaucaagcaguauggcgauugucugggcgacauugccgccagggaucugauuugcgcccagaaguuuaacggacugacagugcugccuccucugcugaccgaugagaugaucgcccaguacacaucugcccugcuggccggcacaaucacaagcggcuggacauuuggagcuggcgccgcucugcagauccccuuugcuaugcagauggccuaccgguucaacggcaucggagugacccagaaugugcuguacgagaaccagaagcugaucgccaaccaguucaacagcgccaucggcaagauccaggacagccugagcagcacagcaagcgcccugggaaagcugcaggacguggucaaccagaaugcccaggcacugaacacccuggucaagcagcuguccuccaacuucggcgccaucagcucugugcugaacgauauccugagcagacuggacccuccugaggccgaggugcagaucgacagacugaucacaggcagacugcagagccuccagacauacgugacccagcagcugaucagagccgccgagauuagagccucugccaaucuggccgccaccaagaugucugagugugugcugggccagagcaagagaguggacuuuugcggcaagggcuaccaccugaugagcuucccucagucugccccucacggcgugguguuucugcacgugacauaugugcccgcucaagagaagaauuucaccaccgcuccagccaucugccacgacggcaaagcccacuuuccuagagaaggcguguucguguccaacggcacccauugguucgugacacagcggaacuucuacgagccccagaucaucaccaccgacaacaccuucgugucuggcaacugcgacguugugaucggcauugugaacaauaccguguacgacccucugcagcccgagcuggacagcuucaaagaggaacuggacaaguacuuuaagaaccacacaagccccgacguggaccugggcgauaucagcggaaucaaugccagcgucgugaacauccagaaagagaucgaccggcugaacgagguggccaagaaucugaacgagagccugaucgaccugcaagaacuggggaaguacgagcaguacaucaaguggcccugguacaucuggcugggcuuuaucgccggacugauugccaucgugauggucacaaucaugcuguguugcaugaccagcugcuguagcugccugaagggcuguuguagcuguggcagcugcugcaaguucgacgaggacgauucugagcccgugcugaagggcgugaaacugcacuacaccugaggacuaguuauaagacugacuagcccgaugggccucccaacgggcccuccuccccuccuugcaccgagauuaauaaaaaaaaaaaaaaaaaaaaaaaaaaaaaaaaaaaaaaaaaaaaaaaaaaaaaaaaaaaaaaaaaaaaaaaaaaaaaaaaaaaaaaaaaaaaaaaaaaaa

SEQ ID NO: 25583 - RNA, 4002 nt, Artificial Sequence
  SARS-CoV-2/Wuhan/WIV05/2019__EPI_ISL_402128 spike protein mRNA gc mod (1-1273)(K986P_V987P_K986P_V987P_L18F_D80A_D215G_L242del_A243del_ L244del_R246I_K417N_E484K_N501Y_D614G_A701V)
aggagaaagcuuaccauguucguguuucuggugcugcugccccugguguccagccagugugugaacuucaccaccagaacacagcugccuccagccuacaccaacagcuucaccagaggcguguacuaccccgacaagguguucagauccagcgugcugcacucuacccaggaccuguuccugccuuucuucagcaacgugaccugguuccacgccauccacguguccggcaccaauggcaccaagagauucgccaaccccgugcugcccuucaacgacgggguguacuuugccagcaccgagaaguccaacaucaucagaggcuggaucuucggcaccacacuggacagcaagacccagagccugcugaucgugaacaacgccaccaacguggucaucaaagugugcgaguuccaguucugcaacgaccccuuccugggcgucuacuaccacaagaacaacaagagcuggauggaaagcgaguuccggguguacagcagcgccaacaacugcaccuucgaguacgugucccagccuuuccugauggaccuggaaggcaagcagggcaacuucaagaaccugcgcgaguucguguucaagaacaucgacggcuacuucaaaaucuacagcaagcacaccccuaucaaccucgugcggggccugccucagggcuucucugcucuggaaccccugguggaucugcccaucggcaucaacaucacccgguuucagacacugcacaucagcuaccugacaccuggcgauagcagcagcggauggacagcuggugccgccgcuuacuaugugggcuaccugcagccuagaaccuuccugcugaaguacaacgagaacggcaccaucaccgacgccguggauugugcucuggauccucugagcgagacaaagugcacccugaaguccuucaccguggaaaagggcaucuaccagaccagcaacuuccgggugcagcccaccgaauccaucgugcgguuccccaauaucaccaaucugugccccuucggcgagguguucaaugccaccagauucgccucuguguacgccuggaaccggaagcggaucagcaauugcguggccgacuacuccgugcuguacaacuccgccagcuucagcaccuucaagugcuacggcguguccccuaccaagcugaacgaccugugcuucacaaacguguacgccgacagcuucgugauccggggagaugaagugcggcagauugccccuggacagacaggcaacaucgccgacuacaacuacaagcugcccgacgacuucaccggcugugugauugccuggaacagcaacaaccuggacuccaaagucggcggcaacuacaauuaccuguaccggcuguuccggaaguccaaucugaagcccuucgagcgggacaucagcaccgaaaucuaucaggccggcagcaccccuugcaacggcgugaagggcuucaacugcuacuucccacugcaguccuacggcuuucagcccacauacggcgugggcuaucagcccuacagagugguggugcugagcuucgaacugcugcaugcuccugccacagugugcggcccuaagaaaagcaccaaucucgugaagaacaaaugcgugaacuucaacuucaacggccugaccggcaccggcgugcugacagagagcaacaagaaguuccugccauuccagcaguuuggccgggauaucgccgauaccacagacgccguuagagauccccagacacuggaaauccuggacaucaccccaugcagcuucggcggagugucugugaucaccccuggcaccaacaccagcaaucagguggcagugcuguaccagggcgugaacuguaccgaagugcccguggccauucacgccgaucagcugacaccuacauggcggguguacuccaccggcagcaauguguuucagaccagagccggcugucugaucggagccgagcacgugaacaauagcuacgagugcgacauccccaucggcgcuggcaucugugccagcuaccagacacagacaaacagccccagacgggcuagaagcguggccagccagagcaucauugccuacacaaugucucugggcguggagaacagcguggccuacuccaacaacucuaucgcuauccccaccaacuucaccaucagcgugaccaccgagauccugccuguguccaugaccaagaccagcguggacugcaccauguacaucugcggcgauuccaccgagugcuccaaccugcugcugcaguacggcagcuucugcacccagcugaauagagcccugacagggaucgccguggaacaggacaagaacacccaagagguguucgcccaagugaagcaaaucuacaagaccccuccuaucaaggacuucggcggcuucaauuucagccagauucugcccgauccuagcaagcccagcaagcggagcuucaucgaggaccugcuguucaacaaagugacacuggccgacgccggcuucaucaagcaguauggcgauugucugggcgacauugccgccagggaucugauuugcgcccagaaguuuaacggacugacagugcugccuccucugcugaccgaugagaugaucgcccaguacacaucugcccugcuggccggcacaaucacaagcggcuggacauuuggagcuggcgccgcucugcagauccccuuugcuaugcagauggccuaccgguucaacggcaucggagugacccagaaugugcuguacgagaaccagaagcugaucgccaaccaguucaacagcgccaucggcaagauccaggacagccugagcagcacagcaagcgcccugggaaagcugcaggacguggucaaccagaaugcccaggcacugaacacccuggucaagcagcuguccuccaacuucggcgccaucagcucugugcugaacgauauccugagcagacuggacccuccugaggccgaggugcagaucgacagacugaucacaggcagacugcagagccuccagacauacgugacccagcagcugaucagagccgccgagauuagagccucugccaaucuggccgccaccaagaugucugagugugugcugggccagagcaagagaguggacuuuugcggcaagggcuaccaccugaugagcuucccucagucugccccucacggcgugguguuucugcacgugacauaugugcccgcucaagagaagaauuucaccaccgcuccagccaucugccacgacggcaaagcccacuuuccuagagaaggcguguucguguccaacggcacccauugguucgugacacagcggaacuucuacgagccccagaucaucaccaccgacaacaccuucgugucuggcaacugcgacguugugaucggcauugugaacaauaccguguacgacccucugcagcccgagcuggacagcuucaaagaggaacuggacaaguacuuuaagaaccacacaagccccgacguggaccugggcgauaucagcggaaucaaugccagcgucgugaacauccagaaagagaucgaccggcugaacgagguggccaagaaucugaacgagagccugaucgaccugcaagaacuggggaaguacgagcaguacaucaaguggcccugguacaucuggcugggcuuuaucgccggacugauugccaucgugauggucacaaucaugcuguguugcaugaccagcugcuguagcugccugaagggcuguuguagcuguggcagcugcugcaaguucgacgaggacgauucugagcccgugcugaagggcgugaaacugcacuacaccugaggacuaguuauaagacugacuagcccgaugggccucccaacgggcccuccuccccuccuugcaccgagauuaauaaaaaaaaaaaaaaaaaaaaaaaaaaaaaaaaaaaaaaaaaaaaaaaaaaaaaaaaaaaaaaaaaaaaaaaaaaaaaaaaaaaaaaaaaaaaaaaaaaaa

SEQ ID NO: 25584 - RNA, 4011 nt, Artificial Sequence
  SARS-CoV-2/Wuhan/WIV05/2019__EPI_ISL_402128 spike protein mRNA gc mod (1-1273)(K986P_V987P_K986P_V987P_E484K_D614G)
aggagaaagcuuaccauguucguguuucuggugcugcugccccugguguccagccagugugugaaccugaccaccagaacacagcugccuccagccuacaccaacagcuucaccagaggcguguacuaccccgacaagguguucagauccagcgugcugcacucuacccaggaccuguuccugccuuucuucagcaacgugaccugguuccacgccauccacguguccggcaccaauggcaccaagagauucgacaaccccgugcugcccuucaacgacgggguguacuuugccagcaccgagaaguccaacaucaucagaggcuggaucuucggcaccacacuggacagcaagacccagagccugcugaucgugaacaacgccaccaacguggucaucaaagugugcgaguuccaguucugcaacgaccccuuccugggcgucuacuaccacaagaacaacaagagcuggauggaaagcgaguuccggguguacagcagcgccaacaacugcaccuucgaguacgugucccagccuuuccugauggaccuggaaggcaagcagggcaacuucaagaaccugcgcgaguucguguucaagaacaucgacggcuacuucaaaaucuacagcaagcacaccccuaucaaccucgugcgggaucugccucagggcuucucugcucuggaaccccugguggaucugcccaucggcaucaacaucacccgguuucagacacugcuggcccugcacagaagcuaccugacaccuggcgauagcagcagcggauggacagcuggugccgccgcuuacuaugugggcuaccugcagccuagaaccuuccugcugaaguacaacgagaacggcaccaucaccgacgccguggauugugcucuggauccucugagcgagacaaagugcacccugaaguccuucaccguggaaaagggcaucuaccagaccagcaacuuccgggugcagcccaccgaauccaucgugcgguuccccaauaucaccaaucugugccccuucggcgagguguucaaugccaccagauucgccucuguguacgccuggaaccggaagcggaucagcaauugcguggccgacuacuccgugcuguacaacuccgccagcuucagcaccuucaagugcuacggcguguccccuaccaagcugaacgaccugugcuucacaaacguguacgccgacagcuucgugauccggggagaugaagugcggcagauugccccuggacagacaggcaagaucgccgacuacaacuacaagcugcccgacgacuucaccggcugugugauugccuggaacagcaacaaccuggacuccaaagucggcggcaacuacaauuaccuguaccggcuguuccggaaguccaaucugaagcccuucgagcgggacaucagcaccgaaaucuaucaggccggcagcaccccuugcaacggcgugaagggcuucaacugcuacuucccacugcaguccuacggcuuucagcccacaaauggcgugggcuaucagcccuacagagugguggugcugagcuucgaacugcugcaugcuccugccacagugugcggcccuaagaaaagcaccaaucucgugaagaacaaaugcgugaacuucaacuucaacggccugaccggcaccggcgugcugacagagagcaacaagaaguuccugccauuccagcaguuuggccgggauaucgccgauaccacagacgccguuagagauccccagacacuggaaauccuggacaucaccccaugcagcuucggcggagugucugugaucaccccuggcaccaacaccagcaaucagguggcagugcuguaccagggcgugaacuguaccgaagugcccguggccauucacgccgaucagcugacaccuacauggcggguguacuccaccggcagcaauguguuucagaccagagccggcugucugaucggagccgagcacgugaacaauagcuacgagugcgacauccccaucggcgcuggcaucugugccagcuaccagacacagacaaacagccccagacgggcuagaagcguggccagccagagcaucauugccuacacaaugucucugggcgccgagaacagcguggccuacuccaacaacucuaucgcuauccccaccaacuucaccaucagcgugaccaccgagauccugccuguguccaugaccaagaccagcguggacugcaccauguacaucugcggcgauuccaccgagugcuccaaccugcugcugcaguacggcagcuucugcacccagcugaauagagcccugacagggaucgccguggaacaggacaagaacacccaagagguguucgcccaagugaagcaaaucuacaagaccccuccuaucaaggacuucggcggcuucaauuucagccagauucugcccgauccuagcaagcccagcaagcggagcuucaucgaggaccugcuguucaacaaagugacacuggccgacgccggcuucaucaagcaguauggcgauugucugggcgacauugccgccagggaucugauuugcgcccagaaguuuaacggacugacagugcugccuccucugcugaccgaugagaugaucgcccaguacacaucugcccugcuggccggcacaaucacaagcggcuggacauuuggagcuggcgccgcucugcagauccccuuugcuaugcagauggccuaccgguucaacggcaucggagugacccagaaugugcuguacgagaaccagaagcugaucgccaaccaguucaacagcgccaucggcaagauccaggacagccugagcagcacagcaagcgcccugggaaagcugcaggacguggucaaccagaaugcccaggcacugaacacccuggucaagcagcuguccuccaacuucggcgccaucagcucugugcugaacgauauccugagcagacuggacccuccugaggccgaggugcagaucgacagacugaucacaggcagacugcagagccuccagacauacgugacccagcagcugaucagagccgccgagauuagagccucugccaaucuggccgccaccaagaugucugagugugugcugggccagagcaagagaguggacuuuugcggcaagggcuaccaccugaugagcuucccucagucugccccucacggcgugguguuucugcacgugacauaugugcccgcucaagagaagaauuucaccaccgcuccagccaucugccacgacggcaaagcccacuuuccuagagaaggcguguucguguccaacggcacccauugguucgugacacagcggaacuucuacgagccccagaucaucaccaccgacaacaccuucgugucuggcaacugcgacguugugaucggcauugugaacaauaccguguacgacccucugcagcccgagcuggacagcuucaaagaggaacuggacaaguacuuuaagaaccacacaagccccgacguggaccugggcgauaucagcggaaucaaugccagcgucgugaacauccagaaagagaucgaccggcugaacgagguggccaagaaucugaacgagagccugaucgaccugcaagaacuggggaaguacgagcaguacaucaaguggcccugguacaucuggcugggcuuuaucgccggacugauugccaucgugauggucacaaucaugcuguguugcaugaccagcugcuguagcugccugaagggcuguuguagcuguggcagcugcugcaaguucgacgaggacgauucugagcccgugcugaagggcgugaaacugcacuacaccugaggacuaguuauaagacugacuagcccgaugggccucccaacgggcccuccuccccuccuugcaccgagauuaauaaaaaaaaaaaaaaaaaaaaaaaaaaaaaaaaaaaaaaaaaaaaaaaaaaaaaaaaaaaaaaaaaaaaaaaaaaaaaaaaaaaaaaaaaaaaaaaaaaaa

SEQ ID NO: 25585 - RNA, 4011 nt, Artificial Sequence
  SARS-CoV-2/Wuhan/WIV05/2019__EPI_ISL_402128 spike protein mRNA gc mod (1-1273)(K986P_V987P_K986P_V987P_L18F_T20N_P26S_D138Y_R190S_K417T _E484K_N501Y_D614G_H655Y_T1027I)
aggagaaagcuuaccauguucguguuucuggugcugcugccccugguguccagccagugugugaacuucaccaacagaacacagcugccuagcgccuacaccaacagcuucaccagaggcguguacuaccccgacaagguguucagauccagcgugcugcacucuacccaggaccuguuccugccuuucuucagcaacgugaccugguuccacgccauccacguguccggcaccaauggcaccaagagauucgacaaccccgugcugcccuucaacgacgggguguacuuugccagcaccgagaaguccaacaucaucagaggcuggaucuucggcaccacacuggacagcaagacccagagccugcugaucgugaacaacgccaccaacguggucaucaaagugugcgaguuccaguucugcaacuaccccuuccugggcgucuacuaccacaagaacaacaagagcuggauggaaagcgaguuccggguguacagcagcgccaacaacugcaccuucgaguacgugucccagccuuuccugauggaccuggaaggcaagcagggcaacuucaagaaccugagcgaguucguguucaagaacaucgacggcuacuucaaaaucuacagcaagcacaccccuaucaaccucgugcgggaucugccucagggcuucucugcucuggaaccccugguggaucugcccaucggcaucaacaucacccgguuucagacacugcuggcccugcacagaagcuaccugacaccuggcgauagcagcagcggauggacagcuggugccgccgcuuacuaugugggcuaccugcagccuagaaccuuccugcugaaguacaacgagaacggcaccaucaccgacgccguggauugugcucuggauccucugagcgagacaaagugcacccugaaguccuucaccguggaaaagggcaucuaccagaccagcaacuuccgggugcagcccaccgaauccaucgugcgguuccccaauaucaccaaucugugccccuucggcgagguguucaaugccaccagauucgccucuguguacgccuggaaccggaagcggaucagcaauugcguggccgacuacuccgugcuguacaacuccgccagcuucagcaccuucaagugcuacggcguguccccuaccaagcugaacgaccugugcuucacaaacguguacgccgacagcuucgugauccggggagaugaagugcggcagauugccccuggacagacaggcaccaucgccgacuacaacuacaagcugcccgacgacuucaccggcugugugauugccuggaacagcaacaaccuggacuccaaagucggcggcaacuacaauuaccuguaccggcuguuccggaaguccaaucugaagcccuucgagcgggacaucagcaccgaaaucuaucaggccggcagcaccccuugcaacggcgugaagggcuucaacugcuacuucccacugcaguccuacggcuuucagcccacauacggcgugggcuaucagcccuacagagugguggugcugagcuucgaacugcugcaugcuccugccacagugugcggcccuaagaaaagcaccaaucucgugaagaacaaaugcgugaacuucaacuucaacggccugaccggcaccggcgugcugacagagagcaacaagaaguuccugccauuccagcaguuuggccgggauaucgccgauaccacagacgccguuagagauccccagacacuggaaauccuggacaucaccccaugcagcuucggcggagugucugugaucaccccuggcaccaacaccagcaaucagguggcagugcuguaccagggcgugaacuguaccgaagugcccguggccauucacgccgaucagcugacaccuacauggcggguguacuccaccggcagcaauguguuucagaccagagccggcugucugaucggagccgaguacgugaacaauagcuacgagugcgacauccccaucggcgcuggcaucugugccagcuaccagacacagacaaacagccccagacgggcuagaagcguggccagccagagcaucauugccuacacaaugucucugggcgccgagaacagcguggccuacuccaacaacucuaucgcuauccccaccaacuucaccaucagcgugaccaccgagauccugccuguguccaugaccaagaccagcguggacugcaccauguacaucugcggcgauuccaccgagugcuccaaccugcugcugcaguacggcagcuucugcacccagcugaauagagcccugacagggaucgccguggaacaggacaagaacacccaagagguguucgcccaagugaagcaaaucuacaagaccccuccuaucaaggacuucggcggcuucaauuucagccagauucugcccgauccuagcaagcccagcaagcggagcuucaucgaggaccugcuguucaacaaagugacacuggccgacgccggcuucaucaagcaguauggcgauugucugggcgacauugccgccagggaucugauuugcgcccagaaguuuaacggacugacagugcugccuccucugcugaccgaugagaugaucgcccaguacacaucugcccugcuggccggcacaaucacaagcggcuggacauuuggagcuggcgccgcucugcagauccccuuugcuaugcagauggccuaccgguucaacggcaucggagugacccagaaugugcuguacgagaaccagaagcugaucgccaaccaguucaacagcgccaucggcaagauccaggacagccugagcagcacagcaagcgcccugggaaagcugcaggacguggucaaccagaaugcccaggcacugaacacccuggucaagcagcuguccuccaacuucggcgccaucagcucugugcugaacgauauccugagcagacuggacccuccugaggccgaggugcagaucgacagacugaucacaggcagacugcagagccuccagacauacgugacccagcagcugaucagagccgccgagauuagagccucugccaaucuggccgccaucaagaugucugagugugugcugggccagagcaagagaguggacuuuugcggcaagggcuaccaccugaugagcuucccucagucugccccucacggcgugguguuucugcacgugacauaugugcccgcucaagagaagaauuucaccaccgcuccagccaucugccacgacggcaaagcccacuuuccuagagaaggcguguucguguccaacggcacccauugguucgugacacagcggaacuucuacgagccccagaucaucaccaccgacaacaccuucgugucuggcaacugcgacguugugaucggcauugugaacaauaccguguacgacccucugcagcccgagcuggacagcuucaaagaggaacuggacaaguacuuuaagaaccacacaagccccgacguggaccugggcgauaucagcggaaucaaugccagcgucgugaacauccagaaagagaucgaccggcugaacgagguggccaagaaucugaacgagagccugaucgaccugcaagaacuggggaaguacgagcaguacaucaaguggcccugguacaucuggcugggcuuuaucgccggacugauugccaucgugauggucacaaucaugcuguguugcaugaccagcugcuguagcugccugaagggcuguuguagcuguggcagcugcugcaaguucgacgaggacgauucugagcccgugcugaagggcgugaaacugcacuacaccugaggacuaguuauaagacugacuagcccgaugggccucccaacgggcccuccuccccuccuugcaccgagauuaauaaaaaaaaaaaaaaaaaaaaaaaaaaaaaaaaaaaaaaaaaaaaaaaaaaaaaaaaaaaaaaaaaaaaaaaaaaaaaaaaaaaaaaaaaaaaaaaaaaaa

SEQ ID NO: 25586 - RNA, 4011 nt, Artificial Sequence
  SARS-CoV-2/Wuhan/WIV05/2019__EPI_ISL_402128 spike protein mRNA gc mod (1-1273)(K986P_V987P_K986P_V987P_S13I_W152C_L452R_D614G)
aggagaaagcuuaccauguucguguuucuggugcugcugccccugguguccauccagugugugaaccugaccaccagaacacagcugccuccagccuacaccaacagcuucaccagaggcguguacuaccccgacaagguguucagauccagcgugcugcacucuacccaggaccuguuccugccuuucuucagcaacgugaccugguuccacgccauccacguguccggcaccaauggcaccaagagauucgacaaccccgugcugcccuucaacgacgggguguacuuugccagcaccgagaaguccaacaucaucagaggcuggaucuucggcaccacacuggacagcaagacccagagccugcugaucgugaacaacgccaccaacguggucaucaaagugugcgaguuccaguucugcaacgaccccuuccugggcgucuacuaccacaagaacaacaagagcugcauggaaagcgaguuccggguguacagcagcgccaacaacugcaccuucgaguacgugucccagccuuuccugauggaccuggaaggcaagcagggcaacuucaagaaccugcgcgaguucguguucaagaacaucgacggcuacuucaaaaucuacagcaagcacaccccuaucaaccucgugcgggaucugccucagggcuucucugcucuggaaccccugguggaucugcccaucggcaucaacaucacccgguuucagacacugcuggcccugcacagaagcuaccugacaccuggcgauagcagcagcggauggacagcuggugccgccgcuuacuaugugggcuaccugcagccuagaaccuuccugcugaaguacaacgagaacggcaccaucaccgacgccguggauugugcucuggauccucugagcgagacaaagugcacccugaaguccuucaccguggaaaagggcaucuaccagaccagcaacuuccgggugcagcccaccgaauccaucgugcgguuccccaauaucaccaaucugugccccuucggcgagguguucaaugccaccagauucgccucuguguacgccuggaaccggaagcggaucagcaauugcguggccgacuacuccgugcuguacaacuccgccagcuucagcaccuucaagugcuacggcguguccccuaccaagcugaacgaccugugcuucacaaacguguacgccgacagcuucgugauccggggagaugaagugcggcagauugccccuggacagacaggcaagaucgccgacuacaacuacaagcugcccgacgacuucaccggcugugugauugccuggaacagcaacaaccuggacuccaaagucggcggcaacuacaauuaccgcuaccggcuguuccggaaguccaaucugaagcccuucgagcgggacaucagcaccgaaaucuaucaggccggcagcaccccuugcaacggcguggaaggcuucaacugcuacuucccacugcaguccuacggcuuucagcccacaaauggcgugggcuaucagcccuacagagugguggugcugagcuucgaacugcugcaugcuccugccacagugugcggcccuaagaaaagcaccaaucucgugaagaacaaaugcgugaacuucaacuucaacggccugaccggcaccggcgugcugacagagagcaacaagaaguuccugccauuccagcaguuuggccgggauaucgccgauaccacagacgccguuagagauccccagacacuggaaauccuggacaucaccccaugcagcuucggcggagugucugugaucaccccuggcaccaacaccagcaaucagguggcagugcuguaccagggcgugaacuguaccgaagugcccguggccauucacgccgaucagcugacaccuacauggcggguguacuccaccggcagcaauguguuucagaccagagccggcugucugaucggagccgagcacgugaacaauagcuacgagugcgacauccccaucggcgcuggcaucugugccagcuaccagacacagacaaacagccccagacgggcuagaagcguggccagccagagcaucauugccuacacaaugucucugggcgccgagaacagcguggccuacuccaacaacucuaucgcuauccccaccaacuucaccaucagcgugaccaccgagauccugccuguguccaugaccaagaccagcguggacugcaccauguacaucugcggcgauuccaccgagugcuccaaccugcugcugcaguacggcagcuucugcacccagcugaauagagcccugacagggaucgccguggaacaggacaagaacacccaagagguguucgcccaagugaagcaaaucuacaagaccccuccuaucaaggacuucggcggcuucaauuucagccagauucugcccgauccuagcaagcccagcaagcggagcuucaucgaggaccugcuguucaacaaagugacacuggccgacgccggcuucaucaagcaguauggcgauugucugggcgacauugccgccagggaucugauuugcgcccagaaguuuaacggacugacagugcugccuccucugcugaccgaugagaugaucgcccaguacacaucugcccugcuggccggcacaaucacaagcggcuggacauuuggagcuggcgccgcucugcagauccccuuugcuaugcagauggccuaccgguucaacggcaucggagugacccagaaugugcuguacgagaaccagaagcugaucgccaaccaguucaacagcgccaucggcaagauccaggacagccugagcagcacagcaagcgcccugggaaagcugcaggacguggucaaccagaaugcccaggcacugaacacccuggucaagcagcuguccuccaacuucggcgccaucagcucugugcugaacgauauccugagcagacuggacccuccugaggccgaggugcagaucgacagacugaucacaggcagacugcagagccuccagacauacgugacccagcagcugaucagagccgccgagauuagagccucugccaaucuggccgccaccaagaugucugagugugugcugggccagagcaagagaguggacuuuugcggcaagggcuaccaccugaugagcuucccucagucugccccucacggcgugguguuucugcacgugacauaugugcccgcucaagagaagaauuucaccaccgcuccagccaucugccacgacggcaaagcccacuuuccuagagaaggcguguucguguccaacggcacccauugguucgugacacagcggaacuucuacgagccccagaucaucaccaccgacaacaccuucgugucuggcaacugcgacguugugaucggcauugugaacaauaccguguacgacccucugcagcccgagcuggacagcuucaaagaggaacuggacaaguacuuuaagaaccacacaagccccgacguggaccugggcgauaucagcggaaucaaugccagcgucgugaacauccagaaagagaucgaccggcugaacgagguggccaagaaucugaacgagagccugaucgaccugcaagaacuggggaaguacgagcaguacaucaaguggcccugguacaucuggcugggcuuuaucgccggacugauugccaucgugauggucacaaucaugcuguguugcaugaccagcugcuguagcugccugaagggcuguuguagcuguggcagcugcugcaaguucgacgaggacgauucugagcccgugcugaagggcgugaaacugcacuacaccugaggacuaguuauaagacugacuagcccgaugggccucccaacgggcccuccuccccuccuugcaccgagauuaauaaaaaaaaaaaaaaaaaaaaaaaaaaaaaaaaaaaaaaaaaaaaaaaaaaaaaaaaaaaaaaaaaaaaaaaaaaaaaaaaaaaaaaaaaaaaaaaaaaaa

SEQ ID NO: 25587 - RNA, 4011 nt, Artificial Sequence
  SARS-CoV-2/Wuhan/WIV05/2019__EPI_ISL_402128 spike protein mRNA gc mod (1-1273)(K986P_V987P)
aggagaaagcuuaccauguucguguuccuggugcugcugccucugguguccagccagugugugaaccugaccaccagaacacagcugccuccagccuacaccaacagcuuuaccagaggcguguacuaccccgacaagguguucagauccagcgugcugcacucuacccaggaccuguuccugccuuucuucagcaacgugaccugguuccacgccauccacguguccggcaccaauggcaccaagagauucgacaaccccgugcugcccuucaacgacgggguguacuuugccagcaccgagaaguccaacaucaucagaggcuggaucuucggcaccacacuggacagcaagacccagagccugcugaucgugaacaacgccaccaacguggucaucaaagugugcgaguuccaguucugcaacgaccccuuccugggcgucuacuaccacaagaacaacaagagcuggauggaaagcgaguuccggguguacagcagcgccaacaacugcaccuucgaguacgugucccagccuuuccugauggaccuggaaggcaagcagggcaacuucaagaaccugcgcgaguucguguuuaagaacaucgacggcuacuucaagaucuacagcaagcacaccccuaucaaccucgugcgggaucugccucagggcuucucugcucuggaaccccugguggaucugcccaucggcaucaacaucacccgguuucagacacugcuggcccugcacagaagcuaccugacaccuggcgauagcagcagcggauggacagcuggugccgccgcuuacuaugugggcuaccugcagccuagaaccuuccugcugaaguacaacgagaacggcaccaucaccgacgccguggauugugcucuggauccucugagcgagacaaagugcacccugaaguccuucaccguggaaaagggcaucuaccagaccagcaacuuccgggugcagcccaccgaauccaucgugcgguuccccaauaucaccaaucugugccccuucggcgagguguucaaugccaccagauucgccucuguguacgccuggaaccggaagcggaucagcaauugcguggccgacuacuccgugcuguacaacuccgccagcuucagcaccuucaagugcuacggcguguccccuaccaagcugaacgaccugugcuucacaaacguguacgccgacagcuucgugauccggggagaugaagugcggcagauugccccuggacagacaggcaagaucgccgacuacaacuacaagcugcccgacgacuucaccggcugugugauugccuggaacagcaacaaccuggacuccaaagucggcggcaacuacaauuaccuguaccggcuguuccggaaguccaaucugaagcccuucgagcgggacaucuccaccgagaucuaucaggccggcagcaccccuuguaacggcguggaaggcuucaacugcuacuucccacugcaguccuacggcuuucagcccacaaauggcgugggcuaucagcccuacagagugguggugcugagcuucgaacugcugcaugccccugccacagugugcggcccuaagaaaagcaccaaucucgugaagaacaaaugcgugaacuucaacuucaacggccugaccggcaccggcgugcugacagagagcaacaagaaguuccugccauuccagcaguuuggccgggauaucgccgauaccacagacgccguuagagauccccagacacuggaaauccuggacaucaccccuugcagcuucggcggagugucugugaucaccccuggcaccaacaccagcaaucagguggcagugcuguaccaggacgugaacuguaccgaagugcccguggccauucacgccgaucagcugacaccuacauggcggguguacuccaccggcagcaauguguuucagaccagagccggcugucugaucggagccgagcacgugaacaauagcuacgagugcgacauccccaucggcgcuggaaucugcgccagcuaccagacacagacaaacagcccucggagagccagaagcguggccagccagagcaucauugccuacacaaugucucugggcgccgagaacagcguggccuacuccaacaacucuaucgcuauccccaccaacuucaccaucagcgugaccacagagauccugccuguguccaugaccaagaccagcguggacugcaccauguacaucugcggcgauuccaccgagugcuccaaccugcugcugcaguacggcagcuucugcacccagcugaauagagcccugacagggaucgccguggaacaggacaagaacacccaagagguguucgcccaagugaagcagaucuacaagaccccuccuaucaaggacuucggcggcuucaauuucagccagauucugcccgauccuagcaagcccagcaagcggagcuucaucgaggaccugcuguucaacaaagugacacuggccgacgccggcuucaucaagcaguauggcgauugucugggcgacauugccgccagggaucugauuugcgcccagaaguuuaacggacugacagugcugccuccucugcugaccgaugagaugaucgcccaguacacaucugcccugcuggccggcacaaucacaagcggcuggacauuuggagcaggcgccgcucugcagauccccuuugcuaugcagauggccuaccgguucaacggcaucggagugacccagaaugugcuguacgagaaccagaagcugaucgccaaccaguucaacagcgccaucggcaagauccaggacagccugagcagcacagcaagcgcccugggaaagcugcaggacguggucaaccagaaugcccaggcacugaacacccuggucaagcagcuguccuccaacuucggcgccaucagcucugugcugaacgauauccugagcagacuggacccuccugaggccgaggugcagaucgacagacugaucacaggcagacugcagagccuccagacauacgugacccagcagcugaucagagccgccgagauuagagccucugccaaucuggccgccaccaagaugucugagugugugcugggccagagcaagagaguggacuuuugcggcaagggcuaccaccugaugagcuucccucagucugccccucacggcgugguguuucugcacgugacauaugugcccgcucaagagaagaauuucaccaccgcuccagccaucugccacgacggcaaagcccacuuuccuagagaaggcguguucguguccaacggcacccauugguucgugacacagcggaacuucuacgagccccagaucaucaccaccgacaacaccuucgugucuggcaacugcgacgucgugaucggcauugugaacaauaccguguacgacccucugcagcccgagcuggacagcuucaaagaggaacuggacaaguacuuuaagaaccacacaagccccgacguggaccugggcgauaucagcggaaucaaugccagcgucgugaacauccagaaagagaucgaccggcugaacgagguggccaagaaucugaacgagagccugaucgaccugcaagaacuggggaaguacgagcaguacaucaaguggcccugguacaucuggcugggcuuuaucgccggacugauugccaucgugauggucacaaucaugcuguguugcaugaccagcugcuguagcugccugaagggcuguuguagcuguggcagcugcugcaaguucgacgaggacgauucugagcccgugcugaagggcgugaaacugcacuacacaugaggacuaguuauaagacugacuagcccgaugggccucccaacgggcccuccuccccuccuugcaccgagauuaauaaaaaaaaaaaaaaaaaaaaaaaaaaaaaaaaaaaaaaaaaaaaaaaaaaaaaaaaaaaaaaaaaaaaaaaaaaaaaaaaaaaaaaaaaaaaaaaaaaaa

SEQ ID NO: 25588 - RNA, 4011 nt, Artificial Sequence
  SARS-CoV-2/Wuhan/WIV05/2019__EPI_ISL_402128 spike protein mRNA gc mod (1-1273)(K986P_V987P_ D614G)
aggagaaagcuuaccauguucguguuccuggugcugcugccucugguguccagccagugugugaaccugaccaccagaacacagcugccuccagccuacaccaacagcuuuaccagaggcguguacuaccccgacaagguguucagauccagcgugcugcacucuacccaggaccuguuccugccuuucuucagcaacgugaccugguuccacgccauccacguguccggcaccaauggcaccaagagauucgacaaccccgugcugcccuucaacgacgggguguacuuugccagcaccgagaaguccaacaucaucagaggcuggaucuucggcaccacacuggacagcaagacccagagccugcugaucgugaacaacgccaccaacguggucaucaaagugugcgaguuccaguucugcaacgaccccuuccugggcgucuacuaccacaagaacaacaagagcuggauggaaagcgaguuccggguguacagcagcgccaacaacugcaccuucgaguacgugucccagccuuuccugauggaccuggaaggcaagcagggcaacuucaagaaccugcgcgaguucguguuuaagaacaucgacggcuacuucaagaucuacagcaagcacaccccuaucaaccucgugcgggaucugccucagggcuucucugcucuggaaccccugguggaucugcccaucggcaucaacaucacccgguuucagacacugcuggcccugcacagaagcuaccugacaccuggcgauagcagcagcggauggacagcuggugccgccgcuuacuaugugggcuaccugcagccuagaaccuuccugcugaaguacaacgagaacggcaccaucaccgacgccguggauugugcucuggauccucugagcgagacaaagugcacccugaaguccuucaccguggaaaagggcaucuaccagaccagcaacuuccgggugcagcccaccgaauccaucgugcgguuccccaauaucaccaaucugugccccuucggcgagguguucaaugccaccagauucgccucuguguacgccuggaaccggaagcggaucagcaauugcguggccgacuacuccgugcuguacaacuccgccagcuucagcaccuucaagugcuacggcguguccccuaccaagcugaacgaccugugcuucacaaacguguacgccgacagcuucgugauccggggagaugaagugcggcagauugccccuggacagacaggcaagaucgccgacuacaacuacaagcugcccgacgacuucaccggcugugugauugccuggaacagcaacaaccuggacuccaaagucggcggcaacuacaauuaccuguaccggcuguuccggaaguccaaucugaagcccuucgagcgggacaucuccaccgagaucuaucaggccggcagcaccccuuguaacggcguggaaggcuucaacugcuacuucccacugcaguccuacggcuuucagcccacaaauggcgugggcuaucagcccuacagagugguggugcugagcuucgaacugcugcaugccccugccacagugugcggcccuaagaaaagcaccaaucucgugaagaacaaaugcgugaacuucaacuucaacggccugaccggcaccggcgugcugacagagagcaacaagaaguuccugccauuccagcaguuuggccgggauaucgccgauaccacagacgccguuagagauccccagacacuggaaauccuggacaucaccccuugcagcuucggcggagugucugugaucaccccuggcaccaacaccagcaaucagguggcagugcuguaccagggcgugaacuguaccgaagugcccguggccauucacgccgaucagcugacaccuacauggcggguguacuccaccggcagcaauguguuucagaccagagccggcugucugaucggagccgagcacgugaacaauagcuacgagugcgacauccccaucggcgcuggaaucugcgccagcuaccagacacagacaaacagcccucggagagccagaagcguggccagccagagcaucauugccuacacaaugucucugggcgccgagaacagcguggccuacuccaacaacucuaucgcuauccccaccaacuucaccaucagcgugaccacagagauccugccuguguccaugaccaagaccagcguggacugcaccauguacaucugcggcgauuccaccgagugcuccaaccugcugcugcaguacggcagcuucugcacccagcugaauagagcccugacagggaucgccguggaacaggacaagaacacccaagagguguucgcccaagugaagcagaucuacaagaccccuccuaucaaggacuucggcggcuucaauuucagccagauucugcccgauccuagcaagcccagcaagcggagcuucaucgaggaccugcuguucaacaaagugacacuggccgacgccggcuucaucaagcaguauggcgauugucugggcgacauugccgccagggaucugauuugcgcccagaaguuuaacggacugacagugcugccuccucugcugaccgaugagaugaucgcccaguacacaucugcccugcuggccggcacaaucacaagcggcuggacauuuggagcaggcgccgcucugcagauccccuuugcuaugcagauggccuaccgguucaacggcaucggagugacccagaaugugcuguacgagaaccagaagcugaucgccaaccaguucaacagcgccaucggcaagauccaggacagccugagcagcacagcaagcgcccugggaaagcugcaggacguggucaaccagaaugcccaggcacugaacacccuggucaagcagcuguccuccaacuucggcgccaucagcucugugcugaacgauauccugagcagacuggacccuccugaggccgaggugcagaucgacagacugaucacaggcagacugcagagccuccagacauacgugacccagcagcugaucagagccgccgagauuagagccucugccaaucuggccgccaccaagaugucugagugugugcugggccagagcaagagaguggacuuuugcggcaagggcuaccaccugaugagcuucccucagucugccccucacggcgugguguuucugcacgugacauaugugcccgcucaagagaagaauuucaccaccgcuccagccaucugccacgacggcaaagcccacuuuccuagagaaggcguguucguguccaacggcacccauugguucgugacacagcggaacuucuacgagccccagaucaucaccaccgacaacaccuucgugucuggcaacugcgacgucgugaucggcauugugaacaauaccguguacgacccucugcagcccgagcuggacagcuucaaagaggaacuggacaaguacuuuaagaaccacacaagccccgacguggaccugggcgauaucagcggaaucaaugccagcgucgugaacauccagaaagagaucgaccggcugaacgagguggccaagaaucugaacgagagccugaucgaccugcaagaacuggggaaguacgagcaguacaucaaguggcccugguacaucuggcugggcuuuaucgccggacugauugccaucgugauggucacaaucaugcuguguugcaugaccagcugcuguagcugccugaagggcuguuguagcuguggcagcugcugcaaguucgacgaggacgauucugagcccgugcugaagggcgugaaacugcacuacacaugaggacuaguuauaagacugacuagcccgaugggccucccaacgggcccuccuccccuccuugcaccgagauuaauaaaaaaaaaaaaaaaaaaaaaaaaaaaaaaaaaaaaaaaaaaaaaaaaaaaaaaaaaaaaaaaaaaaaaaaaaaaaaaaaaaaaaaaaaaaaaaaaaaaa

SEQ ID NO: 25589 - RNA, 4011 nt, Artificial Sequence
  SARS-CoV-2/Wuhan/WIV05/2019__EPI_ISL_402128 spike protein mRNA gc mod (1-1273)(K986P_V987P_A222V_D614G)
aggagaaagcuuaccauguucguguuccuggugcugcugccucugguguccagccagugugugaaccugaccaccagaacacagcugccuccagccuacaccaacagcuuuaccagaggcguguacuaccccgacaagguguucagauccagcgugcugcacucuacccaggaccuguuccugccuuucuucagcaacgugaccugguuccacgccauccacguguccggcaccaauggcaccaagagauucgacaaccccgugcugcccuucaacgacgggguguacuuugccagcaccgagaaguccaacaucaucagaggcuggaucuucggcaccacacuggacagcaagacccagagccugcugaucgugaacaacgccaccaacguggucaucaaagugugcgaguuccaguucugcaacgaccccuuccugggcgucuacuaccacaagaacaacaagagcuggauggaaagcgaguuccggguguacagcagcgccaacaacugcaccuucgaguacgugucccagccuuuccugauggaccuggaaggcaagcagggcaacuucaagaaccugcgcgaguucguguuuaagaacaucgacggcuacuucaagaucuacagcaagcacaccccuaucaaccucgugcgggaucugccucagggcuucucugugcuggaaccccugguggaucugcccaucggcaucaacaucacccgguuucagacacugcuggcccugcacagaagcuaccugacaccuggcgauagcagcagcggauggacagcuggugccgccgcuuacuaugugggcuaccugcagccuagaaccuuccugcugaaguacaacgagaacggcaccaucaccgacgccguggauugugcucuggauccucugagcgagacaaagugcacccugaaguccuucaccguggaaaagggcaucuaccagaccagcaacuuccgggugcagcccaccgaauccaucgugcgguuccccaauaucaccaaucugugccccuucggcgagguguucaaugccaccagauucgccucuguguacgccuggaaccggaagcggaucagcaauugcguggccgacuacuccgugcuguacaacuccgccagcuucagcaccuucaagugcuacggcguguccccuaccaagcugaacgaccugugcuucacaaacguguacgccgacagcuucgugauccggggagaugaagugcggcagauugccccuggacagacaggcaagaucgccgacuacaacuacaagcugcccgacgacuucaccggcugugugauugccuggaacagcaacaaccuggacuccaaagucggcggcaacuacaauuaccuguaccggcuguuccggaaguccaaucugaagcccuucgagcgggacaucuccaccgagaucuaucaggccggcagcaccccuuguaacggcguggaaggcuucaacugcuacuucccacugcaguccuacggcuuucagcccacaaauggcgugggcuaucagcccuacagagugguggugcugagcuucgaacugcugcaugccccugccacagugugcggcccuaagaaaagcaccaaucucgugaagaacaaaugcgugaacuucaacuucaacggccugaccggcaccggcgugcugacagagagcaacaagaaguuccugccauuccagcaguuuggccgggauaucgccgauaccacagacgccguuagagauccccagacacuggaaauccuggacaucaccccuugcagcuucggcggagugucugugaucaccccuggcaccaacaccagcaaucagguggcagugcuguaccagggcgugaacuguaccgaagugcccguggccauucacgccgaucagcugacaccuacauggcggguguacuccaccggcagcaauguguuucagaccagagccggcugucugaucggagccgagcacgugaacaauagcuacgagugcgacauccccaucggcgcuggaaucugcgccagcuaccagacacagacaaacagcccucggagagccagaagcguggccagccagagcaucauugccuacacaaugucucugggcgccgagaacagcguggccuacuccaacaacucuaucgcuauccccaccaacuucaccaucagcgugaccacagagauccugccuguguccaugaccaagaccagcguggacugcaccauguacaucugcggcgauuccaccgagugcuccaaccugcugcugcaguacggcagcuucugcacccagcugaauagagcccugacagggaucgccguggaacaggacaagaacacccaagagguguucgcccaagugaagcagaucuacaagaccccuccuaucaaggacuucggcggcuucaauuucagccagauucugcccgauccuagcaagcccagcaagcggagcuucaucgaggaccugcuguucaacaaagugacacuggccgacgccggcuucaucaagcaguauggcgauugucugggcgacauugccgccagggaucugauuugcgcccagaaguuuaacggacugacagugcugccuccucugcugaccgaugagaugaucgcccaguacacaucugcccugcuggccggcacaaucacaagcggcuggacauuuggagcaggcgccgcucugcagauccccuuugcuaugcagauggccuaccgguucaacggcaucggagugacccagaaugugcuguacgagaaccagaagcugaucgccaaccaguucaacagcgccaucggcaagauccaggacagccugagcagcacagcaagcgcccugggaaagcugcaggacguggucaaccagaaugcccaggcacugaacacccuggucaagcagcuguccuccaacuucggcgccaucagcucugugcugaacgauauccugagcagacuggacccuccugaggccgaggugcagaucgacagacugaucacaggcagacugcagagccuccagacauacgugacccagcagcugaucagagccgccgagauuagagccucugccaaucuggccgccaccaagaugucugagugugugcugggccagagcaagagaguggacuuuugcggcaagggcuaccaccugaugagcuucccucagucugccccucacggcgugguguuucugcacgugacauaugugcccgcucaagagaagaauuucaccaccgcuccagccaucugccacgacggcaaagcccacuuuccuagagaaggcguguucguguccaacggcacccauugguucgugacacagcggaacuucuacgagccccagaucaucaccaccgacaacaccuucgugucuggcaacugcgacgucgugaucggcauugugaacaauaccguguacgacccucugcagcccgagcuggacagcuucaaagaggaacuggacaaguacuuuaagaaccacacaagccccgacguggaccugggcgauaucagcggaaucaaugccagcgucgugaacauccagaaagagaucgaccggcugaacgagguggccaagaaucugaacgagagccugaucgaccugcaagaacuggggaaguacgagcaguacaucaaguggcccugguacaucuggcugggcuuuaucgccggacugauugccaucgugauggucacaaucaugcuguguugcaugaccagcugcuguagcugccugaagggcuguuguagcuguggcagcugcugcaaguucgacgaggacgauucugagcccgugcugaagggcgugaaacugcacuacacaugaggacuaguuauaagacugacuagcccgaugggccucccaacgggcccuccuccccuccuugcaccgagauuaauaaaaaaaaaaaaaaaaaaaaaaaaaaaaaaaaaaaaaaaaaaaaaaaaaaaaaaaaaaaaaaaaaaaaaaaaaaaaaaaaaaaaaaaaaaaaaaaaaaaa

SEQ ID NO: 25590 - RNA, 4011 nt, Artificial Sequence
  SARS-CoV-2/Wuhan/WIV05/2019__EPI_ISL_402128 spike protein mRNA gc mod (1-1273)(K986P_V987P_N439K_D614G)
aggagaaagcuuaccauguucguguuccuggugcugcugccucugguguccagccagugugugaaccugaccaccagaacacagcugccuccagccuacaccaacagcuuuaccagaggcguguacuaccccgacaagguguucagauccagcgugcugcacucuacccaggaccuguuccugccuuucuucagcaacgugaccugguuccacgccauccacguguccggcaccaauggcaccaagagauucgacaaccccgugcugcccuucaacgacgggguguacuuugccagcaccgagaaguccaacaucaucagaggcuggaucuucggcaccacacuggacagcaagacccagagccugcugaucgugaacaacgccaccaacguggucaucaaagugugcgaguuccaguucugcaacgaccccuuccugggcgucuacuaccacaagaacaacaagagcuggauggaaagcgaguuccggguguacagcagcgccaacaacugcaccuucgaguacgugucccagccuuuccugauggaccuggaaggcaagcagggcaacuucaagaaccugcgcgaguucguguuuaagaacaucgacggcuacuucaagaucuacagcaagcacaccccuaucaaccucgugcgggaucugccucagggcuucucugcucuggaaccccugguggaucugcccaucggcaucaacaucacccgguuucagacacugcuggcccugcacagaagcuaccugacaccuggcgauagcagcagcggauggacagcuggugccgccgcuuacuaugugggcuaccugcagccuagaaccuuccugcugaaguacaacgagaacggcaccaucaccgacgccguggauugugcucuggauccucugagcgagacaaagugcacccugaaguccuucaccguggaaaagggcaucuaccagaccagcaacuuccgggugcagcccaccgaauccaucgugcgguuccccaauaucaccaaucugugccccuucggcgagguguucaaugccaccagauucgccucuguguacgccuggaaccggaagcggaucagcaauugcguggccgacuacuccgugcuguacaacuccgccagcuucagcaccuucaagugcuacggcguguccccuaccaagcugaacgaccugugcuucacaaacguguacgccgacagcuucgugauccggggagaugaagugcggcagauugccccuggacagacaggcaagaucgccgacuacaacuacaagcugcccgacgacuucaccggcugugugauugccuggaacagcaagaaccuggacuccaaagucggcggcaacuacaauuaccuguaccggcuguuccggaaguccaaucugaagcccuucgagcgggacaucuccaccgagaucuaucaggccggcagcaccccuuguaacggcguggaaggcuucaacugcuacuucccacugcaguccuacggcuuucagcccacaaauggcgugggcuaucagcccuacagagugguggugcugagcuucgaacugcugcaugccccugccacagugugcggcccuaagaaaagcaccaaucucgugaagaacaaaugcgugaacuucaacuucaacggccugaccggcaccggcgugcugacagagagcaacaagaaguuccugccauuccagcaguuuggccgggauaucgccgauaccacagacgccguuagagauccccagacacuggaaauccuggacaucaccccuugcagcuucggcggagugucugugaucaccccuggcaccaacaccagcaaucagguggcagugcuguaccagggcgugaacuguaccgaagugcccguggccauucacgccgaucagcugacaccuacauggcggguguacuccaccggcagcaauguguuucagaccagagccggcugucugaucggagccgagcacgugaacaauagcuacgagugcgacauccccaucggcgcuggaaucugcgccagcuaccagacacagacaaacagcccucggagagccagaagcguggccagccagagcaucauugccuacacaaugucucugggcgccgagaacagcguggccuacuccaacaacucuaucgcuauccccaccaacuucaccaucagcgugaccacagagauccugccuguguccaugaccaagaccagcguggacugcaccauguacaucugcggcgauuccaccgagugcuccaaccugcugcugcaguacggcagcuucugcacccagcugaauagagcccugacagggaucgccguggaacaggacaagaacacccaagagguguucgcccaagugaagcagaucuacaagaccccuccuaucaaggacuucggcggcuucaauuucagccagauucugcccgauccuagcaagcccagcaagcggagcuucaucgaggaccugcuguucaacaaagugacacuggccgacgccggcuucaucaagcaguauggcgauugucugggcgacauugccgccagggaucugauuugcgcccagaaguuuaacggacugacagugcugccuccucugcugaccgaugagaugaucgcccaguacacaucugcccugcuggccggcacaaucacaagcggcuggacauuuggagcaggcgccgcucugcagauccccuuugcuaugcagauggccuaccgguucaacggcaucggagugacccagaaugugcuguacgagaaccagaagcugaucgccaaccaguucaacagcgccaucggcaagauccaggacagccugagcagcacagcaagcgcccugggaaagcugcaggacguggucaaccagaaugcccaggcacugaacacccuggucaagcagcuguccuccaacuucggcgccaucagcucugugcugaacgauauccugagcagacuggacccuccugaggccgaggugcagaucgacagacugaucacaggcagacugcagagccuccagacauacgugacccagcagcugaucagagccgccgagauuagagccucugccaaucuggccgccaccaagaugucugagugugugcugggccagagcaagagaguggacuuuugcggcaagggcuaccaccugaugagcuucccucagucugccccucacggcgugguguuucugcacgugacauaugugcccgcucaagagaagaauuucaccaccgcuccagccaucugccacgacggcaaagcccacuuuccuagagaaggcguguucguguccaacggcacccauugguucgugacacagcggaacuucuacgagccccagaucaucaccaccgacaacaccuucgugucuggcaacugcgacgucgugaucggcauugugaacaauaccguguacgacccucugcagcccgagcuggacagcuucaaagaggaacuggacaaguacuuuaagaaccacacaagccccgacguggaccugggcgauaucagcggaaucaaugccagcgucgugaacauccagaaagagaucgaccggcugaacgagguggccaagaaucugaacgagagccugaucgaccugcaagaacuggggaaguacgagcaguacaucaaguggcccugguacaucuggcugggcuuuaucgccggacugauugccaucgugauggucacaaucaugcuguguugcaugaccagcugcuguagcugccugaagggcuguuguagcuguggcagcugcugcaaguucgacgaggacgauucugagcccgugcugaagggcgugaaacugcacuacacaugaggacuaguuauaagacugacuagcccgaugggccucccaacgggcccuccuccccuccuugcaccgagauuaauaaaaaaaaaaaaaaaaaaaaaaaaaaaaaaaaaaaaaaaaaaaaaaaaaaaaaaaaaaaaaaaaaaaaaaaaaaaaaaaaaaaaaaaaaaaaaaaaaaaa

SEQ ID NO: 25591 - RNA, 4011 nt, Artificial Sequence
  SARS-CoV-2/Wuhan/WIV05/2019__EPI_ISL_402128 spike protein mRNA gc mod (1-1273)(K986P_V987P_S477N_D614G)
aggagaaagcuuaccauguucguguuccuggugcugcugccucugguguccagccagugugugaaccugaccaccagaacacagcugccuccagccuacaccaacagcuuuaccagaggcguguacuaccccgacaagguguucagauccagcgugcugcacucuacccaggaccuguuccugccuuucuucagcaacgugaccugguuccacgccauccacguguccggcaccaauggcaccaagagauucgacaaccccgugcugcccuucaacgacgggguguacuuugccagcaccgagaaguccaacaucaucagaggcuggaucuucggcaccacacuggacagcaagacccagagccugcugaucgugaacaacgccaccaacguggucaucaaagugugcgaguuccaguucugcaacgaccccuuccugggcgucuacuaccacaagaacaacaagagcuggauggaaagcgaguuccggguguacagcagcgccaacaacugcaccuucgaguacgugucccagccuuuccugauggaccuggaaggcaagcagggcaacuucaagaaccugcgcgaguucguguuuaagaacaucgacggcuacuucaagaucuacagcaagcacaccccuaucaaccucgugcgggaucugccucagggcuucucugcucuggaaccccugguggaucugcccaucggcaucaacaucacccgguuucagacacugcuggcccugcacagaagcuaccugacaccuggcgauagcagcagcggauggacagcuggugccgccgcuuacuaugugggcuaccugcagccuagaaccuuccugcugaaguacaacgagaacggcaccaucaccgacgccguggauugugcucuggauccucugagcgagacaaagugcacccugaaguccuucaccguggaaaagggcaucuaccagaccagcaacuuccgggugcagcccaccgaauccaucgugcgguuccccaauaucaccaaucugugccccuucggcgagguguucaaugccaccagauucgccucuguguacgccuggaaccggaagcggaucagcaauugcguggccgacuacuccgugcuguacaacuccgccagcuucagcaccuucaagugcuacggcguguccccuaccaagcugaacgaccugugcuucacaaacguguacgccgacagcuucgugauccggggagaugaagugcggcagauugccccuggacagacaggcaagaucgccgacuacaacuacaagcugcccgacgacuucaccggcugugugauugccuggaacagcaacaaccuggacuccaaagucggcggcaacuacaauuaccuguaccggcuguuccggaaguccaaucugaagcccuucgagcgggacaucuccaccgagaucuaucaggccggcaacaccccuuguaacggcguggaaggcuucaacugcuacuucccacugcaguccuacggcuuucagcccacaaauggcgugggcuaucagcccuacagagugguggugcugagcuucgaacugcugcaugccccugccacagugugcggcccuaagaaaagcaccaaucucgugaagaacaaaugcgugaacuucaacuucaacggccugaccggcaccggcgugcugacagagagcaacaagaaguuccugccauuccagcaguuuggccgggauaucgccgauaccacagacgccguuagagauccccagacacuggaaauccuggacaucaccccuugcagcuucggcggagugucugugaucaccccuggcaccaacaccagcaaucagguggcagugcuguaccagggcgugaacuguaccgaagugcccguggccauucacgccgaucagcugacaccuacauggcggguguacuccaccggcagcaauguguuucagaccagagccggcugucugaucggagccgagcacgugaacaauagcuacgagugcgacauccccaucggcgcuggaaucugcgccagcuaccagacacagacaaacagcccucggagagccagaagcguggccagccagagcaucauugccuacacaaugucucugggcgccgagaacagcguggccuacuccaacaacucuaucgcuauccccaccaacuucaccaucagcgugaccacagagauccugccuguguccaugaccaagaccagcguggacugcaccauguacaucugcggcgauuccaccgagugcuccaaccugcugcugcaguacggcagcuucugcacccagcugaauagagcccugacagggaucgccguggaacaggacaagaacacccaagagguguucgcccaagugaagcagaucuacaagaccccuccuaucaaggacuucggcggcuucaauuucagccagauucugcccgauccuagcaagcccagcaagcggagcuucaucgaggaccugcuguucaacaaagugacacuggccgacgccggcuucaucaagcaguauggcgauugucugggcgacauugccgccagggaucugauuugcgcccagaaguuuaacggacugacagugcugccuccucugcugaccgaugagaugaucgcccaguacacaucugcccugcuggccggcacaaucacaagcggcuggacauuuggagcaggcgccgcucugcagauccccuuugcuaugcagauggccuaccgguucaacggcaucggagugacccagaaugugcuguacgagaaccagaagcugaucgccaaccaguucaacagcgccaucggcaagauccaggacagccugagcagcacagcaagcgcccugggaaagcugcaggacguggucaaccagaaugcccaggcacugaacacccuggucaagcagcuguccuccaacuucggcgccaucagcucugugcugaacgauauccugagcagacuggacccuccugaggccgaggugcagaucgacagacugaucacaggcagacugcagagccuccagacauacgugacccagcagcugaucagagccgccgagauuagagccucugccaaucuggccgccaccaagaugucugagugugugcugggccagagcaagagaguggacuuuugcggcaagggcuaccaccugaugagcuucccucagucugccccucacggcgugguguuucugcacgugacauaugugcccgcucaagagaagaauuucaccaccgcuccagccaucugccacgacggcaaagcccacuuuccuagagaaggcguguucguguccaacggcacccauugguucgugacacagcggaacuucuacgagccccagaucaucaccaccgacaacaccuucgugucuggcaacugcgacgucgugaucggcauugugaacaauaccguguacgacccucugcagcccgagcuggacagcuucaaagaggaacuggacaaguacuuuaagaaccacacaagccccgacguggaccugggcgauaucagcggaaucaaugccagcgucgugaacauccagaaagagaucgaccggcugaacgagguggccaagaaucugaacgagagccugaucgaccugcaagaacuggggaaguacgagcaguacaucaaguggcccugguacaucuggcugggcuuuaucgccggacugauugccaucgugauggucacaaucaugcuguguugcaugaccagcugcuguagcugccugaagggcuguuguagcuguggcagcugcugcaaguucgacgaggacgauucugagcccgugcugaagggcgugaaacugcacuacacaugaggacuaguuauaagacugacuagcccgaugggccucccaacgggcccuccuccccuccuugcaccgagauuaauaaaaaaaaaaaaaaaaaaaaaaaaaaaaaaaaaaaaaaaaaaaaaaaaaaaaaaaaaaaaaaaaaaaaaaaaaaaaaaaaaaaaaaaaaaaaaaaaaaaa

SEQ ID NO: 25592 - RNA, 4011 nt, Artificial Sequence
  SARS-CoV-2/Wuhan/WIV05/2019__EPI_ISL_402128 spike protein mRNA gc mod (1-1273)(K986P_V987P_N501Y_D614G)
aggagaaagcuuaccauguucguguuccuggugcugcugccucugguguccagccagugugugaaccugaccaccagaacacagcugccuccagccuacaccaacagcuuuaccagaggcguguacuaccccgacaagguguucagauccagcgugcugcacucuacccaggaccuguuccugccuuucuucagcaacgugaccugguuccacgccauccacguguccggcaccaauggcaccaagagauucgacaaccccgugcugcccuucaacgacgggguguacuuugccagcaccgagaaguccaacaucaucagaggcuggaucuucggcaccacacuggacagcaagacccagagccugcugaucgugaacaacgccaccaacguggucaucaaagugugcgaguuccaguucugcaacgaccccuuccugggcgucuacuaccacaagaacaacaagagcuggauggaaagcgaguuccggguguacagcagcgccaacaacugcaccuucgaguacgugucccagccuuuccugauggaccuggaaggcaagcagggcaacuucaagaaccugcgcgaguucguguuuaagaacaucgacggcuacuucaagaucuacagcaagcacaccccuaucaaccucgugcgggaucugccucagggcuucucugcucuggaaccccugguggaucugcccaucggcaucaacaucacccgguuucagacacugcuggcccugcacagaagcuaccugacaccuggcgauagcagcagcggauggacagcuggugccgccgcuuacuaugugggcuaccugcagccuagaaccuuccugcugaaguacaacgagaacggcaccaucaccgacgccguggauugugcucuggauccucugagcgagacaaagugcacccugaaguccuucaccguggaaaagggcaucuaccagaccagcaacuuccgggugcagcccaccgaauccaucgugcgguuccccaauaucaccaaucugugccccuucggcgagguguucaaugccaccagauucgccucuguguacgccuggaaccggaagcggaucagcaauugcguggccgacuacuccgugcuguacaacuccgccagcuucagcaccuucaagugcuacggcguguccccuaccaagcugaacgaccugugcuucacaaacguguacgccgacagcuucgugauccggggagaugaagugcggcagauugccccuggacagacaggcaagaucgccgacuacaacuacaagcugcccgacgacuucaccggcugugugauugccuggaacagcaacaaccuggacuccaaagucggcggcaacuacaauuaccuguaccggcuguuccggaaguccaaucugaagcccuucgagcgggacaucuccaccgagaucuaucaggccggcagcaccccuuguaacggcguggaaggcuucaacugcuacuucccacugcaguccuacggcuuucagcccacauacggcgugggcuaucagcccuacagagugguggugcugagcuucgaacugcugcaugccccugccacagugugcggcccuaagaaaagcaccaaucucgugaagaacaaaugcgugaacuucaacuucaacggccugaccggcaccggcgugcugacagagagcaacaagaaguuccugccauuccagcaguuuggccgggauaucgccgauaccacagacgccguuagagauccccagacacuggaaauccuggacaucaccccuugcagcuucggcggagugucugugaucaccccuggcaccaacaccagcaaucagguggcagugcuguaccagggcgugaacuguaccgaagugcccguggccauucacgccgaucagcugacaccuacauggcggguguacuccaccggcagcaauguguuucagaccagagccggcugucugaucggagccgagcacgugaacaauagcuacgagugcgacauccccaucggcgcuggaaucugcgccagcuaccagacacagacaaacagcccucggagagccagaagcguggccagccagagcaucauugccuacacaaugucucugggcgccgagaacagcguggccuacuccaacaacucuaucgcuauccccaccaacuucaccaucagcgugaccacagagauccugccuguguccaugaccaagaccagcguggacugcaccauguacaucugcggcgauuccaccgagugcuccaaccugcugcugcaguacggcagcuucugcacccagcugaauagagcccugacagggaucgccguggaacaggacaagaacacccaagagguguucgcccaagugaagcagaucuacaagaccccuccuaucaaggacuucggcggcuucaauuucagccagauucugcccgauccuagcaagcccagcaagcggagcuucaucgaggaccugcuguucaacaaagugacacuggccgacgccggcuucaucaagcaguauggcgauugucugggcgacauugccgccagggaucugauuugcgcccagaaguuuaacggacugacagugcugccuccucugcugaccgaugagaugaucgcccaguacacaucugcccugcuggccggcacaaucacaagcggcuggacauuuggagcaggcgccgcucugcagauccccuuugcuaugcagauggccuaccgguucaacggcaucggagugacccagaaugugcuguacgagaaccagaagcugaucgccaaccaguucaacagcgccaucggcaagauccaggacagccugagcagcacagcaagcgcccugggaaagcugcaggacguggucaaccagaaugcccaggcacugaacacccuggucaagcagcuguccuccaacuucggcgccaucagcucugugcugaacgauauccugagcagacuggacccuccugaggccgaggugcagaucgacagacugaucacaggcagacugcagagccuccagacauacgugacccagcagcugaucagagccgccgagauuagagccucugccaaucuggccgccaccaagaugucugagugugugcugggccagagcaagagaguggacuuuugcggcaagggcuaccaccugaugagcuucccucagucugccccucacggcgugguguuucugcacgugacauaugugcccgcucaagagaagaauuucaccaccgcuccagccaucugccacgacggcaaagcccacuuuccuagagaaggcguguucguguccaacggcacccauugguucgugacacagcggaacuucuacgagccccagaucaucaccaccgacaacaccuucgugucuggcaacugcgacgucgugaucggcauugugaacaauaccguguacgacccucugcagcccgagcuggacagcuucaaagaggaacuggacaaguacuuuaagaaccacacaagccccgacguggaccugggcgauaucagcggaaucaaugccagcgucgugaacauccagaaagagaucgaccggcugaacgagguggccaagaaucugaacgagagccugaucgaccugcaagaacuggggaaguacgagcaguacaucaaguggcccugguacaucuggcugggcuuuaucgccggacugauugccaucgugauggucacaaucaugcuguguugcaugaccagcugcuguagcugccugaagggcuguuguagcuguggcagcugcugcaaguucgacgaggacgauucugagcccgugcugaagggcgugaaacugcacuacacaugaggacuaguuauaagacugacuagcccgaugggccucccaacgggcccuccuccccuccuugcaccgagauuaauaaaaaaaaaaaaaaaaaaaaaaaaaaaaaaaaaaaaaaaaaaaaaaaaaaaaaaaaaaaaaaaaaaaaaaaaaaaaaaaaaaaaaaaaaaaaaaaaaaaa

SEQ ID NO: 25593 - RNA, 4005 nt, Artificial Sequence
  SARS-CoV-2/Wuhan/WIV05/2019__EPI_ISL_402128 spike protein mRNA gc mod (1-1273)(K986P_V987P_H69del_V70del_D614G)
aggagaaagcuuaccauguucguguuccuggugcugcugccucugguguccagccagugugugaaccugaccaccagaacacagcugccuccagccuacaccaacagcuuuaccagaggcguguacuaccccgacaagguguucagauccagcgugcugcacucuacccaggaccuguuccugccuuucuucagcaacgugaccugguuccacgccaucuccggcaccaauggcaccaagagauucgacaaccccgugcugcccuucaacgacgggguguacuuugccagcaccgagaaguccaacaucaucagaggcuggaucuucggcaccacacuggacagcaagacccagagccugcugaucgugaacaacgccaccaacguggucaucaaagugugcgaguuccaguucugcaacgaccccuuccugggcgucuacuaccacaagaacaacaagagcuggauggaaagcgaguuccggguguacagcagcgccaacaacugcaccuucgaguacgugucccagccuuuccugauggaccuggaaggcaagcagggcaacuucaagaaccugcgcgaguucguguuuaagaacaucgacggcuacuucaagaucuacagcaagcacaccccuaucaaccucgugcgggaucugccucagggcuucucugcucuggaaccccugguggaucugcccaucggcaucaacaucacccgguuucagacacugcuggcccugcacagaagcuaccugacaccuggcgauagcagcagcggauggacagcuggugccgccgcuuacuaugugggcuaccugcagccuagaaccuuccugcugaaguacaacgagaacggcaccaucaccgacgccguggauugugcucuggauccucugagcgagacaaagugcacccugaaguccuucaccguggaaaagggcaucuaccagaccagcaacuuccgggugcagcccaccgaauccaucgugcgguuccccaauaucaccaaucugugccccuucggcgagguguucaaugccaccagauucgccucuguguacgccuggaaccggaagcggaucagcaauugcguggccgacuacuccgugcuguacaacuccgccagcuucagcaccuucaagugcuacggcguguccccuaccaagcugaacgaccugugcuucacaaacguguacgccgacagcuucgugauccggggagaugaagugcggcagauugccccuggacagacaggcaagaucgccgacuacaacuacaagcugcccgacgacuucaccggcugugugauugccuggaacagcaacaaccuggacuccaaagucggcggcaacuacaauuaccuguaccggcuguuccggaaguccaaucugaagcccuucgagcgggacaucuccaccgagaucuaucaggccggcagcaccccuuguaacggcguggaaggcuucaacugcuacuucccacugcaguccuacggcuuucagcccacaaauggcgugggcuaucagcccuacagagugguggugcugagcuucgaacugcugcaugccccugccacagugugcggcccuaagaaaagcaccaaucucgugaagaacaaaugcgugaacuucaacuucaacggccugaccggcaccggcgugcugacagagagcaacaagaaguuccugccauuccagcaguuuggccgggauaucgccgauaccacagacgccguuagagauccccagacacuggaaauccuggacaucaccccuugcagcuucggcggagugucugugaucaccccuggcaccaacaccagcaaucagguggcagugcuguaccagggcgugaacuguaccgaagugcccguggccauucacgccgaucagcugacaccuacauggcggguguacuccaccggcagcaauguguuucagaccagagccggcugucugaucggagccgagcacgugaacaauagcuacgagugcgacauccccaucggcgcuggaaucugcgccagcuaccagacacagacaaacagcccucggagagccagaagcguggccagccagagcaucauugccuacacaaugucucugggcgccgagaacagcguggccuacuccaacaacucuaucgcuauccccaccaacuucaccaucagcgugaccacagagauccugccuguguccaugaccaagaccagcguggacugcaccauguacaucugcggcgauuccaccgagugcuccaaccugcugcugcaguacggcagcuucugcacccagcugaauagagcccugacagggaucgccguggaacaggacaagaacacccaagagguguucgcccaagugaagcagaucuacaagaccccuccuaucaaggacuucggcggcuucaauuucagccagauucugcccgauccuagcaagcccagcaagcggagcuucaucgaggaccugcuguucaacaaagugacacuggccgacgccggcuucaucaagcaguauggcgauugucugggcgacauugccgccagggaucugauuugcgcccagaaguuuaacggacugacagugcugccuccucugcugaccgaugagaugaucgcccaguacacaucugcccugcuggccggcacaaucacaagcggcuggacauuuggagcaggcgccgcucugcagauccccuuugcuaugcagauggccuaccgguucaacggcaucggagugacccagaaugugcuguacgagaaccagaagcugaucgccaaccaguucaacagcgccaucggcaagauccaggacagccugagcagcacagcaagcgcccugggaaagcugcaggacguggucaaccagaaugcccaggcacugaacacccuggucaagcagcuguccuccaacuucggcgccaucagcucugugcugaacgauauccugagcagacuggacccuccugaggccgaggugcagaucgacagacugaucacaggcagacugcagagccuccagacauacgugacccagcagcugaucagagccgccgagauuagagccucugccaaucuggccgccaccaagaugucugagugugugcugggccagagcaagagaguggacuuuugcggcaagggcuaccaccugaugagcuucccucagucugccccucacggcgugguguuucugcacgugacauaugugcccgcucaagagaagaauuucaccaccgcuccagccaucugccacgacggcaaagcccacuuuccuagagaaggcguguucguguccaacggcacccauugguucgugacacagcggaacuucuacgagccccagaucaucaccaccgacaacaccuucgugucuggcaacugcgacgucgugaucggcauugugaacaauaccguguacgacccucugcagcccgagcuggacagcuucaaagaggaacuggacaaguacuuuaagaaccacacaagccccgacguggaccugggcgauaucagcggaaucaaugccagcgucgugaacauccagaaagagaucgaccggcugaacgagguggccaagaaucugaacgagagccugaucgaccugcaagaacuggggaaguacgagcaguacaucaaguggcccugguacaucuggcugggcuuuaucgccggacugauugccaucgugauggucacaaucaugcuguguugcaugaccagcugcuguagcugccugaagggcuguuguagcuguggcagcugcugcaaguucgacgaggacgauucugagcccgugcugaagggcgugaaacugcacuacacaugaggacuaguuauaagacugacuagcccgaugggccucccaacgggcccuccuccccuccuugcaccgagauuaauaaaaaaaaaaaaaaaaaaaaaaaaaaaaaaaaaaaaaaaaaaaaaaaaaaaaaaaaaaaaaaaaaaaaaaaaaaaaaaaaaaaaaaaaaaaaaaaaaaaa

SEQ ID NO: 25594 - RNA, 4011 nt, Artificial Sequence
  SARS-CoV-2/Wuhan/WIV05/2019__EPI_ISL_402128 spike protein mRNA gc mod (1-1273)(K986P_V987P_Y453F_D614G)
aggagaaagcuuaccauguucguguuccuggugcugcugccucugguguccagccagugugugaaccugaccaccagaacacagcugccuccagccuacaccaacagcuuuaccagaggcguguacuaccccgacaagguguucagauccagcgugcugcacucuacccaggaccuguuccugccuuucuucagcaacgugaccugguuccacgccauccacguguccggcaccaauggcaccaagagauucgacaaccccgugcugcccuucaacgacgggguguacuuugccagcaccgagaaguccaacaucaucagaggcuggaucuucggcaccacacuggacagcaagacccagagccugcugaucgugaacaacgccaccaacguggucaucaaagugugcgaguuccaguucugcaacgaccccuuccugggcgucuacuaccacaagaacaacaagagcuggauggaaagcgaguuccggguguacagcagcgccaacaacugcaccuucgaguacgugucccagccuuuccugauggaccuggaaggcaagcagggcaacuucaagaaccugcgcgaguucguguuuaagaacaucgacggcuacuucaagaucuacagcaagcacaccccuaucaaccucgugcgggaucugccucagggcuucucugcucuggaaccccugguggaucugcccaucggcaucaacaucacccgguuucagacacugcuggcccugcacagaagcuaccugacaccuggcgauagcagcagcggauggacagcuggugccgccgcuuacuaugugggcuaccugcagccuagaaccuuccugcugaaguacaacgagaacggcaccaucaccgacgccguggauugugcucuggauccucugagcgagacaaagugcacccugaaguccuucaccguggaaaagggcaucuaccagaccagcaacuuccgggugcagcccaccgaauccaucgugcgguuccccaauaucaccaaucugugccccuucggcgagguguucaaugccaccagauucgccucuguguacgccuggaaccggaagcggaucagcaauugcguggccgacuacuccgugcuguacaacuccgccagcuucagcaccuucaagugcuacggcguguccccuaccaagcugaacgaccugugcuucacaaacguguacgccgacagcuucgugauccggggagaugaagugcggcagauugccccuggacagacaggcaagaucgccgacuacaacuacaagcugcccgacgacuucaccggcugugugauugccuggaacagcaacaaccuggacuccaaagucggcggcaacuacaauuaccuguuccggcuguuccggaaguccaaucugaagcccuucgagcgggacaucuccaccgagaucuaucaggccggcagcaccccuuguaacggcguggaaggcuucaacugcuacuucccacugcaguccuacggcuuucagcccacaaauggcgugggcuaucagcccuacagagugguggugcugagcuucgaacugcugcaugccccugccacagugugcggcccuaagaaaagcaccaaucucgugaagaacaaaugcgugaacuucaacuucaacggccugaccggcaccggcgugcugacagagagcaacaagaaguuccugccauuccagcaguuuggccgggauaucgccgauaccacagacgccguuagagauccccagacacuggaaauccuggacaucaccccuugcagcuucggcggagugucugugaucaccccuggcaccaacaccagcaaucagguggcagugcuguaccagggcgugaacuguaccgaagugcccguggccauucacgccgaucagcugacaccuacauggcggguguacuccaccggcagcaauguguuucagaccagagccggcugucugaucggagccgagcacgugaacaauagcuacgagugcgacauccccaucggcgcuggaaucugcgccagcuaccagacacagacaaacagcccucggagagccagaagcguggccagccagagcaucauugccuacacaaugucucugggcgccgagaacagcguggccuacuccaacaacucuaucgcuauccccaccaacuucaccaucagcgugaccacagagauccugccuguguccaugaccaagaccagcguggacugcaccauguacaucugcggcgauuccaccgagugcuccaaccugcugcugcaguacggcagcuucugcacccagcugaauagagcccugacagggaucgccguggaacaggacaagaacacccaagagguguucgcccaagugaagcagaucuacaagaccccuccuaucaaggacuucggcggcuucaauuucagccagauucugcccgauccuagcaagcccagcaagcggagcuucaucgaggaccugcuguucaacaaagugacacuggccgacgccggcuucaucaagcaguauggcgauugucugggcgacauugccgccagggaucugauuugcgcccagaaguuuaacggacugacagugcugccuccucugcugaccgaugagaugaucgcccaguacacaucugcccugcuggccggcacaaucacaagcggcuggacauuuggagcaggcgccgcucugcagauccccuuugcuaugcagauggccuaccgguucaacggcaucggagugacccagaaugugcuguacgagaaccagaagcugaucgccaaccaguucaacagcgccaucggcaagauccaggacagccugagcagcacagcaagcgcccugggaaagcugcaggacguggucaaccagaaugcccaggcacugaacacccuggucaagcagcuguccuccaacuucggcgccaucagcucugugcugaacgauauccugagcagacuggacccuccugaggccgaggugcagaucgacagacugaucacaggcagacugcagagccuccagacauacgugacccagcagcugaucagagccgccgagauuagagccucugccaaucuggccgccaccaagaugucugagugugugcugggccagagcaagagaguggacuuuugcggcaagggcuaccaccugaugagcuucccucagucugccccucacggcgugguguuucugcacgugacauaugugcccgcucaagagaagaauuucaccaccgcuccagccaucugccacgacggcaaagcccacuuuccuagagaaggcguguucguguccaacggcacccauugguucgugacacagcggaacuucuacgagccccagaucaucaccaccgacaacaccuucgugucuggcaacugcgacgucgugaucggcauugugaacaauaccguguacgacccucugcagcccgagcuggacagcuucaaagaggaacuggacaaguacuuuaagaaccacacaagccccgacguggaccugggcgauaucagcggaaucaaugccagcgucgugaacauccagaaagagaucgaccggcugaacgagguggccaagaaucugaacgagagccugaucgaccugcaagaacuggggaaguacgagcaguacaucaaguggcccugguacaucuggcugggcuuuaucgccggacugauugccaucgugauggucacaaucaugcuguguugcaugaccagcugcuguagcugccugaagggcuguuguagcuguggcagcugcugcaaguucgacgaggacgauucugagcccgugcugaagggcgugaaacugcacuacacaugaggacuaguuauaagacugacuagcccgaugggccucccaacgggcccuccuccccuccuugcaccgagauuaauaaaaaaaaaaaaaaaaaaaaaaaaaaaaaaaaaaaaaaaaaaaaaaaaaaaaaaaaaaaaaaaaaaaaaaaaaaaaaaaaaaaaaaaaaaaaaaaaaaaa

SEQ ID NO: 25595 - RNA, 4011 nt, Artificial Sequence
  SARS-CoV-2/Wuhan/WIV05/2019__EPI_ISL_402128 spike protein mRNA gc mod (1-1273)(K986P_V987P_D614G_I692V)
aggagaaagcuuaccauguucguguuccuggugcugcugccucugguguccagccagugugugaaccugaccaccagaacacagcugccuccagccuacaccaacagcuuuaccagaggcguguacuaccccgacaagguguucagauccagcgugcugcacucuacccaggaccuguuccugccuuucuucagcaacgugaccugguuccacgccauccacguguccggcaccaauggcaccaagagauucgacaaccccgugcugcccuucaacgacgggguguacuuugccagcaccgagaaguccaacaucaucagaggcuggaucuucggcaccacacuggacagcaagacccagagccugcugaucgugaacaacgccaccaacguggucaucaaagugugcgaguuccaguucugcaacgaccccuuccugggcgucuacuaccacaagaacaacaagagcuggauggaaagcgaguuccggguguacagcagcgccaacaacugcaccuucgaguacgugucccagccuuuccugauggaccuggaaggcaagcagggcaacuucaagaaccugcgcgaguucguguuuaagaacaucgacggcuacuucaagaucuacagcaagcacaccccuaucaaccucgugcgggaucugccucagggcuucucugcucuggaaccccugguggaucugcccaucggcaucaacaucacccgguuucagacacugcuggcccugcacagaagcuaccugacaccuggcgauagcagcagcggauggacagcuggugccgccgcuuacuaugugggcuaccugcagccuagaaccuuccugcugaaguacaacgagaacggcaccaucaccgacgccguggauugugcucuggauccucugagcgagacaaagugcacccugaaguccuucaccguggaaaagggcaucuaccagaccagcaacuuccgggugcagcccaccgaauccaucgugcgguuccccaauaucaccaaucugugccccuucggcgagguguucaaugccaccagauucgccucuguguacgccuggaaccggaagcggaucagcaauugcguggccgacuacuccgugcuguacaacuccgccagcuucagcaccuucaagugcuacggcguguccccuaccaagcugaacgaccugugcuucacaaacguguacgccgacagcuucgugauccggggagaugaagugcggcagauugccccuggacagacaggcaagaucgccgacuacaacuacaagcugcccgacgacuucaccggcugugugauugccuggaacagcaacaaccuggacuccaaagucggcggcaacuacaauuaccuguaccggcuguuccggaaguccaaucugaagcccuucgagcgggacaucuccaccgagaucuaucaggccggcagcaccccuuguaacggcguggaaggcuucaacugcuacuucccacugcaguccuacggcuuucagcccacaaauggcgugggcuaucagcccuacagagugguggugcugagcuucgaacugcugcaugccccugccacagugugcggcccuaagaaaagcaccaaucucgugaagaacaaaugcgugaacuucaacuucaacggccugaccggcaccggcgugcugacagagagcaacaagaaguuccugccauuccagcaguuuggccgggauaucgccgauaccacagacgccguuagagauccccagacacuggaaauccuggacaucaccccuugcagcuucggcggagugucugugaucaccccuggcaccaacaccagcaaucagguggcagugcuguaccagggcgugaacuguaccgaagugcccguggccauucacgccgaucagcugacaccuacauggcggguguacuccaccggcagcaauguguuucagaccagagccggcugucugaucggagccgagcacgugaacaauagcuacgagugcgacauccccaucggcgcuggaaucugcgccagcuaccagacacagacaaacagcccucggagagccagaagcguggccagccagagcgugauugccuacacaaugucucugggcgccgagaacagcguggccuacuccaacaacucuaucgcuauccccaccaacuucaccaucagcgugaccacagagauccugccuguguccaugaccaagaccagcguggacugcaccauguacaucugcggcgauuccaccgagugcuccaaccugcugcugcaguacggcagcuucugcacccagcugaauagagcccugacagggaucgccguggaacaggacaagaacacccaagagguguucgcccaagugaagcagaucuacaagaccccuccuaucaaggacuucggcggcuucaauuucagccagauucugcccgauccuagcaagcccagcaagcggagcuucaucgaggaccugcuguucaacaaagugacacuggccgacgccggcuucaucaagcaguauggcgauugucugggcgacauugccgccagggaucugauuugcgcccagaaguuuaacggacugacagugcugccuccucugcugaccgaugagaugaucgcccaguacacaucugcccugcuggccggcacaaucacaagcggcuggacauuuggagcaggcgccgcucugcagauccccuuugcuaugcagauggccuaccgguucaacggcaucggagugacccagaaugugcuguacgagaaccagaagcugaucgccaaccaguucaacagcgccaucggcaagauccaggacagccugagcagcacagcaagcgcccugggaaagcugcaggacguggucaaccagaaugcccaggcacugaacacccuggucaagcagcuguccuccaacuucggcgccaucagcucugugcugaacgauauccugagcagacuggacccuccugaggccgaggugcagaucgacagacugaucacaggcagacugcagagccuccagacauacgugacccagcagcugaucagagccgccgagauuagagccucugccaaucuggccgccaccaagaugucugagugugugcugggccagagcaagagaguggacuuuugcggcaagggcuaccaccugaugagcuucccucagucugccccucacggcgugguguuucugcacgugacauaugugcccgcucaagagaagaauuucaccaccgcuccagccaucugccacgacggcaaagcccacuuuccuagagaaggcguguucguguccaacggcacccauugguucgugacacagcggaacuucuacgagccccagaucaucaccaccgacaacaccuucgugucuggcaacugcgacgucgugaucggcauugugaacaauaccguguacgacccucugcagcccgagcuggacagcuucaaagaggaacuggacaaguacuuuaagaaccacacaagccccgacguggaccugggcgauaucagcggaaucaaugccagcgucgugaacauccagaaagagaucgaccggcugaacgagguggccaagaaucugaacgagagccugaucgaccugcaagaacuggggaaguacgagcaguacaucaaguggcccugguacaucuggcugggcuuuaucgccggacugauugccaucgugauggucacaaucaugcuguguugcaugaccagcugcuguagcugccugaagggcuguuguagcuguggcagcugcugcaaguucgacgaggacgauucugagcccgugcugaagggcgugaaacugcacuacacaugaggacuaguuauaagacugacuagcccgaugggccucccaacgggcccuccuccccuccuugcaccgagauuaauaaaaaaaaaaaaaaaaaaaaaaaaaaaaaaaaaaaaaaaaaaaaaaaaaaaaaaaaaaaaaaaaaaaaaaaaaaaaaaaaaaaaaaaaaaaaaaaaaaaa

SEQ ID NO: 25596 - RNA, 4011 nt, Artificial Sequence
  SARS-CoV-2/Wuhan/WIV05/2019__EPI_ISL_402128 spike protein mRNA gc mod (1-1273)(K986P_V987P_D614G_M1229I)
aggagaaagcuuaccauguucguguuccuggugcugcugccucugguguccagccagugugugaaccugaccaccagaacacagcugccuccagccuacaccaacagcuuuaccagaggcguguacuaccccgacaagguguucagauccagcgugcugcacucuacccaggaccuguuccugccuuucuucagcaacgugaccugguuccacgccauccacguguccggcaccaauggcaccaagagauucgacaaccccgugcugcccuucaacgacgggguguacuuugccagcaccgagaaguccaacaucaucagaggcuggaucuucggcaccacacuggacagcaagacccagagccugcugaucgugaacaacgccaccaacguggucaucaaagugugcgaguuccaguucugcaacgaccccuuccugggcgucuacuaccacaagaacaacaagagcuggauggaaagcgaguuccggguguacagcagcgccaacaacugcaccuucgaguacgugucccagccuuuccugauggaccuggaaggcaagcagggcaacuucaagaaccugcgcgaguucguguuuaagaacaucgacggcuacuucaagaucuacagcaagcacaccccuaucaaccucgugcgggaucugccucagggcuucucugcucuggaaccccugguggaucugcccaucggcaucaacaucacccgguuucagacacugcuggcccugcacagaagcuaccugacaccuggcgauagcagcagcggauggacagcuggugccgccgcuuacuaugugggcuaccugcagccuagaaccuuccugcugaaguacaacgagaacggcaccaucaccgacgccguggauugugcucuggauccucugagcgagacaaagugcacccugaaguccuucaccguggaaaagggcaucuaccagaccagcaacuuccgggugcagcccaccgaauccaucgugcgguuccccaauaucaccaaucugugccccuucggcgagguguucaaugccaccagauucgccucuguguacgccuggaaccggaagcggaucagcaauugcguggccgacuacuccgugcuguacaacuccgccagcuucagcaccuucaagugcuacggcguguccccuaccaagcugaacgaccugugcuucacaaacguguacgccgacagcuucgugauccggggagaugaagugcggcagauugccccuggacagacaggcaagaucgccgacuacaacuacaagcugcccgacgacuucaccggcugugugauugccuggaacagcaacaaccuggacuccaaagucggcggcaacuacaauuaccuguaccggcuguuccggaaguccaaucugaagcccuucgagcgggacaucuccaccgagaucuaucaggccggcagcaccccuuguaacggcguggaaggcuucaacugcuacuucccacugcaguccuacggcuuucagcccacaaauggcgugggcuaucagcccuacagagugguggugcugagcuucgaacugcugcaugccccugccacagugugcggcccuaagaaaagcaccaaucucgugaagaacaaaugcgugaacuucaacuucaacggccugaccggcaccggcgugcugacagagagcaacaagaaguuccugccauuccagcaguuuggccgggauaucgccgauaccacagacgccguuagagauccccagacacuggaaauccuggacaucaccccuugcagcuucggcggagugucugugaucaccccuggcaccaacaccagcaaucagguggcagugcuguaccagggcgugaacuguaccgaagugcccguggccauucacgccgaucagcugacaccuacauggcggguguacuccaccggcagcaauguguuucagaccagagccggcugucugaucggagccgagcacgugaacaauagcuacgagugcgacauccccaucggcgcuggaaucugcgccagcuaccagacacagacaaacagcccucggagagccagaagcguggccagccagagcaucauugccuacacaaugucucugggcgccgagaacagcguggccuacuccaacaacucuaucgcuauccccaccaacuucaccaucagcgugaccacagagauccugccuguguccaugaccaagaccagcguggacugcaccauguacaucugcggcgauuccaccgagugcuccaaccugcugcugcaguacggcagcuucugcacccagcugaauagagcccugacagggaucgccguggaacaggacaagaacacccaagagguguucgcccaagugaagcagaucuacaagaccccuccuaucaaggacuucggcggcuucaauuucagccagauucugcccgauccuagcaagcccagcaagcggagcuucaucgaggaccugcuguucaacaaagugacacuggccgacgccggcuucaucaagcaguauggcgauugucugggcgacauugccgccagggaucugauuugcgcccagaaguuuaacggacugacagugcugccuccucugcugaccgaugagaugaucgcccaguacacaucugcccugcuggccggcacaaucacaagcggcuggacauuuggagcaggcgccgcucugcagauccccuuugcuaugcagauggccuaccgguucaacggcaucggagugacccagaaugugcuguacgagaaccagaagcugaucgccaaccaguucaacagcgccaucggcaagauccaggacagccugagcagcacagcaagcgcccugggaaagcugcaggacguggucaaccagaaugcccaggcacugaacacccuggucaagcagcuguccuccaacuucggcgccaucagcucugugcugaacgauauccugagcagacuggacccuccugaggccgaggugcagaucgacagacugaucacaggcagacugcagagccuccagacauacgugacccagcagcugaucagagccgccgagauuagagccucugccaaucuggccgccaccaagaugucugagugugugcugggccagagcaagagaguggacuuuugcggcaagggcuaccaccugaugagcuucccucagucugccccucacggcgugguguuucugcacgugacauaugugcccgcucaagagaagaauuucaccaccgcuccagccaucugccacgacggcaaagcccacuuuccuagagaaggcguguucguguccaacggcacccauugguucgugacacagcggaacuucuacgagccccagaucaucaccaccgacaacaccuucgugucuggcaacugcgacgucgugaucggcauugugaacaauaccguguacgacccucugcagcccgagcuggacagcuucaaagaggaacuggacaaguacuuuaagaaccacacaagccccgacguggaccugggcgauaucagcggaaucaaugccagcgucgugaacauccagaaagagaucgaccggcugaacgagguggccaagaaucugaacgagagccugaucgaccugcaagaacuggggaaguacgagcaguacaucaaguggcccugguacaucuggcugggcuuuaucgccggacugauugccaucgugaucgucacaaucaugcuguguugcaugaccagcugcuguagcugccugaagggcuguuguagcuguggcagcugcugcaaguucgacgaggacgauucugagcccgugcugaagggcgugaaacugcacuacacaugaggacuaguuauaagacugacuagcccgaugggccucccaacgggcccuccuccccuccuugcaccgagauuaauaaaaaaaaaaaaaaaaaaaaaaaaaaaaaaaaaaaaaaaaaaaaaaaaaaaaaaaaaaaaaaaaaaaaaaaaaaaaaaaaaaaaaaaaaaaaaaaaaaaa

SEQ ID NO: 25597 - RNA, 4005 nt, Artificial Sequence
  SARS-CoV-2/Wuhan/WIV05/2019__EPI_ISL_402128 spike protein mRNA gc mod (1-1273)(K986P_V987P_H69del_V70del_A222V_Y453F_S477N_D614G_I692V)
aggagaaagcuuaccauguucguguuccuggugcugcugccucugguguccagccagugugugaaccugaccaccagaacacagcugccuccagccuacaccaacagcuuuaccagaggcguguacuaccccgacaagguguucagauccagcgugcugcacucuacccaggaccuguuccugccuuucuucagcaacgugaccugguuccacgccaucuccggcaccaauggcaccaagagauucgacaaccccgugcugcccuucaacgacgggguguacuuugccagcaccgagaaguccaacaucaucagaggcuggaucuucggcaccacacuggacagcaagacccagagccugcugaucgugaacaacgccaccaacguggucaucaaagugugcgaguuccaguucugcaacgaccccuuccugggcgucuacuaccacaagaacaacaagagcuggauggaaagcgaguuccggguguacagcagcgccaacaacugcaccuucgaguacgugucccagccuuuccugauggaccuggaaggcaagcagggcaacuucaagaaccugcgcgaguucguguuuaagaacaucgacggcuacuucaagaucuacagcaagcacaccccuaucaaccucgugcgggaucugccucagggcuucucugugcuggaaccccugguggaucugcccaucggcaucaacaucacccgguuucagacacugcuggcccugcacagaagcuaccugacaccuggcgauagcagcagcggauggacagcuggugccgccgcuuacuaugugggcuaccugcagccuagaaccuuccugcugaaguacaacgagaacggcaccaucaccgacgccguggauugugcucuggauccucugagcgagacaaagugcacccugaaguccuucaccguggaaaagggcaucuaccagaccagcaacuuccgggugcagcccaccgaauccaucgugcgguuccccaauaucaccaaucugugccccuucggcgagguguucaaugccaccagauucgccucuguguacgccuggaaccggaagcggaucagcaauugcguggccgacuacuccgugcuguacaacuccgccagcuucagcaccuucaagugcuacggcguguccccuaccaagcugaacgaccugugcuucacaaacguguacgccgacagcuucgugauccggggagaugaagugcggcagauugccccuggacagacaggcaagaucgccgacuacaacuacaagcugcccgacgacuucaccggcugugugauugccuggaacagcaacaaccuggacuccaaagucggcggcaacuacaauuaccuguuccggcuguuccggaaguccaaucugaagcccuucgagcgggacaucuccaccgagaucuaucaggccggcaacaccccuuguaacggcguggaaggcuucaacugcuacuucccacugcaguccuacggcuuucagcccacaaauggcgugggcuaucagcccuacagagugguggugcugagcuucgaacugcugcaugccccugccacagugugcggcccuaagaaaagcaccaaucucgugaagaacaaaugcgugaacuucaacuucaacggccugaccggcaccggcgugcugacagagagcaacaagaaguuccugccauuccagcaguuuggccgggauaucgccgauaccacagacgccguuagagauccccagacacuggaaauccuggacaucaccccuugcagcuucggcggagugucugugaucaccccuggcaccaacaccagcaaucagguggcagugcuguaccagggcgugaacuguaccgaagugcccguggccauucacgccgaucagcugacaccuacauggcggguguacuccaccggcagcaauguguuucagaccagagccggcugucugaucggagccgagcacgugaacaauagcuacgagugcgacauccccaucggcgcuggaaucugcgccagcuaccagacacagacaaacagcccucggagagccagaagcguggccagccagagcgugauugccuacacaaugucucugggcgccgagaacagcguggccuacuccaacaacucuaucgcuauccccaccaacuucaccaucagcgugaccacagagauccugccuguguccaugaccaagaccagcguggacugcaccauguacaucugcggcgauuccaccgagugcuccaaccugcugcugcaguacggcagcuucugcacccagcugaauagagcccugacagggaucgccguggaacaggacaagaacacccaagagguguucgcccaagugaagcagaucuacaagaccccuccuaucaaggacuucggcggcuucaauuucagccagauucugcccgauccuagcaagcccagcaagcggagcuucaucgaggaccugcuguucaacaaagugacacuggccgacgccggcuucaucaagcaguauggcgauugucugggcgacauugccgccagggaucugauuugcgcccagaaguuuaacggacugacagugcugccuccucugcugaccgaugagaugaucgcccaguacacaucugcccugcuggccggcacaaucacaagcggcuggacauuuggagcaggcgccgcucugcagauccccuuugcuaugcagauggccuaccgguucaacggcaucggagugacccagaaugugcuguacgagaaccagaagcugaucgccaaccaguucaacagcgccaucggcaagauccaggacagccugagcagcacagcaagcgcccugggaaagcugcaggacguggucaaccagaaugcccaggcacugaacacccuggucaagcagcuguccuccaacuucggcgccaucagcucugugcugaacgauauccugagcagacuggacccuccugaggccgaggugcagaucgacagacugaucacaggcagacugcagagccuccagacauacgugacccagcagcugaucagagccgccgagauuagagccucugccaaucuggccgccaccaagaugucugagugugugcugggccagagcaagagaguggacuuuugcggcaagggcuaccaccugaugagcuucccucagucugccccucacggcgugguguuucugcacgugacauaugugcccgcucaagagaagaauuucaccaccgcuccagccaucugccacgacggcaaagcccacuuuccuagagaaggcguguucguguccaacggcacccauugguucgugacacagcggaacuucuacgagccccagaucaucaccaccgacaacaccuucgugucuggcaacugcgacgucgugaucggcauugugaacaauaccguguacgacccucugcagcccgagcuggacagcuucaaagaggaacuggacaaguacuuuaagaaccacacaagccccgacguggaccugggcgauaucagcggaaucaaugccagcgucgugaacauccagaaagagaucgaccggcugaacgagguggccaagaaucugaacgagagccugaucgaccugcaagaacuggggaaguacgagcaguacaucaaguggcccugguacaucuggcugggcuuuaucgccggacugauugccaucgugauggucacaaucaugcuguguugcaugaccagcugcuguagcugccugaagggcuguuguagcuguggcagcugcugcaaguucgacgaggacgauucugagcccgugcugaagggcgugaaacugcacuacacaugaggacuaguuauaagacugacuagcccgaugggccucccaacgggcccuccuccccuccuugcaccgagauuaauaaaaaaaaaaaaaaaaaaaaaaaaaaaaaaaaaaaaaaaaaaaaaaaaaaaaaaaaaaaaaaaaaaaaaaaaaaaaaaaaaaaaaaaaaaaaaaaaaaaa

SEQ ID NO: 25598 - RNA, 4005 nt, Artificial Sequence
  SARS-CoV-2/Wuhan/WIV05/2019__EPI_ISL_402128 spike protein mRNA gc mod (1-1273)(K986P_V987P_H69del_V70del_Y453F_D614G_I692V_M1229I)
aggagaaagcuuaccauguucguguuccuggugcugcugccucugguguccagccagugugugaaccugaccaccagaacacagcugccuccagccuacaccaacagcuuuaccagaggcguguacuaccccgacaagguguucagauccagcgugcugcacucuacccaggaccuguuccugccuuucuucagcaacgugaccugguuccacgccaucuccggcaccaauggcaccaagagauucgacaaccccgugcugcccuucaacgacgggguguacuuugccagcaccgagaaguccaacaucaucagaggcuggaucuucggcaccacacuggacagcaagacccagagccugcugaucgugaacaacgccaccaacguggucaucaaagugugcgaguuccaguucugcaacgaccccuuccugggcgucuacuaccacaagaacaacaagagcuggauggaaagcgaguuccggguguacagcagcgccaacaacugcaccuucgaguacgugucccagccuuuccugauggaccuggaaggcaagcagggcaacuucaagaaccugcgcgaguucguguuuaagaacaucgacggcuacuucaagaucuacagcaagcacaccccuaucaaccucgugcgggaucugccucagggcuucucugcucuggaaccccugguggaucugcccaucggcaucaacaucacccgguuucagacacugcuggcccugcacagaagcuaccugacaccuggcgauagcagcagcggauggacagcuggugccgccgcuuacuaugugggcuaccugcagccuagaaccuuccugcugaaguacaacgagaacggcaccaucaccgacgccguggauugugcucuggauccucugagcgagacaaagugcacccugaaguccuucaccguggaaaagggcaucuaccagaccagcaacuuccgggugcagcccaccgaauccaucgugcgguuccccaauaucaccaaucugugccccuucggcgagguguucaaugccaccagauucgccucuguguacgccuggaaccggaagcggaucagcaauugcguggccgacuacuccgugcuguacaacuccgccagcuucagcaccuucaagugcuacggcguguccccuaccaagcugaacgaccugugcuucacaaacguguacgccgacagcuucgugauccggggagaugaagugcggcagauugccccuggacagacaggcaagaucgccgacuacaacuacaagcugcccgacgacuucaccggcugugugauugccuggaacagcaacaaccuggacuccaaagucggcggcaacuacaauuaccuguuccggcuguuccggaaguccaaucugaagcccuucgagcgggacaucuccaccgagaucuaucaggccggcagcaccccuuguaacggcguggaaggcuucaacugcuacuucccacugcaguccuacggcuuucagcccacaaauggcgugggcuaucagcccuacagagugguggugcugagcuucgaacugcugcaugccccugccacagugugcggcccuaagaaaagcaccaaucucgugaagaacaaaugcgugaacuucaacuucaacggccugaccggcaccggcgugcugacagagagcaacaagaaguuccugccauuccagcaguuuggccgggauaucgccgauaccacagacgccguuagagauccccagacacuggaaauccuggacaucaccccuugcagcuucggcggagugucugugaucaccccuggcaccaacaccagcaaucagguggcagugcuguaccagggcgugaacuguaccgaagugcccguggccauucacgccgaucagcugacaccuacauggcggguguacuccaccggcagcaauguguuucagaccagagccggcugucugaucggagccgagcacgugaacaauagcuacgagugcgacauccccaucggcgcuggaaucugcgccagcuaccagacacagacaaacagcccucggagagccagaagcguggccagccagagcgugauugccuacacaaugucucugggcgccgagaacagcguggccuacuccaacaacucuaucgcuauccccaccaacuucaccaucagcgugaccacagagauccugccuguguccaugaccaagaccagcguggacugcaccauguacaucugcggcgauuccaccgagugcuccaaccugcugcugcaguacggcagcuucugcacccagcugaauagagcccugacagggaucgccguggaacaggacaagaacacccaagagguguucgcccaagugaagcagaucuacaagaccccuccuaucaaggacuucggcggcuucaauuucagccagauucugcccgauccuagcaagcccagcaagcggagcuucaucgaggaccugcuguucaacaaagugacacuggccgacgccggcuucaucaagcaguauggcgauugucugggcgacauugccgccagggaucugauuugcgcccagaaguuuaacggacugacagugcugccuccucugcugaccgaugagaugaucgcccaguacacaucugcccugcuggccggcacaaucacaagcggcuggacauuuggagcaggcgccgcucugcagauccccuuugcuaugcagauggccuaccgguucaacggcaucggagugacccagaaugugcuguacgagaaccagaagcugaucgccaaccaguucaacagcgccaucggcaagauccaggacagccugagcagcacagcaagcgcccugggaaagcugcaggacguggucaaccagaaugcccaggcacugaacacccuggucaagcagcuguccuccaacuucggcgccaucagcucugugcugaacgauauccugagcagacuggacccuccugaggccgaggugcagaucgacagacugaucacaggcagacugcagagccuccagacauacgugacccagcagcugaucagagccgccgagauuagagccucugccaaucuggccgccaccaagaugucugagugugugcugggccagagcaagagaguggacuuuugcggcaagggcuaccaccugaugagcuucccucagucugccccucacggcgugguguuucugcacgugacauaugugcccgcucaagagaagaauuucaccaccgcuccagccaucugccacgacggcaaagcccacuuuccuagagaaggcguguucguguccaacggcacccauugguucgugacacagcggaacuucuacgagccccagaucaucaccaccgacaacaccuucgugucuggcaacugcgacgucgugaucggcauugugaacaauaccguguacgacccucugcagcccgagcuggacagcuucaaagaggaacuggacaaguacuuuaagaaccacacaagccccgacguggaccugggcgauaucagcggaaucaaugccagcgucgugaacauccagaaagagaucgaccggcugaacgagguggccaagaaucugaacgagagccugaucgaccugcaagaacuggggaaguacgagcaguacaucaaguggcccugguacaucuggcugggcuuuaucgccggacugauugccaucgugaucgucacaaucaugcuguguugcaugaccagcugcuguagcugccugaagggcuguuguagcuguggcagcugcugcaaguucgacgaggacgauucugagcccgugcugaagggcgugaaacugcacuacacaugaggacuaguuauaagacugacuagcccgaugggccucccaacgggcccuccuccccuccuugcaccgagauuaauaaaaaaaaaaaaaaaaaaaaaaaaaaaaaaaaaaaaaaaaaaaaaaaaaaaaaaaaaaaaaaaaaaaaaaaaaaaaaaaaaaaaaaaaaaaaaaaaaaaa

SEQ ID NO: 25599 - RNA, 4002 nt, Artificial Sequence
  SARS-CoV-2/Wuhan/WIV05/2019__EPI_ISL_402128 spike protein mRNA gc mod (1-1273)(K986P_V987P_K986P_V987P_H69del_V70del_Y144del_N501Y_A570 D_D614G_P681H_T716I_S982A_D1118H)
aggagaaagcuuaccauguucguguuccuggugcugcugccucugguguccagccagugugugaaccugaccaccagaacacagcugccuccagccuacaccaacagcuuuaccagaggcguguacuaccccgacaagguguucagauccagcgugcugcacucuacccaggaccuguuccugccuuucuucagcaacgugaccugguuccacgccaucuccggcaccaauggcaccaagagauucgacaaccccgugcugcccuucaacgacgggguguacuuugccagcaccgagaaguccaacaucaucagaggcuggaucuucggcaccacacuggacagcaagacccagagccugcugaucgugaacaacgccaccaacguggucaucaaagugugcgaguuccaguucugcaacgaccccuuccugggcgucuaccacaagaacaacaagagcuggauggaaagcgaguuccggguguacagcagcgccaacaacugcaccuucgaguacgugucccagccuuuccugauggaccuggaaggcaagcagggcaacuucaagaaccugcgcgaguucguguuuaagaacaucgacggcuacuucaagaucuacagcaagcacaccccuaucaaccucgugcgggaucugccucagggcuucucugcucuggaaccccugguggaucugcccaucggcaucaacaucacccgguuucagacacugcuggcccugcacagaagcuaccugacaccuggcgauagcagcagcggauggacagcuggugccgccgcuuacuaugugggcuaccugcagccuagaaccuuccugcugaaguacaacgagaacggcaccaucaccgacgccguggauugugcucuggauccucugagcgagacaaagugcacccugaaguccuucaccguggaaaagggcaucuaccagaccagcaacuuccgggugcagcccaccgaauccaucgugcgguuccccaauaucaccaaucugugccccuucggcgagguguucaaugccaccagauucgccucuguguacgccuggaaccggaagcggaucagcaauugcguggccgacuacuccgugcuguacaacuccgccagcuucagcaccuucaagugcuacggcguguccccuaccaagcugaacgaccugugcuucacaaacguguacgccgacagcuucgugauccggggagaugaagugcggcagauugccccuggacagacaggcaagaucgccgacuacaacuacaagcugcccgacgacuucaccggcugugugauugccuggaacagcaacaaccuggacuccaaagucggcggcaacuacaauuaccuguaccggcuguuccggaaguccaaucugaagcccuucgagcgggacaucuccaccgagaucuaucaggccggcagcaccccuuguaacggcguggaaggcuucaacugcuacuucccacugcaguccuacggcuuucagcccacauacggcgugggcuaucagcccuacagagugguggugcugagcuucgaacugcugcaugccccugccacagugugcggcccuaagaaaagcaccaaucucgugaagaacaaaugcgugaacuucaacuucaacggccugaccggcaccggcgugcugacagagagcaacaagaaguuccugccauuccagcaguuuggccgggauaucgacgauaccacagacgccguuagagauccccagacacuggaaauccuggacaucaccccuugcagcuucggcggagugucugugaucaccccuggcaccaacaccagcaaucagguggcagugcuguaccagggcgugaacuguaccgaagugcccguggccauucacgccgaucagcugacaccuacauggcggguguacuccaccggcagcaauguguuucagaccagagccggcugucugaucggagccgagcacgugaacaauagcuacgagugcgacauccccaucggcgcuggaaucugcgccagcuaccagacacagacaaacagccaccggagagccagaagcguggccagccagagcaucauugccuacacaaugucucugggcgccgagaacagcguggccuacuccaacaacucuaucgcuauccccaucaacuucaccaucagcgugaccacagagauccugccuguguccaugaccaagaccagcguggacugcaccauguacaucugcggcgauuccaccgagugcuccaaccugcugcugcaguacggcagcuucugcacccagcugaauagagcccugacagggaucgccguggaacaggacaagaacacccaagagguguucgcccaagugaagcagaucuacaagaccccuccuaucaaggacuucggcggcuucaauuucagccagauucugcccgauccuagcaagcccagcaagcggagcuucaucgaggaccugcuguucaacaaagugacacuggccgacgccggcuucaucaagcaguauggcgauugucugggcgacauugccgccagggaucugauuugcgcccagaaguuuaacggacugacagugcugccuccucugcugaccgaugagaugaucgcccaguacacaucugcccugcuggccggcacaaucacaagcggcuggacauuuggagcaggcgccgcucugcagauccccuuugcuaugcagauggccuaccgguucaacggcaucggagugacccagaaugugcuguacgagaaccagaagcugaucgccaaccaguucaacagcgccaucggcaagauccaggacagccugagcagcacagcaagcgcccugggaaagcugcaggacguggucaaccagaaugcccaggcacugaacacccuggucaagcagcuguccuccaacuucggcgccaucagcucugugcugaacgauauccuggccagacuggacccuccugaggccgaggugcagaucgacagacugaucacaggcagacugcagagccuccagacauacgugacccagcagcugaucagagccgccgagauuagagccucugccaaucuggccgccaccaagaugucugagugugugcugggccagagcaagagaguggacuuuugcggcaagggcuaccaccugaugagcuucccucagucugccccucacggcgugguguuucugcacgugacauaugugcccgcucaagagaagaauuucaccaccgcuccagccaucugccacgacggcaaagcccacuuuccuagagaaggcguguucguguccaacggcacccauugguucgugacacagcggaacuucuacgagccccagaucaucaccacccacaacaccuucgugucuggcaacugcgacgucgugaucggcauugugaacaauaccguguacgacccucugcagcccgagcuggacagcuucaaagaggaacuggacaaguacuuuaagaaccacacaagccccgacguggaccugggcgauaucagcggaaucaaugccagcgucgugaacauccagaaagagaucgaccggcugaacgagguggccaagaaucugaacgagagccugaucgaccugcaagaacuggggaaguacgagcaguacaucaaguggcccugguacaucuggcugggcuuuaucgccggacugauugccaucgugauggucacaaucaugcuguguugcaugaccagcugcuguagcugccugaagggcuguuguagcuguggcagcugcugcaaguucgacgaggacgauucugagcccgugcugaagggcgugaaacugcacuacacaugaggacuaguuauaagacugacuagcccgaugggccucccaacgggcccuccuccccuccuugcaccgagauuaauaaaaaaaaaaaaaaaaaaaaaaaaaaaaaaaaaaaaaaaaaaaaaaaaaaaaaaaaaaaaaaaaaaaaaaaaaaaaaaaaaaaaaaaaaaaaaaaaaaaa

SEQ ID NO: 25600 - RNA, 4011 nt, Artificial Sequence
  SARS-CoV-2/Wuhan/WIV05/2019__EPI_ISL_402128 spike protein mRNA gc mod (1-1273)(K986P_V987P_K986P_V987P_K417N_E484K_N501Y_D614G)
aggagaaagcuuaccauguucguguuccuggugcugcugccucugguguccagccagugugugaaccugaccaccagaacacagcugccuccagccuacaccaacagcuuuaccagaggcguguacuaccccgacaagguguucagauccagcgugcugcacucuacccaggaccuguuccugccuuucuucagcaacgugaccugguuccacgccauccacguguccggcaccaauggcaccaagagauucgacaaccccgugcugcccuucaacgacgggguguacuuugccagcaccgagaaguccaacaucaucagaggcuggaucuucggcaccacacuggacagcaagacccagagccugcugaucgugaacaacgccaccaacguggucaucaaagugugcgaguuccaguucugcaacgaccccuuccugggcgucuacuaccacaagaacaacaagagcuggauggaaagcgaguuccggguguacagcagcgccaacaacugcaccuucgaguacgugucccagccuuuccugauggaccuggaaggcaagcagggcaacuucaagaaccugcgcgaguucguguuuaagaacaucgacggcuacuucaagaucuacagcaagcacaccccuaucaaccucgugcgggaucugccucagggcuucucugcucuggaaccccugguggaucugcccaucggcaucaacaucacccgguuucagacacugcuggcccugcacagaagcuaccugacaccuggcgauagcagcagcggauggacagcuggugccgccgcuuacuaugugggcuaccugcagccuagaaccuuccugcugaaguacaacgagaacggcaccaucaccgacgccguggauugugcucuggauccucugagcgagacaaagugcacccugaaguccuucaccguggaaaagggcaucuaccagaccagcaacuuccgggugcagcccaccgaauccaucgugcgguuccccaauaucaccaaucugugccccuucggcgagguguucaaugccaccagauucgccucuguguacgccuggaaccggaagcggaucagcaauugcguggccgacuacuccgugcuguacaacuccgccagcuucagcaccuucaagugcuacggcguguccccuaccaagcugaacgaccugugcuucacaaacguguacgccgacagcuucgugauccggggagaugaagugcggcagauugccccuggacagacaggcaacaucgccgacuacaacuacaagcugcccgacgacuucaccggcugugugauugccuggaacagcaacaaccuggacuccaaagucggcggcaacuacaauuaccuguaccggcuguuccggaaguccaaucugaagcccuucgagcgggacaucuccaccgagaucuaucaggccggcagcaccccuuguaacggcgugaagggcuucaacugcuacuucccacugcaguccuacggcuuucagcccacauacggcgugggcuaucagcccuacagagugguggugcugagcuucgaacugcugcaugccccugccacagugugcggcccuaagaaaagcaccaaucucgugaagaacaaaugcgugaacuucaacuucaacggccugaccggcaccggcgugcugacagagagcaacaagaaguuccugccauuccagcaguuuggccgggauaucgccgauaccacagacgccguuagagauccccagacacuggaaauccuggacaucaccccuugcagcuucggcggagugucugugaucaccccuggcaccaacaccagcaaucagguggcagugcuguaccagggcgugaacuguaccgaagugcccguggccauucacgccgaucagcugacaccuacauggcggguguacuccaccggcagcaauguguuucagaccagagccggcugucugaucggagccgagcacgugaacaauagcuacgagugcgacauccccaucggcgcuggaaucugcgccagcuaccagacacagacaaacagcccucggagagccagaagcguggccagccagagcaucauugccuacacaaugucucugggcgccgagaacagcguggccuacuccaacaacucuaucgcuauccccaccaacuucaccaucagcgugaccacagagauccugccuguguccaugaccaagaccagcguggacugcaccauguacaucugcggcgauuccaccgagugcuccaaccugcugcugcaguacggcagcuucugcacccagcugaauagagcccugacagggaucgccguggaacaggacaagaacacccaagagguguucgcccaagugaagcagaucuacaagaccccuccuaucaaggacuucggcggcuucaauuucagccagauucugcccgauccuagcaagcccagcaagcggagcuucaucgaggaccugcuguucaacaaagugacacuggccgacgccggcuucaucaagcaguauggcgauugucugggcgacauugccgccagggaucugauuugcgcccagaaguuuaacggacugacagugcugccuccucugcugaccgaugagaugaucgcccaguacacaucugcccugcuggccggcacaaucacaagcggcuggacauuuggagcaggcgccgcucugcagauccccuuugcuaugcagauggccuaccgguucaacggcaucggagugacccagaaugugcuguacgagaaccagaagcugaucgccaaccaguucaacagcgccaucggcaagauccaggacagccugagcagcacagcaagcgcccugggaaagcugcaggacguggucaaccagaaugcccaggcacugaacacccuggucaagcagcuguccuccaacuucggcgccaucagcucugugcugaacgauauccugagcagacuggacccuccugaggccgaggugcagaucgacagacugaucacaggcagacugcagagccuccagacauacgugacccagcagcugaucagagccgccgagauuagagccucugccaaucuggccgccaccaagaugucugagugugugcugggccagagcaagagaguggacuuuugcggcaagggcuaccaccugaugagcuucccucagucugccccucacggcgugguguuucugcacgugacauaugugcccgcucaagagaagaauuucaccaccgcuccagccaucugccacgacggcaaagcccacuuuccuagagaaggcguguucguguccaacggcacccauugguucgugacacagcggaacuucuacgagccccagaucaucaccaccgacaacaccuucgugucuggcaacugcgacgucgugaucggcauugugaacaauaccguguacgacccucugcagcccgagcuggacagcuucaaagaggaacuggacaaguacuuuaagaaccacacaagccccgacguggaccugggcgauaucagcggaaucaaugccagcgucgugaacauccagaaagagaucgaccggcugaacgagguggccaagaaucugaacgagagccugaucgaccugcaagaacuggggaaguacgagcaguacaucaaguggcccugguacaucuggcugggcuuuaucgccggacugauugccaucgugauggucacaaucaugcuguguugcaugaccagcugcuguagcugccugaagggcuguuguagcuguggcagcugcugcaaguucgacgaggacgauucugagcccgugcugaagggcgugaaacugcacuacacaugaggacuaguuauaagacugacuagcccgaugggccucccaacgggcccuccuccccuccuugcaccgagauuaauaaaaaaaaaaaaaaaaaaaaaaaaaaaaaaaaaaaaaaaaaaaaaaaaaaaaaaaaaaaaaaaaaaaaaaaaaaaaaaaaaaaaaaaaaaaaaaaaaaaa

SEQ ID NO: 25601 - RNA, 4002 nt, Artificial Sequence
  SARS-CoV-2/Wuhan/WIV05/2019__EPI_ISL_402128 spike protein mRNA gc mod (1-1273)(K986P_V987P_K986P_V987P_L18F_D80A_D215G_L242del_A243del_ L244del_R246I_K417N_E484K_N501Y_D614G_A701V)
aggagaaagcuuaccauguucguguuccuggugcugcugccucugguguccagccagugugugaacuucaccaccagaacacagcugccuccagccuacaccaacagcuuuaccagaggcguguacuaccccgacaagguguucagauccagcgugcugcacucuacccaggaccuguuccugccuuucuucagcaacgugaccugguuccacgccauccacguguccggcaccaauggcaccaagagauucgccaaccccgugcugcccuucaacgacgggguguacuuugccagcaccgagaaguccaacaucaucagaggcuggaucuucggcaccacacuggacagcaagacccagagccugcugaucgugaacaacgccaccaacguggucaucaaagugugcgaguuccaguucugcaacgaccccuuccugggcgucuacuaccacaagaacaacaagagcuggauggaaagcgaguuccggguguacagcagcgccaacaacugcaccuucgaguacgugucccagccuuuccugauggaccuggaaggcaagcagggcaacuucaagaaccugcgcgaguucguguuuaagaacaucgacggcuacuucaagaucuacagcaagcacaccccuaucaaccucgugcggggccugccucagggcuucucugcucuggaaccccugguggaucugcccaucggcaucaacaucacccgguuucagacacugcacaucagcuaccugacaccuggcgauagcagcagcggauggacagcuggugccgccgcuuacuaugugggcuaccugcagccuagaaccuuccugcugaaguacaacgagaacggcaccaucaccgacgccguggauugugcucuggauccucugagcgagacaaagugcacccugaaguccuucaccguggaaaagggcaucuaccagaccagcaacuuccgggugcagcccaccgaauccaucgugcgguuccccaauaucaccaaucugugccccuucggcgagguguucaaugccaccagauucgccucuguguacgccuggaaccggaagcggaucagcaauugcguggccgacuacuccgugcuguacaacuccgccagcuucagcaccuucaagugcuacggcguguccccuaccaagcugaacgaccugugcuucacaaacguguacgccgacagcuucgugauccggggagaugaagugcggcagauugccccuggacagacaggcaacaucgccgacuacaacuacaagcugcccgacgacuucaccggcugugugauugccuggaacagcaacaaccuggacuccaaagucggcggcaacuacaauuaccuguaccggcuguuccggaaguccaaucugaagcccuucgagcgggacaucuccaccgagaucuaucaggccggcagcaccccuuguaacggcgugaagggcuucaacugcuacuucccacugcaguccuacggcuuucagcccacauacggcgugggcuaucagcccuacagagugguggugcugagcuucgaacugcugcaugccccugccacagugugcggcccuaagaaaagcaccaaucucgugaagaacaaaugcgugaacuucaacuucaacggccugaccggcaccggcgugcugacagagagcaacaagaaguuccugccauuccagcaguuuggccgggauaucgccgauaccacagacgccguuagagauccccagacacuggaaauccuggacaucaccccuugcagcuucggcggagugucugugaucaccccuggcaccaacaccagcaaucagguggcagugcuguaccagggcgugaacuguaccgaagugcccguggccauucacgccgaucagcugacaccuacauggcggguguacuccaccggcagcaauguguuucagaccagagccggcugucugaucggagccgagcacgugaacaauagcuacgagugcgacauccccaucggcgcuggaaucugcgccagcuaccagacacagacaaacagcccucggagagccagaagcguggccagccagagcaucauugccuacacaaugucucugggcguggagaacagcguggccuacuccaacaacucuaucgcuauccccaccaacuucaccaucagcgugaccacagagauccugccuguguccaugaccaagaccagcguggacugcaccauguacaucugcggcgauuccaccgagugcuccaaccugcugcugcaguacggcagcuucugcacccagcugaauagagcccugacagggaucgccguggaacaggacaagaacacccaagagguguucgcccaagugaagcagaucuacaagaccccuccuaucaaggacuucggcggcuucaauuucagccagauucugcccgauccuagcaagcccagcaagcggagcuucaucgaggaccugcuguucaacaaagugacacuggccgacgccggcuucaucaagcaguauggcgauugucugggcgacauugccgccagggaucugauuugcgcccagaaguuuaacggacugacagugcugccuccucugcugaccgaugagaugaucgcccaguacacaucugcccugcuggccggcacaaucacaagcggcuggacauuuggagcaggcgccgcucugcagauccccuuugcuaugcagauggccuaccgguucaacggcaucggagugacccagaaugugcuguacgagaaccagaagcugaucgccaaccaguucaacagcgccaucggcaagauccaggacagccugagcagcacagcaagcgcccugggaaagcugcaggacguggucaaccagaaugcccaggcacugaacacccuggucaagcagcuguccuccaacuucggcgccaucagcucugugcugaacgauauccugagcagacuggacccuccugaggccgaggugcagaucgacagacugaucacaggcagacugcagagccuccagacauacgugacccagcagcugaucagagccgccgagauuagagccucugccaaucuggccgccaccaagaugucugagugugugcugggccagagcaagagaguggacuuuugcggcaagggcuaccaccugaugagcuucccucagucugccccucacggcgugguguuucugcacgugacauaugugcccgcucaagagaagaauuucaccaccgcuccagccaucugccacgacggcaaagcccacuuuccuagagaaggcguguucguguccaacggcacccauugguucgugacacagcggaacuucuacgagccccagaucaucaccaccgacaacaccuucgugucuggcaacugcgacgucgugaucggcauugugaacaauaccguguacgacccucugcagcccgagcuggacagcuucaaagaggaacuggacaaguacuuuaagaaccacacaagccccgacguggaccugggcgauaucagcggaaucaaugccagcgucgugaacauccagaaagagaucgaccggcugaacgagguggccaagaaucugaacgagagccugaucgaccugcaagaacuggggaaguacgagcaguacaucaaguggcccugguacaucuggcugggcuuuaucgccggacugauugccaucgugauggucacaaucaugcuguguugcaugaccagcugcuguagcugccugaagggcuguuguagcuguggcagcugcugcaaguucgacgaggacgauucugagcccgugcugaagggcgugaaacugcacuacacaugaggacuaguuauaagacugacuagcccgaugggccucccaacgggcccuccuccccuccuugcaccgagauuaauaaaaaaaaaaaaaaaaaaaaaaaaaaaaaaaaaaaaaaaaaaaaaaaaaaaaaaaaaaaaaaaaaaaaaaaaaaaaaaaaaaaaaaaaaaaaaaaaaaaa

SEQ ID NO: 25602 - RNA, 4011 nt, Artificial Sequence
  SARS-CoV-2/Wuhan/WIV05/2019__EPI_ISL_402128 spike protein mRNA gc mod (1-1273)(K986P_V987P_K986P_V987P_E484K_D614G)
aggagaaagcuuaccauguucguguuccuggugcugcugccucugguguccagccagugugugaaccugaccaccagaacacagcugccuccagccuacaccaacagcuuuaccagaggcguguacuaccccgacaagguguucagauccagcgugcugcacucuacccaggaccuguuccugccuuucuucagcaacgugaccugguuccacgccauccacguguccggcaccaauggcaccaagagauucgacaaccccgugcugcccuucaacgacgggguguacuuugccagcaccgagaaguccaacaucaucagaggcuggaucuucggcaccacacuggacagcaagacccagagccugcugaucgugaacaacgccaccaacguggucaucaaagugugcgaguuccaguucugcaacgaccccuuccugggcgucuacuaccacaagaacaacaagagcuggauggaaagcgaguuccggguguacagcagcgccaacaacugcaccuucgaguacgugucccagccuuuccugauggaccuggaaggcaagcagggcaacuucaagaaccugcgcgaguucguguuuaagaacaucgacggcuacuucaagaucuacagcaagcacaccccuaucaaccucgugcgggaucugccucagggcuucucugcucuggaaccccugguggaucugcccaucggcaucaacaucacccgguuucagacacugcuggcccugcacagaagcuaccugacaccuggcgauagcagcagcggauggacagcuggugccgccgcuuacuaugugggcuaccugcagccuagaaccuuccugcugaaguacaacgagaacggcaccaucaccgacgccguggauugugcucuggauccucugagcgagacaaagugcacccugaaguccuucaccguggaaaagggcaucuaccagaccagcaacuuccgggugcagcccaccgaauccaucgugcgguuccccaauaucaccaaucugugccccuucggcgagguguucaaugccaccagauucgccucuguguacgccuggaaccggaagcggaucagcaauugcguggccgacuacuccgugcuguacaacuccgccagcuucagcaccuucaagugcuacggcguguccccuaccaagcugaacgaccugugcuucacaaacguguacgccgacagcuucgugauccggggagaugaagugcggcagauugccccuggacagacaggcaagaucgccgacuacaacuacaagcugcccgacgacuucaccggcugugugauugccuggaacagcaacaaccuggacuccaaagucggcggcaacuacaauuaccuguaccggcuguuccggaaguccaaucugaagcccuucgagcgggacaucuccaccgagaucuaucaggccggcagcaccccuuguaacggcgugaagggcuucaacugcuacuucccacugcaguccuacggcuuucagcccacaaauggcgugggcuaucagcccuacagagugguggugcugagcuucgaacugcugcaugccccugccacagugugcggcccuaagaaaagcaccaaucucgugaagaacaaaugcgugaacuucaacuucaacggccugaccggcaccggcgugcugacagagagcaacaagaaguuccugccauuccagcaguuuggccgggauaucgccgauaccacagacgccguuagagauccccagacacuggaaauccuggacaucaccccuugcagcuucggcggagugucugugaucaccccuggcaccaacaccagcaaucagguggcagugcuguaccagggcgugaacuguaccgaagugcccguggccauucacgccgaucagcugacaccuacauggcggguguacuccaccggcagcaauguguuucagaccagagccggcugucugaucggagccgagcacgugaacaauagcuacgagugcgacauccccaucggcgcuggaaucugcgccagcuaccagacacagacaaacagcccucggagagccagaagcguggccagccagagcaucauugccuacacaaugucucugggcgccgagaacagcguggccuacuccaacaacucuaucgcuauccccaccaacuucaccaucagcgugaccacagagauccugccuguguccaugaccaagaccagcguggacugcaccauguacaucugcggcgauuccaccgagugcuccaaccugcugcugcaguacggcagcuucugcacccagcugaauagagcccugacagggaucgccguggaacaggacaagaacacccaagagguguucgcccaagugaagcagaucuacaagaccccuccuaucaaggacuucggcggcuucaauuucagccagauucugcccgauccuagcaagcccagcaagcggagcuucaucgaggaccugcuguucaacaaagugacacuggccgacgccggcuucaucaagcaguauggcgauugucugggcgacauugccgccagggaucugauuugcgcccagaaguuuaacggacugacagugcugccuccucugcugaccgaugagaugaucgcccaguacacaucugcccugcuggccggcacaaucacaagcggcuggacauuuggagcaggcgccgcucugcagauccccuuugcuaugcagauggccuaccgguucaacggcaucggagugacccagaaugugcuguacgagaaccagaagcugaucgccaaccaguucaacagcgccaucggcaagauccaggacagccugagcagcacagcaagcgcccugggaaagcugcaggacguggucaaccagaaugcccaggcacugaacacccuggucaagcagcuguccuccaacuucggcgccaucagcucugugcugaacgauauccugagcagacuggacccuccugaggccgaggugcagaucgacagacugaucacaggcagacugcagagccuccagacauacgugacccagcagcugaucagagccgccgagauuagagccucugccaaucuggccgccaccaagaugucugagugugugcugggccagagcaagagaguggacuuuugcggcaagggcuaccaccugaugagcuucccucagucugccccucacggcgugguguuucugcacgugacauaugugcccgcucaagagaagaauuucaccaccgcuccagccaucugccacgacggcaaagcccacuuuccuagagaaggcguguucguguccaacggcacccauugguucgugacacagcggaacuucuacgagccccagaucaucaccaccgacaacaccuucgugucuggcaacugcgacgucgugaucggcauugugaacaauaccguguacgacccucugcagcccgagcuggacagcuucaaagaggaacuggacaaguacuuuaagaaccacacaagccccgacguggaccugggcgauaucagcggaaucaaugccagcgucgugaacauccagaaagagaucgaccggcugaacgagguggccaagaaucugaacgagagccugaucgaccugcaagaacuggggaaguacgagcaguacaucaaguggcccugguacaucuggcugggcuuuaucgccggacugauugccaucgugauggucacaaucaugcuguguugcaugaccagcugcuguagcugccugaagggcuguuguagcuguggcagcugcugcaaguucgacgaggacgauucugagcccgugcugaagggcgugaaacugcacuacacaugaggacuaguuauaagacugacuagcccgaugggccucccaacgggcccuccuccccuccuugcaccgagauuaauaaaaaaaaaaaaaaaaaaaaaaaaaaaaaaaaaaaaaaaaaaaaaaaaaaaaaaaaaaaaaaaaaaaaaaaaaaaaaaaaaaaaaaaaaaaaaaaaaaaa

SEQ ID NO: 25603 - RNA, 4011 nt, Artificial Sequence
  SARS-CoV-2/Wuhan/WIV05/2019__EPI_ISL_402128 spike protein mRNA gc mod (1-1273)(K986P_V987P_K986P_V987P_L18F_T20N_P26S_D138Y_R190S_K417T _E484K_N501Y_D614G_H655Y_T1027I)
aggagaaagcuuaccauguucguguuccuggugcugcugccucugguguccagccagugugugaacuucaccaacagaacacagcugccuagcgccuacaccaacagcuuuaccagaggcguguacuaccccgacaagguguucagauccagcgugcugcacucuacccaggaccuguuccugccuuucuucagcaacgugaccugguuccacgccauccacguguccggcaccaauggcaccaagagauucgacaaccccgugcugcccuucaacgacgggguguacuuugccagcaccgagaaguccaacaucaucagaggcuggaucuucggcaccacacuggacagcaagacccagagccugcugaucgugaacaacgccaccaacguggucaucaaagugugcgaguuccaguucugcaacuaccccuuccugggcgucuacuaccacaagaacaacaagagcuggauggaaagcgaguuccggguguacagcagcgccaacaacugcaccuucgaguacgugucccagccuuuccugauggaccuggaaggcaagcagggcaacuucaagaaccugagcgaguucguguuuaagaacaucgacggcuacuucaagaucuacagcaagcacaccccuaucaaccucgugcgggaucugccucagggcuucucugcucuggaaccccugguggaucugcccaucggcaucaacaucacccgguuucagacacugcuggcccugcacagaagcuaccugacaccuggcgauagcagcagcggauggacagcuggugccgccgcuuacuaugugggcuaccugcagccuagaaccuuccugcugaaguacaacgagaacggcaccaucaccgacgccguggauugugcucuggauccucugagcgagacaaagugcacccugaaguccuucaccguggaaaagggcaucuaccagaccagcaacuuccgggugcagcccaccgaauccaucgugcgguuccccaauaucaccaaucugugccccuucggcgagguguucaaugccaccagauucgccucuguguacgccuggaaccggaagcggaucagcaauugcguggccgacuacuccgugcuguacaacuccgccagcuucagcaccuucaagugcuacggcguguccccuaccaagcugaacgaccugugcuucacaaacguguacgccgacagcuucgugauccggggagaugaagugcggcagauugccccuggacagacaggcaccaucgccgacuacaacuacaagcugcccgacgacuucaccggcugugugauugccuggaacagcaacaaccuggacuccaaagucggcggcaacuacaauuaccuguaccggcuguuccggaaguccaaucugaagcccuucgagcgggacaucuccaccgagaucuaucaggccggcagcaccccuuguaacggcgugaagggcuucaacugcuacuucccacugcaguccuacggcuuucagcccacauacggcgugggcuaucagcccuacagagugguggugcugagcuucgaacugcugcaugccccugccacagugugcggcccuaagaaaagcaccaaucucgugaagaacaaaugcgugaacuucaacuucaacggccugaccggcaccggcgugcugacagagagcaacaagaaguuccugccauuccagcaguuuggccgggauaucgccgauaccacagacgccguuagagauccccagacacuggaaauccuggacaucaccccuugcagcuucggcggagugucugugaucaccccuggcaccaacaccagcaaucagguggcagugcuguaccagggcgugaacuguaccgaagugcccguggccauucacgccgaucagcugacaccuacauggcggguguacuccaccggcagcaauguguuucagaccagagccggcugucugaucggagccgaguacgugaacaauagcuacgagugcgacauccccaucggcgcuggaaucugcgccagcuaccagacacagacaaacagcccucggagagccagaagcguggccagccagagcaucauugccuacacaaugucucugggcgccgagaacagcguggccuacuccaacaacucuaucgcuauccccaccaacuucaccaucagcgugaccacagagauccugccuguguccaugaccaagaccagcguggacugcaccauguacaucugcggcgauuccaccgagugcuccaaccugcugcugcaguacggcagcuucugcacccagcugaauagagcccugacagggaucgccguggaacaggacaagaacacccaagagguguucgcccaagugaagcagaucuacaagaccccuccuaucaaggacuucggcggcuucaauuucagccagauucugcccgauccuagcaagcccagcaagcggagcuucaucgaggaccugcuguucaacaaagugacacuggccgacgccggcuucaucaagcaguauggcgauugucugggcgacauugccgccagggaucugauuugcgcccagaaguuuaacggacugacagugcugccuccucugcugaccgaugagaugaucgcccaguacacaucugcccugcuggccggcacaaucacaagcggcuggacauuuggagcaggcgccgcucugcagauccccuuugcuaugcagauggccuaccgguucaacggcaucggagugacccagaaugugcuguacgagaaccagaagcugaucgccaaccaguucaacagcgccaucggcaagauccaggacagccugagcagcacagcaagcgcccugggaaagcugcaggacguggucaaccagaaugcccaggcacugaacacccuggucaagcagcuguccuccaacuucggcgccaucagcucugugcugaacgauauccugagcagacuggacccuccugaggccgaggugcagaucgacagacugaucacaggcagacugcagagccuccagacauacgugacccagcagcugaucagagccgccgagauuagagccucugccaaucuggccgccaucaagaugucugagugugugcugggccagagcaagagaguggacuuuugcggcaagggcuaccaccugaugagcuucccucagucugccccucacggcgugguguuucugcacgugacauaugugcccgcucaagagaagaauuucaccaccgcuccagccaucugccacgacggcaaagcccacuuuccuagagaaggcguguucguguccaacggcacccauugguucgugacacagcggaacuucuacgagccccagaucaucaccaccgacaacaccuucgugucuggcaacugcgacgucgugaucggcauugugaacaauaccguguacgacccucugcagcccgagcuggacagcuucaaagaggaacuggacaaguacuuuaagaaccacacaagccccgacguggaccugggcgauaucagcggaaucaaugccagcgucgugaacauccagaaagagaucgaccggcugaacgagguggccaagaaucugaacgagagccugaucgaccugcaagaacuggggaaguacgagcaguacaucaaguggcccugguacaucuggcugggcuuuaucgccggacugauugccaucgugauggucacaaucaugcuguguugcaugaccagcugcuguagcugccugaagggcuguuguagcuguggcagcugcugcaaguucgacgaggacgauucugagcccgugcugaagggcgugaaacugcacuacacaugaggacuaguuauaagacugacuagcccgaugggccucccaacgggcccuccuccccuccuugcaccgagauuaauaaaaaaaaaaaaaaaaaaaaaaaaaaaaaaaaaaaaaaaaaaaaaaaaaaaaaaaaaaaaaaaaaaaaaaaaaaaaaaaaaaaaaaaaaaaaaaaaaaaa

SEQ ID NO: 25604 - RNA, 4011 nt, Artificial Sequence
  SARS-CoV-2/Wuhan/WIV05/2019__EPI_ISL_402128 spike protein mRNA gc mod (1-1273)(K986P_V987P_K986P_V987P_S13I_W152C_L452R_D614G)
aggagaaagcuuaccauguucguguuccuggugcugcugccucugguguccauccagugugugaaccugaccaccagaacacagcugccuccagccuacaccaacagcuuuaccagaggcguguacuaccccgacaagguguucagauccagcgugcugcacucuacccaggaccuguuccugccuuucuucagcaacgugaccugguuccacgccauccacguguccggcaccaauggcaccaagagauucgacaaccccgugcugcccuucaacgacgggguguacuuugccagcaccgagaaguccaacaucaucagaggcuggaucuucggcaccacacuggacagcaagacccagagccugcugaucgugaacaacgccaccaacguggucaucaaagugugcgaguuccaguucugcaacgaccccuuccugggcgucuacuaccacaagaacaacaagagcugcauggaaagcgaguuccggguguacagcagcgccaacaacugcaccuucgaguacgugucccagccuuuccugauggaccuggaaggcaagcagggcaacuucaagaaccugcgcgaguucguguuuaagaacaucgacggcuacuucaagaucuacagcaagcacaccccuaucaaccucgugcgggaucugccucagggcuucucugcucuggaaccccugguggaucugcccaucggcaucaacaucacccgguuucagacacugcuggcccugcacagaagcuaccugacaccuggcgauagcagcagcggauggacagcuggugccgccgcuuacuaugugggcuaccugcagccuagaaccuuccugcugaaguacaacgagaacggcaccaucaccgacgccguggauugugcucuggauccucugagcgagacaaagugcacccugaaguccuucaccguggaaaagggcaucuaccagaccagcaacuuccgggugcagcccaccgaauccaucgugcgguuccccaauaucaccaaucugugccccuucggcgagguguucaaugccaccagauucgccucuguguacgccuggaaccggaagcggaucagcaauugcguggccgacuacuccgugcuguacaacuccgccagcuucagcaccuucaagugcuacggcguguccccuaccaagcugaacgaccugugcuucacaaacguguacgccgacagcuucgugauccggggagaugaagugcggcagauugccccuggacagacaggcaagaucgccgacuacaacuacaagcugcccgacgacuucaccggcugugugauugccuggaacagcaacaaccuggacuccaaagucggcggcaacuacaauuaccgcuaccggcuguuccggaaguccaaucugaagcccuucgagcgggacaucuccaccgagaucuaucaggccggcagcaccccuuguaacggcguggaaggcuucaacugcuacuucccacugcaguccuacggcuuucagcccacaaauggcgugggcuaucagcccuacagagugguggugcugagcuucgaacugcugcaugccccugccacagugugcggcccuaagaaaagcaccaaucucgugaagaacaaaugcgugaacuucaacuucaacggccugaccggcaccggcgugcugacagagagcaacaagaaguuccugccauuccagcaguuuggccgggauaucgccgauaccacagacgccguuagagauccccagacacuggaaauccuggacaucaccccuugcagcuucggcggagugucugugaucaccccuggcaccaacaccagcaaucagguggcagugcuguaccagggcgugaacuguaccgaagugcccguggccauucacgccgaucagcugacaccuacauggcggguguacuccaccggcagcaauguguuucagaccagagccggcugucugaucggagccgagcacgugaacaauagcuacgagugcgacauccccaucggcgcuggaaucugcgccagcuaccagacacagacaaacagcccucggagagccagaagcguggccagccagagcaucauugccuacacaaugucucugggcgccgagaacagcguggccuacuccaacaacucuaucgcuauccccaccaacuucaccaucagcgugaccacagagauccugccuguguccaugaccaagaccagcguggacugcaccauguacaucugcggcgauuccaccgagugcuccaaccugcugcugcaguacggcagcuucugcacccagcugaauagagcccugacagggaucgccguggaacaggacaagaacacccaagagguguucgcccaagugaagcagaucuacaagaccccuccuaucaaggacuucggcggcuucaauuucagccagauucugcccgauccuagcaagcccagcaagcggagcuucaucgaggaccugcuguucaacaaagugacacuggccgacgccggcuucaucaagcaguauggcgauugucugggcgacauugccgccagggaucugauuugcgcccagaaguuuaacggacugacagugcugccuccucugcugaccgaugagaugaucgcccaguacacaucugcccugcuggccggcacaaucacaagcggcuggacauuuggagcaggcgccgcucugcagauccccuuugcuaugcagauggccuaccgguucaacggcaucggagugacccagaaugugcuguacgagaaccagaagcugaucgccaaccaguucaacagcgccaucggcaagauccaggacagccugagcagcacagcaagcgcccugggaaagcugcaggacguggucaaccagaaugcccaggcacugaacacccuggucaagcagcuguccuccaacuucggcgccaucagcucugugcugaacgauauccugagcagacuggacccuccugaggccgaggugcagaucgacagacugaucacaggcagacugcagagccuccagacauacgugacccagcagcugaucagagccgccgagauuagagccucugccaaucuggccgccaccaagaugucugagugugugcugggccagagcaagagaguggacuuuugcggcaagggcuaccaccugaugagcuucccucagucugccccucacggcgugguguuucugcacgugacauaugugcccgcucaagagaagaauuucaccaccgcuccagccaucugccacgacggcaaagcccacuuuccuagagaaggcguguucguguccaacggcacccauugguucgugacacagcggaacuucuacgagccccagaucaucaccaccgacaacaccuucgugucuggcaacugcgacgucgugaucggcauugugaacaauaccguguacgacccucugcagcccgagcuggacagcuucaaagaggaacuggacaaguacuuuaagaaccacacaagccccgacguggaccugggcgauaucagcggaaucaaugccagcgucgugaacauccagaaagagaucgaccggcugaacgagguggccaagaaucugaacgagagccugaucgaccugcaagaacuggggaaguacgagcaguacaucaaguggcccugguacaucuggcugggcuuuaucgccggacugauugccaucgugauggucacaaucaugcuguguugcaugaccagcugcuguagcugccugaagggcuguuguagcuguggcagcugcugcaaguucgacgaggacgauucugagcccgugcugaagggcgugaaacugcacuacacaugaggacuaguuauaagacugacuagcccgaugggccucccaacgggcccuccuccccuccuugcaccgagauuaauaaaaaaaaaaaaaaaaaaaaaaaaaaaaaaaaaaaaaaaaaaaaaaaaaaaaaaaaaaaaaaaaaaaaaaaaaaaaaaaaaaaaaaaaaaaaaaaaaaaa

SEQ ID NO: 25605 - RNA, 1347 nt, Artificial Sequence
  SARS-CoV-2/Wuhan/WIV05/2019__EPI_ISL_402128 spike protein mRNA gc (1-15,334-528) Ferritin construct
aggagaaagcuuaccauguucguguuccugguccuccugccccuggugagcucccagugcaaccugugccccuucggcgagguguucaacgccacccgguucgccagcgucuacgccuggaaccgcaagcggaucuccaacugcguggcggacuacagcgugcuguacaacuccgccagcuucuccacguucaagugcuacggcgucagccccaccaagcucaacgaccugugcuucaccaacguguacgccgacuccuucgugauccgcggggacgagguccggcagaucgcccccggccagaccgggaagaucgccgacuacaacuacaagcugccggacgacuucacgggcugcgugaucgcguggaacagcaacaaccucgacuccaaggucgggggcaacuacaacuaccuguaccgccuguuccgcaagagcaaccucaagcccuucgagcgggacaucuccaccgagaucuaccaggccggcagcacccccugcaacgggguggagggcuucaacugcuacuucccccugcaguccuacggguuccagccgaccaacggcgugggguaccagcccuaccggguggucgugcugagcuucgagcuccugcacgcccccgccacggugugcggccccaagggcggggguggaagcggcggggguggaagugacaucaucaagcuccugaacgagcaggucaacaaggagaugcaguccagcaaccuguacauguccaugagcuccuggugcuacacccacagccucgacggcgccgggcuguuccuguucgaccacgccgcggaggaguacgagcacgccaagaagcucaucaucuuccugaacgagaacaacgugcccgugcagcugaccuccaucagcgccccggagcacaaguucgagggccucacgcagaucuuccagaaggccuacgagcacgagcagcacaucuccgagagcaucaacaacaucguggaccacgccaucaaguccaaggaccacgcgaccuucaacuuccugcagugguacgucgccgagcagcacgaggaggaggugcuguucaaggacauccucgacaagaucgagcugaucgggaacgagaaccacggccuguaccucgccgaccaguacgugaaggggaucgccaagagccgcaaguccugaggacuaguuauaagacugacuagcccgaugggccucccaacgggcccuccuccccuccuugcaccgagauuaauagaucuaaaaaaaaaaaaaaaaaaaaaaaaaaaaaaaaaaaaaaaaaaaaaaaaaaaaaaaaaaaaaaaaaaaaaaaaaaaaaaaaaaaaaaaaaaaaaaaaaaaa

SEQ ID NO: 25606 - RNA, 945 nt, Artificial Sequence
  SARS-CoV-2/Wuhan/WIV05/2019__EPI_ISL_402128 spike protein mRNA gc (334-528) Foldon construct
aggagaaagcuuaccaugcccaugggcagccugcagccgcucgccacccuguaccugcucgggaugcugguggccuccguccuggcgaaccugugccccuucggcgagguguucaacgccacccgguucgccagcgucuacgccuggaaccgcaagcggaucuccaacugcguggcggacuacagcgugcuguacaacuccgccagcuucuccacguucaagugcuacggcgucagccccaccaagcucaacgaccugugcuucaccaacguguacgccgacuccuucgugauccgcggggacgagguccggcagaucgcccccggccagaccgggaagaucgccgacuacaacuacaagcugccggacgacuucacgggcugcgugaucgcguggaacagcaacaaccucgacuccaaggucgggggcaacuacaacuaccuguaccgccuguuccgcaagagcaaccucaagcccuucgagcgggacaucuccaccgagaucuaccaggccggcagcacccccugcaacgggguggagggcuucaacugcuacuucccccugcaguccuacggguuccagccgaccaacggcgugggguaccagcccuaccggguggucgugcugagcuucgagcuccugcacgcccccgccacggugugcggccccaagggcagcggcggguacauccccgaggccccgcgcgacggccaggccuacgugcggaaggacggcgaguggguccugcugagcaccuuccucugaggacuaguuauaagacugacuagcccgaugggccucccaacgggcccuccuccccuccuugcaccgagauuaauagaucuaaaaaaaaaaaaaaaaaaaaaaaaaaaaaaaaaaaaaaaaaaaaaaaaaaaaaaaaaaaaaaaaaaaaaaaaaaaaaaaaaaaaaaaaaaaaaaaaaaaa

SEQ ID NO: 25607 - RNA, 1323 nt, Artificial Sequence
  SARS-CoV-2/Wuhan/WIV05/2019__EPI_ISL_402128 spike protein mRNA gc (1-15,334-528) LumSynth construct
aggagaaagcuuaccauguucguguuccugguccuccugccccuggugagcucccagugcaaccugugccccuucggcgagguguucaacgccacccgguucgccagcgucuacgccuggaaccgcaagcggaucuccaacugcguggcggacuacagcgugcuguacaacuccgccagcuucuccacguucaagugcuacggcgucagccccaccaagcucaacgaccugugcuucaccaacguguacgccgacuccuucgugauccgcggggacgagguccggcagaucgcccccggccagaccgggaagaucgccgacuacaacuacaagcugccggacgacuucacgggcugcgugaucgcguggaacagcaacaaccucgacuccaaggucgggggcaacuacaacuaccuguaccgccuguuccgcaagagcaaccucaagcccuucgagcgggacaucuccaccgagaucuaccaggccggcagcacccccugcaacgggguggagggcuucaacugcuacuucccccugcaguccuacggguuccagccgaccaacggcgugggguaccagcccuaccggguggucgugcugagcuucgagcuccugcacgcccccgccacggugugcggccccaagggcggcggcggcuccggaggcggagguagcgggggacagaucuacgagggcaagcugaccgccgaggggcuccgcuucggcaucguggccagccgguucaaccacgcgcuggucgaccgccugguggagggggccaucgacgccaucgugcggcacggcgggcgcgaggaggacaucacccucguccgggugcccggcuccugggagaucccgguggccgccggcgagcuggcccgcaaggaggacaucgacgcggucaucgccaucggggugcugauccggggcgccacgccccacuucgacuacaucgccagcgagguguccaaggggcucgcggaccugagccuggagcuccgcaagcccaucaccuucggcgucaucaccgccgacacccuggagcaggccaucgagcgggccgggacgaagcacggcaacaagggcugggaggccgcgcuguccgccaucgagauggccaaccucuucaagagccugcgcugaggacuaguuauaagacugacuagcccgaugggccucccaacgggcccuccuccccuccuugcaccgagauuaauagaucuaaaaaaaaaaaaaaaaaaaaaaaaaaaaaaaaaaaaaaaaaaaaaaaaaaaaaaaaaaaaaaaaaaaaaaaaaaaaaaaaaaaaaaaaaaaaaaaaaaaa

SEQ ID NO: 25608 - RNA, 1284 nt, Artificial Sequence
  SARS-CoV-2/Wuhan/WIV05/2019__EPI_ISL_402128 spike protein mRNA gc (334-528) LumSynth construct
aggagaaagcuuaccaugcagaucuacgagggcaagcugaccgccgaggggcuccgcuucggcaucguggccagccgguucaaccacgcgcuggucgaccgccugguggagggggccaucgacgccaucgugcggcacggcgggcgcgaggaggacaucacccucguccgggugcccggcuccugggagaucccgguggccgccggcgagcuggcccgcaaggaggacaucgacgcggucaucgccaucggggugcugauccggggcgccacgccccacuucgacuacaucgccagcgagguguccaaggggcucgcggaccugagccuggagcuccgcaagcccaucaccuucggcgucaucaccgccgacacccuggagcaggccaucgagcgggccgggacgaagcacggcaacaagggcugggaggccgcgcuguccgccaucgagauggccaaccucuucaagagccugcgcggcgggggcgggagcggcgggggcggcuccgggggcgggaaccugugccccuucggcgagguguucaacgccacccgguucgccagcgucuacgccuggaaccgcaagcggaucuccaacugcguggcggacuacagcgugcuguacaacuccgccagcuucuccacguucaagugcuacggcgucagccccaccaagcucaacgaccugugcuucaccaacguguacgccgacuccuucgugauccgcggggacgagguccggcagaucgcccccggccagaccgggaagaucgccgacuacaacuacaagcugccggacgacuucacgggcugcgugaucgcguggaacagcaacaaccucgacuccaaggucgggggcaacuacaacuaccuguaccgccuguuccgcaagagcaaccucaagcccuucgagcgggacaucuccaccgagaucuaccaggccggcagcacccccugcaacgggguggagggcuucaacugcuacuucccccugcaguccuacggguuccagccgaccaacggcgugggguaccagcccuaccggguggucgugcugagcuucgagcuccugcacgcccccgccacggugugcggccccaagugaggacuaguuauaagacugacuagcccgaugggccucccaacgggcccuccuccccuccuugcaccgagauuaauagaucuaaaaaaaaaaaaaaaaaaaaaaaaaaaaaaaaaaaaaaaaaaaaaaaaaaaaaaaaaaaaaaaaaaaaaaaaaaaaaaaaaaaaaaaaaaaaaaaaaaaa

SEQ ID NO: 25609 - RNA, 4017 nt, Artificial Sequence
  SARS-CoV-2/Wuhan/WIV05/2019__EPI_ISL_402128 spike protein mRNA gc (1-1273)
aggagaaagcuuaccauguucguguuccugguccuccugccccuggugagcucccagugcgugaaccucaccacccgcacgcagcugccgcccgccuacaccaacagcuucacccggggcgucuacuaccccgacaagguguuccgcuccagcgugcugcacuccacccaggaccucuuccugcccuucuucagcaacgucacgugguuccacgccauccacguguccgggaccaacggcaccaagcgguucgacaacccggugcugcccuucaacgacggggucuacuucgcgagcaccgagaaguccaacaucauccgcggcuggaucuucgggacgacccucgacagcaagacccagucccugcugaucgugaacaacgccaccaacguggucaucaaggugugcgaguuccaguucugcaacgaccccuuccucggcguguacuaccacaagaacaacaagagcuggauggaguccgaguuccgggucuacagcuccgccaacaacugcacguucgaguacgugagccagcccuuccugauggaccuggagggcaagcaggggaacuucaagaaccuccgcgaguucguguucaagaacaucgacggcuacuucaagaucuacuccaagcacaccccgaucaaccugguccgggaccugccccagggguucagcgcccucgagccccugguggaccugcccaucggcaucaacaucacccgcuuccagacccuccuggcccugcaccgguccuaccucacgccgggggacagcagcuccggcuggaccgcgggcgccgccgccuacuacgugggguaccugcagccccgcaccuuccugcucaaguacaacgagaacggcaccaucacggacgcggucgacugcgcccuggacccccugagcgagaccaagugcacccucaaguccuucaccguggagaaggggaucuaccagacgagcaacuuccgggugcagcccaccgaguccaucguccgcuucccgaacaucaccaaccugugccccuucggcgagguguucaacgccacccgguucgccagcgucuacgccuggaaccgcaagcggaucuccaacugcguggcggacuacagcgugcuguacaacuccgccagcuucuccacguucaagugcuacggcgucagccccaccaagcucaacgaccugugcuucaccaacguguacgccgacuccuucgugauccgcggggacgagguccggcagaucgcccccggccagaccgggaagaucgccgacuacaacuacaagcugccggacgacuucacgggcugcgugaucgcguggaacagcaacaaccucgacuccaaggucgggggcaacuacaacuaccuguaccgccuguuccgcaagagcaaccucaagcccuucgagcgggacaucuccaccgagaucuaccaggccggcagcacccccugcaacgggguggagggcuucaacugcuacuucccccugcaguccuacggguuccagccgaccaacggcgugggguaccagcccuaccggguggucgugcugagcuucgagcuccugcacgcccccgccacggugugcggccccaagaaguccaccaaccuggucaagaacaagugcgugaacuucaacuucaacggccucaccgggaccggcgugcugaccgagagcaacaagaaguuccugccguuccagcaguucgggcgcgacaucgccgacacgaccgacgcgguccgcgacccccagacccuggagauccucgacaucacccccugcagcuucggcgggguguccgugaucacgccgggcaccaacaccagcaaccaggucgccgugcuguaccaggacgugaacugcaccgagguccccguggccauccacgccgaccagcugacgcccaccuggcggguguacuccaccggcagcaacgucuuccagacccgcgccgggugccucaucggcgcggagcacgugaacaacuccuacgagugcgacauccccaucggggccggcaucugcgccagcuaccagacgcagaccaacuccccgcggcgcgcccggagcguggcgucccagagcaucaucgccuacaccaugucccugggcgccgagaacagcgucgccuacuccaacaacagcaucgccauccccaccaacuucacgaucuccgugaccaccgagauccugcccgugagcaugaccaagacgagcgucgacugcaccauguacaucugcggggacuccaccgagugcagcaaccuccugcugcaguacggcuccuucugcacccagcucaaccgcgcgcugacggggaucgccguggagcaggacaagaacacccaggagguguucgcccaggucaagcagaucuacaagacgcccccgaucaaggacuucggcggguucaacuucagccagauccugcccgaccccuccaagcccagcaagcgguccuucaucgaggaccuccuguucaacaaggugacccuggccgacgccggcuucaucaagcaguacggcgacugccucggggacaucgcggcccgcgaccugaucugcgcccagaaguucaacggccugaccgugcucccgccccugcugaccgacgagaugaucgcccaguacaccagcgcccuccuggcggggaccaucacguccggcuggaccuucggggccggcgccgcccugcagauccccuucgcgaugcagauggccuaccgguucaacggcaucggggucacccagaacgugcucuacgagaaccagaagcugaucgccaaccaguucaacagcgccaucggcaagauccaggacucccugagcuccaccgccagcgcgcucgggaagcugcaggacguggucaaccagaacgcccaggcccugaacacgcucgugaagcagcuguccagcaacuucggcgccaucuccagcgugcugaacgacauccucucccgccuggacaaggucgaggccgaggugcagaucgaccggcugaucaccgggcgccuccagagccugcagaccuacgugacccagcagcugauccgggcggccgagauccgcgccagcgccaaccucgccgcgaccaagauguccgagugcguccugggccagagcaagcggguggacuucugcggcaagggguaccaccugauguccuucccccagagcgccccgcacggcguggucuuccuccacgugacguacguccccgcccaggagaagaacuucaccaccgcccccgcgaucugccacgacgggaaggcccacuucccccgcgagggcguguucguguccaacgggacccacugguucgucacgcagcggaacuucuacgagccgcagaucaucaccaccgacaacaccuucgugagcggcaacugcgacguggucaucggcaucgugaacaacacgguguacgacccccugcagcccgagcuggacuccuucaaggaggagcucgacaaguacuucaagaaccacaccagccccgacgucgaccugggggacaucuccggcaucaacgccagcguggugaacauccagaaggagaucgaccgccugaacgaggucgccaagaaccucaacgagucccugaucgaccugcaggagcucgggaaguacgagcaguacaucaaguggccgugguacaucuggcugggcuucaucgccggccugaucgcgaucgugauggugaccaucaugcucugcugcaugaccagcugcugcuccugccugaaggggugcugcagcugcggcuccugcugcaaguucgacgaggacgacagcgagcccguccugaagggggugaagcuccacuacacgugaggacuaguuauaagacugacuagcccgaugggccucccaacgggcccuccuccccuccuugcaccgagauuaauagaucuaaaaaaaaaaaaaaaaaaaaaaaaaaaaaaaaaaaaaaaaaaaaaaaaaaaaaaaaaaaaaaaaaaaaaaaaaaaaaaaaaaaaaaaaaaaaaaaaaaaa

SEQ ID NO: 25610 - RNA, 4017 nt, Artificial Sequence
  SARS-CoV-2/Wuhan/WIV05/2019__EPI_ISL_402128 spike protein mRNA gc (1-1273)(D614G)
aggagaaagcuuaccauguucguguuccugguccuccugccccuggugagcucccagugcgugaaccucaccacccgcacgcagcugccgcccgccuacaccaacagcuucacccggggcgucuacuaccccgacaagguguuccgcuccagcgugcugcacuccacccaggaccucuuccugcccuucuucagcaacgucacgugguuccacgccauccacguguccgggaccaacggcaccaagcgguucgacaacccggugcugcccuucaacgacggggucuacuucgcgagcaccgagaaguccaacaucauccgcggcuggaucuucgggacgacccucgacagcaagacccagucccugcugaucgugaacaacgccaccaacguggucaucaaggugugcgaguuccaguucugcaacgaccccuuccucggcguguacuaccacaagaacaacaagagcuggauggaguccgaguuccgggucuacagcuccgccaacaacugcacguucgaguacgugagccagcccuuccugauggaccuggagggcaagcaggggaacuucaagaaccuccgcgaguucguguucaagaacaucgacggcuacuucaagaucuacuccaagcacaccccgaucaaccugguccgggaccugccccagggguucagcgcccucgagccccugguggaccugcccaucggcaucaacaucacccgcuuccagacccuccuggcccugcaccgguccuaccucacgccgggggacagcagcuccggcuggaccgcgggcgccgccgccuacuacgugggguaccugcagccccgcaccuuccugcucaaguacaacgagaacggcaccaucacggacgcggucgacugcgcccuggacccccugagcgagaccaagugcacccucaaguccuucaccguggagaaggggaucuaccagacgagcaacuuccgggugcagcccaccgaguccaucguccgcuucccgaacaucaccaaccugugccccuucggcgagguguucaacgccacccgguucgccagcgucuacgccuggaaccgcaagcggaucuccaacugcguggcggacuacagcgugcuguacaacuccgccagcuucuccacguucaagugcuacggcgucagccccaccaagcucaacgaccugugcuucaccaacguguacgccgacuccuucgugauccgcggggacgagguccggcagaucgcccccggccagaccgggaagaucgccgacuacaacuacaagcugccggacgacuucacgggcugcgugaucgcguggaacagcaacaaccucgacuccaaggucgggggcaacuacaacuaccuguaccgccuguuccgcaagagcaaccucaagcccuucgagcgggacaucuccaccgagaucuaccaggccggcagcacccccugcaacgggguggagggcuucaacugcuacuucccccugcaguccuacggguuccagccgaccaacggcgugggguaccagcccuaccggguggucgugcugagcuucgagcuccugcacgcccccgccacggugugcggccccaagaaguccaccaaccuggucaagaacaagugcgugaacuucaacuucaacggccucaccgggaccggcgugcugaccgagagcaacaagaaguuccugccguuccagcaguucgggcgcgacaucgccgacacgaccgacgcgguccgcgacccccagacccuggagauccucgacaucacccccugcagcuucggcgggguguccgugaucacgccgggcaccaacaccagcaaccaggucgccgugcuguaccagggcgugaacugcaccgagguccccguggccauccacgccgaccagcugacgcccaccuggcggguguacuccaccggcagcaacgucuuccagacccgcgccgggugccucaucggcgcggagcacgugaacaacuccuacgagugcgacauccccaucggggccggcaucugcgccagcuaccagacgcagaccaacuccccgcggcgcgcccggagcguggcgucccagagcaucaucgccuacaccaugucccugggcgccgagaacagcgucgccuacuccaacaacagcaucgccauccccaccaacuucacgaucuccgugaccaccgagauccugcccgugagcaugaccaagacgagcgucgacugcaccauguacaucugcggggacuccaccgagugcagcaaccuccugcugcaguacggcuccuucugcacccagcucaaccgcgcgcugacggggaucgccguggagcaggacaagaacacccaggagguguucgcccaggucaagcagaucuacaagacgcccccgaucaaggacuucggcggguucaacuucagccagauccugcccgaccccuccaagcccagcaagcgguccuucaucgaggaccuccuguucaacaaggugacccuggccgacgccggcuucaucaagcaguacggcgacugccucggggacaucgcggcccgcgaccugaucugcgcccagaaguucaacggccugaccgugcucccgccccugcugaccgacgagaugaucgcccaguacaccagcgcccuccuggcggggaccaucacguccggcuggaccuucggggccggcgccgcccugcagauccccuucgcgaugcagauggccuaccgguucaacggcaucggggucacccagaacgugcucuacgagaaccagaagcugaucgccaaccaguucaacagcgccaucggcaagauccaggacucccugagcuccaccgccagcgcgcucgggaagcugcaggacguggucaaccagaacgcccaggcccugaacacgcucgugaagcagcuguccagcaacuucggcgccaucuccagcgugcugaacgacauccucucccgccuggacaaggucgaggccgaggugcagaucgaccggcugaucaccgggcgccuccagagccugcagaccuacgugacccagcagcugauccgggcggccgagauccgcgccagcgccaaccucgccgcgaccaagauguccgagugcguccugggccagagcaagcggguggacuucugcggcaagggguaccaccugauguccuucccccagagcgccccgcacggcguggucuuccuccacgugacguacguccccgcccaggagaagaacuucaccaccgcccccgcgaucugccacgacgggaaggcccacuucccccgcgagggcguguucguguccaacgggacccacugguucgucacgcagcggaacuucuacgagccgcagaucaucaccaccgacaacaccuucgugagcggcaacugcgacguggucaucggcaucgugaacaacacgguguacgacccccugcagcccgagcuggacuccuucaaggaggagcucgacaaguacuucaagaaccacaccagccccgacgucgaccugggggacaucuccggcaucaacgccagcguggugaacauccagaaggagaucgaccgccugaacgaggucgccaagaaccucaacgagucccugaucgaccugcaggagcucgggaaguacgagcaguacaucaaguggccgugguacaucuggcugggcuucaucgccggccugaucgcgaucgugauggugaccaucaugcucugcugcaugaccagcugcugcuccugccugaaggggugcugcagcugcggcuccugcugcaaguucgacgaggacgacagcgagcccguccugaagggggugaagcuccacuacacgugaggacuaguuauaagacugacuagcccgaugggccucccaacgggcccuccuccccuccuugcaccgagauuaauagaucuaaaaaaaaaaaaaaaaaaaaaaaaaaaaaaaaaaaaaaaaaaaaaaaaaaaaaaaaaaaaaaaaaaaaaaaaaaaaaaaaaaaaaaaaaaaaaaaaaaaa

SEQ ID NO: 25611 - RNA, 4017 nt, Artificial Sequence
  SARS-CoV-2/Wuhan/WIV05/2019__EPI_ISL_402128 spike protein mRNA gc (1-1273)(A222V_D614G)
aggagaaagcuuaccauguucguguuccugguccuccugccccuggugagcucccagugcgugaaccucaccacccgcacgcagcugccgcccgccuacaccaacagcuucacccggggcgucuacuaccccgacaagguguuccgcuccagcgugcugcacuccacccaggaccucuuccugcccuucuucagcaacgucacgugguuccacgccauccacguguccgggaccaacggcaccaagcgguucgacaacccggugcugcccuucaacgacggggucuacuucgcgagcaccgagaaguccaacaucauccgcggcuggaucuucgggacgacccucgacagcaagacccagucccugcugaucgugaacaacgccaccaacguggucaucaaggugugcgaguuccaguucugcaacgaccccuuccucggcguguacuaccacaagaacaacaagagcuggauggaguccgaguuccgggucuacagcuccgccaacaacugcacguucgaguacgugagccagcccuuccugauggaccuggagggcaagcaggggaacuucaagaaccuccgcgaguucguguucaagaacaucgacggcuacuucaagaucuacuccaagcacaccccgaucaaccugguccgggaccugccccagggguucagcguccucgagccccugguggaccugcccaucggcaucaacaucacccgcuuccagacccuccuggcccugcaccgguccuaccucacgccgggggacagcagcuccggcuggaccgcgggcgccgccgccuacuacgugggguaccugcagccccgcaccuuccugcucaaguacaacgagaacggcaccaucacggacgcggucgacugcgcccuggacccccugagcgagaccaagugcacccucaaguccuucaccguggagaaggggaucuaccagacgagcaacuuccgggugcagcccaccgaguccaucguccgcuucccgaacaucaccaaccugugccccuucggcgagguguucaacgccacccgguucgccagcgucuacgccuggaaccgcaagcggaucuccaacugcguggcggacuacagcgugcuguacaacuccgccagcuucuccacguucaagugcuacggcgucagccccaccaagcucaacgaccugugcuucaccaacguguacgccgacuccuucgugauccgcggggacgagguccggcagaucgcccccggccagaccgggaagaucgccgacuacaacuacaagcugccggacgacuucacgggcugcgugaucgcguggaacagcaacaaccucgacuccaaggucgggggcaacuacaacuaccuguaccgccuguuccgcaagagcaaccucaagcccuucgagcgggacaucuccaccgagaucuaccaggccggcagcacccccugcaacgggguggagggcuucaacugcuacuucccccugcaguccuacggguuccagccgaccaacggcgugggguaccagcccuaccggguggucgugcugagcuucgagcuccugcacgcccccgccacggugugcggccccaagaaguccaccaaccuggucaagaacaagugcgugaacuucaacuucaacggccucaccgggaccggcgugcugaccgagagcaacaagaaguuccugccguuccagcaguucgggcgcgacaucgccgacacgaccgacgcgguccgcgacccccagacccuggagauccucgacaucacccccugcagcuucggcgggguguccgugaucacgccgggcaccaacaccagcaaccaggucgccgugcuguaccagggcgugaacugcaccgagguccccguggccauccacgccgaccagcugacgcccaccuggcggguguacuccaccggcagcaacgucuuccagacccgcgccgggugccucaucggcgcggagcacgugaacaacuccuacgagugcgacauccccaucggggccggcaucugcgccagcuaccagacgcagaccaacuccccgcggcgcgcccggagcguggcgucccagagcaucaucgccuacaccaugucccugggcgccgagaacagcgucgccuacuccaacaacagcaucgccauccccaccaacuucacgaucuccgugaccaccgagauccugcccgugagcaugaccaagacgagcgucgacugcaccauguacaucugcggggacuccaccgagugcagcaaccuccugcugcaguacggcuccuucugcacccagcucaaccgcgcgcugacggggaucgccguggagcaggacaagaacacccaggagguguucgcccaggucaagcagaucuacaagacgcccccgaucaaggacuucggcggguucaacuucagccagauccugcccgaccccuccaagcccagcaagcgguccuucaucgaggaccuccuguucaacaaggugacccuggccgacgccggcuucaucaagcaguacggcgacugccucggggacaucgcggcccgcgaccugaucugcgcccagaaguucaacggccugaccgugcucccgccccugcugaccgacgagaugaucgcccaguacaccagcgcccuccuggcggggaccaucacguccggcuggaccuucggggccggcgccgcccugcagauccccuucgcgaugcagauggccuaccgguucaacggcaucggggucacccagaacgugcucuacgagaaccagaagcugaucgccaaccaguucaacagcgccaucggcaagauccaggacucccugagcuccaccgccagcgcgcucgggaagcugcaggacguggucaaccagaacgcccaggcccugaacacgcucgugaagcagcuguccagcaacuucggcgccaucuccagcgugcugaacgacauccucucccgccuggacaaggucgaggccgaggugcagaucgaccggcugaucaccgggcgccuccagagccugcagaccuacgugacccagcagcugauccgggcggccgagauccgcgccagcgccaaccucgccgcgaccaagauguccgagugcguccugggccagagcaagcggguggacuucugcggcaagggguaccaccugauguccuucccccagagcgccccgcacggcguggucuuccuccacgugacguacguccccgcccaggagaagaacuucaccaccgcccccgcgaucugccacgacgggaaggcccacuucccccgcgagggcguguucguguccaacgggacccacugguucgucacgcagcggaacuucuacgagccgcagaucaucaccaccgacaacaccuucgugagcggcaacugcgacguggucaucggcaucgugaacaacacgguguacgacccccugcagcccgagcuggacuccuucaaggaggagcucgacaaguacuucaagaaccacaccagccccgacgucgaccugggggacaucuccggcaucaacgccagcguggugaacauccagaaggagaucgaccgccugaacgaggucgccaagaaccucaacgagucccugaucgaccugcaggagcucgggaaguacgagcaguacaucaaguggccgugguacaucuggcugggcuucaucgccggccugaucgcgaucgugauggugaccaucaugcucugcugcaugaccagcugcugcuccugccugaaggggugcugcagcugcggcuccugcugcaaguucgacgaggacgacagcgagcccguccugaagggggugaagcuccacuacacgugaggacuaguuauaagacugacuagcccgaugggccucccaacgggcccuccuccccuccuugcaccgagauuaauagaucuaaaaaaaaaaaaaaaaaaaaaaaaaaaaaaaaaaaaaaaaaaaaaaaaaaaaaaaaaaaaaaaaaaaaaaaaaaaaaaaaaaaaaaaaaaaaaaaaaaaa

SEQ ID NO: 25612 - RNA, 4017 nt, Artificial Sequence
  SARS-CoV-2/Wuhan/WIV05/2019__EPI_ISL_402128 spike protein mRNA gc (1-1273)(N439K_D614G)
aggagaaagcuuaccauguucguguuccugguccuccugccccuggugagcucccagugcgugaaccucaccacccgcacgcagcugccgcccgccuacaccaacagcuucacccggggcgucuacuaccccgacaagguguuccgcuccagcgugcugcacuccacccaggaccucuuccugcccuucuucagcaacgucacgugguuccacgccauccacguguccgggaccaacggcaccaagcgguucgacaacccggugcugcccuucaacgacggggucuacuucgcgagcaccgagaaguccaacaucauccgcggcuggaucuucgggacgacccucgacagcaagacccagucccugcugaucgugaacaacgccaccaacguggucaucaaggugugcgaguuccaguucugcaacgaccccuuccucggcguguacuaccacaagaacaacaagagcuggauggaguccgaguuccgggucuacagcuccgccaacaacugcacguucgaguacgugagccagcccuuccugauggaccuggagggcaagcaggggaacuucaagaaccuccgcgaguucguguucaagaacaucgacggcuacuucaagaucuacuccaagcacaccccgaucaaccugguccgggaccugccccagggguucagcgcccucgagccccugguggaccugcccaucggcaucaacaucacccgcuuccagacccuccuggcccugcaccgguccuaccucacgccgggggacagcagcuccggcuggaccgcgggcgccgccgccuacuacgugggguaccugcagccccgcaccuuccugcucaaguacaacgagaacggcaccaucacggacgcggucgacugcgcccuggacccccugagcgagaccaagugcacccucaaguccuucaccguggagaaggggaucuaccagacgagcaacuuccgggugcagcccaccgaguccaucguccgcuucccgaacaucaccaaccugugccccuucggcgagguguucaacgccacccgguucgccagcgucuacgccuggaaccgcaagcggaucuccaacugcguggcggacuacagcgugcuguacaacuccgccagcuucuccacguucaagugcuacggcgucagccccaccaagcucaacgaccugugcuucaccaacguguacgccgacuccuucgugauccgcggggacgagguccggcagaucgcccccggccagaccgggaagaucgccgacuacaacuacaagcugccggacgacuucacgggcugcgugaucgcguggaacagcaagaaccucgacuccaaggucgggggcaacuacaacuaccuguaccgccuguuccgcaagagcaaccucaagcccuucgagcgggacaucuccaccgagaucuaccaggccggcagcacccccugcaacgggguggagggcuucaacugcuacuucccccugcaguccuacggguuccagccgaccaacggcgugggguaccagcccuaccggguggucgugcugagcuucgagcuccugcacgcccccgccacggugugcggccccaagaaguccaccaaccuggucaagaacaagugcgugaacuucaacuucaacggccucaccgggaccggcgugcugaccgagagcaacaagaaguuccugccguuccagcaguucgggcgcgacaucgccgacacgaccgacgcgguccgcgacccccagacccuggagauccucgacaucacccccugcagcuucggcgggguguccgugaucacgccgggcaccaacaccagcaaccaggucgccgugcuguaccagggcgugaacugcaccgagguccccguggccauccacgccgaccagcugacgcccaccuggcggguguacuccaccggcagcaacgucuuccagacccgcgccgggugccucaucggcgcggagcacgugaacaacuccuacgagugcgacauccccaucggggccggcaucugcgccagcuaccagacgcagaccaacuccccgcggcgcgcccggagcguggcgucccagagcaucaucgccuacaccaugucccugggcgccgagaacagcgucgccuacuccaacaacagcaucgccauccccaccaacuucacgaucuccgugaccaccgagauccugcccgugagcaugaccaagacgagcgucgacugcaccauguacaucugcggggacuccaccgagugcagcaaccuccugcugcaguacggcuccuucugcacccagcucaaccgcgcgcugacggggaucgccguggagcaggacaagaacacccaggagguguucgcccaggucaagcagaucuacaagacgcccccgaucaaggacuucggcggguucaacuucagccagauccugcccgaccccuccaagcccagcaagcgguccuucaucgaggaccuccuguucaacaaggugacccuggccgacgccggcuucaucaagcaguacggcgacugccucggggacaucgcggcccgcgaccugaucugcgcccagaaguucaacggccugaccgugcucccgccccugcugaccgacgagaugaucgcccaguacaccagcgcccuccuggcggggaccaucacguccggcuggaccuucggggccggcgccgcccugcagauccccuucgcgaugcagauggccuaccgguucaacggcaucggggucacccagaacgugcucuacgagaaccagaagcugaucgccaaccaguucaacagcgccaucggcaagauccaggacucccugagcuccaccgccagcgcgcucgggaagcugcaggacguggucaaccagaacgcccaggcccugaacacgcucgugaagcagcuguccagcaacuucggcgccaucuccagcgugcugaacgacauccucucccgccuggacaaggucgaggccgaggugcagaucgaccggcugaucaccgggcgccuccagagccugcagaccuacgugacccagcagcugauccgggcggccgagauccgcgccagcgccaaccucgccgcgaccaagauguccgagugcguccugggccagagcaagcggguggacuucugcggcaagggguaccaccugauguccuucccccagagcgccccgcacggcguggucuuccuccacgugacguacguccccgcccaggagaagaacuucaccaccgcccccgcgaucugccacgacgggaaggcccacuucccccgcgagggcguguucguguccaacgggacccacugguucgucacgcagcggaacuucuacgagccgcagaucaucaccaccgacaacaccuucgugagcggcaacugcgacguggucaucggcaucgugaacaacacgguguacgacccccugcagcccgagcuggacuccuucaaggaggagcucgacaaguacuucaagaaccacaccagccccgacgucgaccugggggacaucuccggcaucaacgccagcguggugaacauccagaaggagaucgaccgccugaacgaggucgccaagaaccucaacgagucccugaucgaccugcaggagcucgggaaguacgagcaguacaucaaguggccgugguacaucuggcugggcuucaucgccggccugaucgcgaucgugauggugaccaucaugcucugcugcaugaccagcugcugcuccugccugaaggggugcugcagcugcggcuccugcugcaaguucgacgaggacgacagcgagcccguccugaagggggugaagcuccacuacacgugaggacuaguuauaagacugacuagcccgaugggccucccaacgggcccuccuccccuccuugcaccgagauuaauagaucuaaaaaaaaaaaaaaaaaaaaaaaaaaaaaaaaaaaaaaaaaaaaaaaaaaaaaaaaaaaaaaaaaaaaaaaaaaaaaaaaaaaaaaaaaaaaaaaaaaaa

SEQ ID NO: 25613 - RNA, 4017 nt, Artificial Sequence
  SARS-CoV-2/Wuhan/WIV05/2019__EPI_ISL_402128 spike protein mRNA gc (1-1273)(S477N_D614G)
aggagaaagcuuaccauguucguguuccugguccuccugccccuggugagcucccagugcgugaaccucaccacccgcacgcagcugccgcccgccuacaccaacagcuucacccggggcgucuacuaccccgacaagguguuccgcuccagcgugcugcacuccacccaggaccucuuccugcccuucuucagcaacgucacgugguuccacgccauccacguguccgggaccaacggcaccaagcgguucgacaacccggugcugcccuucaacgacggggucuacuucgcgagcaccgagaaguccaacaucauccgcggcuggaucuucgggacgacccucgacagcaagacccagucccugcugaucgugaacaacgccaccaacguggucaucaaggugugcgaguuccaguucugcaacgaccccuuccucggcguguacuaccacaagaacaacaagagcuggauggaguccgaguuccgggucuacagcuccgccaacaacugcacguucgaguacgugagccagcccuuccugauggaccuggagggcaagcaggggaacuucaagaaccuccgcgaguucguguucaagaacaucgacggcuacuucaagaucuacuccaagcacaccccgaucaaccugguccgggaccugccccagggguucagcgcccucgagccccugguggaccugcccaucggcaucaacaucacccgcuuccagacccuccuggcccugcaccgguccuaccucacgccgggggacagcagcuccggcuggaccgcgggcgccgccgccuacuacgugggguaccugcagccccgcaccuuccugcucaaguacaacgagaacggcaccaucacggacgcggucgacugcgcccuggacccccugagcgagaccaagugcacccucaaguccuucaccguggagaaggggaucuaccagacgagcaacuuccgggugcagcccaccgaguccaucguccgcuucccgaacaucaccaaccugugccccuucggcgagguguucaacgccacccgguucgccagcgucuacgccuggaaccgcaagcggaucuccaacugcguggcggacuacagcgugcuguacaacuccgccagcuucuccacguucaagugcuacggcgucagccccaccaagcucaacgaccugugcuucaccaacguguacgccgacuccuucgugauccgcggggacgagguccggcagaucgcccccggccagaccgggaagaucgccgacuacaacuacaagcugccggacgacuucacgggcugcgugaucgcguggaacagcaacaaccucgacuccaaggucgggggcaacuacaacuaccuguaccgccuguuccgcaagagcaaccucaagcccuucgagcgggacaucuccaccgagaucuaccaggccggcaacacccccugcaacgggguggagggcuucaacugcuacuucccccugcaguccuacggguuccagccgaccaacggcgugggguaccagcccuaccggguggucgugcugagcuucgagcuccugcacgcccccgccacggugugcggccccaagaaguccaccaaccuggucaagaacaagugcgugaacuucaacuucaacggccucaccgggaccggcgugcugaccgagagcaacaagaaguuccugccguuccagcaguucgggcgcgacaucgccgacacgaccgacgcgguccgcgacccccagacccuggagauccucgacaucacccccugcagcuucggcgggguguccgugaucacgccgggcaccaacaccagcaaccaggucgccgugcuguaccagggcgugaacugcaccgagguccccguggccauccacgccgaccagcugacgcccaccuggcggguguacuccaccggcagcaacgucuuccagacccgcgccgggugccucaucggcgcggagcacgugaacaacuccuacgagugcgacauccccaucggggccggcaucugcgccagcuaccagacgcagaccaacuccccgcggcgcgcccggagcguggcgucccagagcaucaucgccuacaccaugucccugggcgccgagaacagcgucgccuacuccaacaacagcaucgccauccccaccaacuucacgaucuccgugaccaccgagauccugcccgugagcaugaccaagacgagcgucgacugcaccauguacaucugcggggacuccaccgagugcagcaaccuccugcugcaguacggcuccuucugcacccagcucaaccgcgcgcugacggggaucgccguggagcaggacaagaacacccaggagguguucgcccaggucaagcagaucuacaagacgcccccgaucaaggacuucggcggguucaacuucagccagauccugcccgaccccuccaagcccagcaagcgguccuucaucgaggaccuccuguucaacaaggugacccuggccgacgccggcuucaucaagcaguacggcgacugccucggggacaucgcggcccgcgaccugaucugcgcccagaaguucaacggccugaccgugcucccgccccugcugaccgacgagaugaucgcccaguacaccagcgcccuccuggcggggaccaucacguccggcuggaccuucggggccggcgccgcccugcagauccccuucgcgaugcagauggccuaccgguucaacggcaucggggucacccagaacgugcucuacgagaaccagaagcugaucgccaaccaguucaacagcgccaucggcaagauccaggacucccugagcuccaccgccagcgcgcucgggaagcugcaggacguggucaaccagaacgcccaggcccugaacacgcucgugaagcagcuguccagcaacuucggcgccaucuccagcgugcugaacgacauccucucccgccuggacaaggucgaggccgaggugcagaucgaccggcugaucaccgggcgccuccagagccugcagaccuacgugacccagcagcugauccgggcggccgagauccgcgccagcgccaaccucgccgcgaccaagauguccgagugcguccugggccagagcaagcggguggacuucugcggcaagggguaccaccugauguccuucccccagagcgccccgcacggcguggucuuccuccacgugacguacguccccgcccaggagaagaacuucaccaccgcccccgcgaucugccacgacgggaaggcccacuucccccgcgagggcguguucguguccaacgggacccacugguucgucacgcagcggaacuucuacgagccgcagaucaucaccaccgacaacaccuucgugagcggcaacugcgacguggucaucggcaucgugaacaacacgguguacgacccccugcagcccgagcuggacuccuucaaggaggagcucgacaaguacuucaagaaccacaccagccccgacgucgaccugggggacaucuccggcaucaacgccagcguggugaacauccagaaggagaucgaccgccugaacgaggucgccaagaaccucaacgagucccugaucgaccugcaggagcucgggaaguacgagcaguacaucaaguggccgugguacaucuggcugggcuucaucgccggccugaucgcgaucgugauggugaccaucaugcucugcugcaugaccagcugcugcuccugccugaaggggugcugcagcugcggcuccugcugcaaguucgacgaggacgacagcgagcccguccugaagggggugaagcuccacuacacgugaggacuaguuauaagacugacuagcccgaugggccucccaacgggcccuccuccccuccuugcaccgagauuaauagaucuaaaaaaaaaaaaaaaaaaaaaaaaaaaaaaaaaaaaaaaaaaaaaaaaaaaaaaaaaaaaaaaaaaaaaaaaaaaaaaaaaaaaaaaaaaaaaaaaaaaa

SEQ ID NO: 25614 - RNA, 4017 nt, Artificial Sequence
  SARS-CoV-2/Wuhan/WIV05/2019__EPI_ISL_402128 spike protein mRNA gc (1-1273)(N501Y_D614G)
aggagaaagcuuaccauguucguguuccugguccuccugccccuggugagcucccagugcgugaaccucaccacccgcacgcagcugccgcccgccuacaccaacagcuucacccggggcgucuacuaccccgacaagguguuccgcuccagcgugcugcacuccacccaggaccucuuccugcccuucuucagcaacgucacgugguuccacgccauccacguguccgggaccaacggcaccaagcgguucgacaacccggugcugcccuucaacgacggggucuacuucgcgagcaccgagaaguccaacaucauccgcggcuggaucuucgggacgacccucgacagcaagacccagucccugcugaucgugaacaacgccaccaacguggucaucaaggugugcgaguuccaguucugcaacgaccccuuccucggcguguacuaccacaagaacaacaagagcuggauggaguccgaguuccgggucuacagcuccgccaacaacugcacguucgaguacgugagccagcccuuccugauggaccuggagggcaagcaggggaacuucaagaaccuccgcgaguucguguucaagaacaucgacggcuacuucaagaucuacuccaagcacaccccgaucaaccugguccgggaccugccccagggguucagcgcccucgagccccugguggaccugcccaucggcaucaacaucacccgcuuccagacccuccuggcccugcaccgguccuaccucacgccgggggacagcagcuccggcuggaccgcgggcgccgccgccuacuacgugggguaccugcagccccgcaccuuccugcucaaguacaacgagaacggcaccaucacggacgcggucgacugcgcccuggacccccugagcgagaccaagugcacccucaaguccuucaccguggagaaggggaucuaccagacgagcaacuuccgggugcagcccaccgaguccaucguccgcuucccgaacaucaccaaccugugccccuucggcgagguguucaacgccacccgguucgccagcgucuacgccuggaaccgcaagcggaucuccaacugcguggcggacuacagcgugcuguacaacuccgccagcuucuccacguucaagugcuacggcgucagccccaccaagcucaacgaccugugcuucaccaacguguacgccgacuccuucgugauccgcggggacgagguccggcagaucgcccccggccagaccgggaagaucgccgacuacaacuacaagcugccggacgacuucacgggcugcgugaucgcguggaacagcaacaaccucgacuccaaggucgggggcaacuacaacuaccuguaccgccuguuccgcaagagcaaccucaagcccuucgagcgggacaucuccaccgagaucuaccaggccggcagcacccccugcaacgggguggagggcuucaacugcuacuucccccugcaguccuacggguuccagccgaccuacggcgugggguaccagcccuaccggguggucgugcugagcuucgagcuccugcacgcccccgccacggugugcggccccaagaaguccaccaaccuggucaagaacaagugcgugaacuucaacuucaacggccucaccgggaccggcgugcugaccgagagcaacaagaaguuccugccguuccagcaguucgggcgcgacaucgccgacacgaccgacgcgguccgcgacccccagacccuggagauccucgacaucacccccugcagcuucggcgggguguccgugaucacgccgggcaccaacaccagcaaccaggucgccgugcuguaccagggcgugaacugcaccgagguccccguggccauccacgccgaccagcugacgcccaccuggcggguguacuccaccggcagcaacgucuuccagacccgcgccgggugccucaucggcgcggagcacgugaacaacuccuacgagugcgacauccccaucggggccggcaucugcgccagcuaccagacgcagaccaacuccccgcggcgcgcccggagcguggcgucccagagcaucaucgccuacaccaugucccugggcgccgagaacagcgucgccuacuccaacaacagcaucgccauccccaccaacuucacgaucuccgugaccaccgagauccugcccgugagcaugaccaagacgagcgucgacugcaccauguacaucugcggggacuccaccgagugcagcaaccuccugcugcaguacggcuccuucugcacccagcucaaccgcgcgcugacggggaucgccguggagcaggacaagaacacccaggagguguucgcccaggucaagcagaucuacaagacgcccccgaucaaggacuucggcggguucaacuucagccagauccugcccgaccccuccaagcccagcaagcgguccuucaucgaggaccuccuguucaacaaggugacccuggccgacgccggcuucaucaagcaguacggcgacugccucggggacaucgcggcccgcgaccugaucugcgcccagaaguucaacggccugaccgugcucccgccccugcugaccgacgagaugaucgcccaguacaccagcgcccuccuggcggggaccaucacguccggcuggaccuucggggccggcgccgcccugcagauccccuucgcgaugcagauggccuaccgguucaacggcaucggggucacccagaacgugcucuacgagaaccagaagcugaucgccaaccaguucaacagcgccaucggcaagauccaggacucccugagcuccaccgccagcgcgcucgggaagcugcaggacguggucaaccagaacgcccaggcccugaacacgcucgugaagcagcuguccagcaacuucggcgccaucuccagcgugcugaacgacauccucucccgccuggacaaggucgaggccgaggugcagaucgaccggcugaucaccgggcgccuccagagccugcagaccuacgugacccagcagcugauccgggcggccgagauccgcgccagcgccaaccucgccgcgaccaagauguccgagugcguccugggccagagcaagcggguggacuucugcggcaagggguaccaccugauguccuucccccagagcgccccgcacggcguggucuuccuccacgugacguacguccccgcccaggagaagaacuucaccaccgcccccgcgaucugccacgacgggaaggcccacuucccccgcgagggcguguucguguccaacgggacccacugguucgucacgcagcggaacuucuacgagccgcagaucaucaccaccgacaacaccuucgugagcggcaacugcgacguggucaucggcaucgugaacaacacgguguacgacccccugcagcccgagcuggacuccuucaaggaggagcucgacaaguacuucaagaaccacaccagccccgacgucgaccugggggacaucuccggcaucaacgccagcguggugaacauccagaaggagaucgaccgccugaacgaggucgccaagaaccucaacgagucccugaucgaccugcaggagcucgggaaguacgagcaguacaucaaguggccgugguacaucuggcugggcuucaucgccggccugaucgcgaucgugauggugaccaucaugcucugcugcaugaccagcugcugcuccugccugaaggggugcugcagcugcggcuccugcugcaaguucgacgaggacgacagcgagcccguccugaagggggugaagcuccacuacacgugaggacuaguuauaagacugacuagcccgaugggccucccaacgggcccuccuccccuccuugcaccgagauuaauagaucuaaaaaaaaaaaaaaaaaaaaaaaaaaaaaaaaaaaaaaaaaaaaaaaaaaaaaaaaaaaaaaaaaaaaaaaaaaaaaaaaaaaaaaaaaaaaaaaaaaaa

SEQ ID NO: 25615 - RNA, 4011 nt, Artificial Sequence
  SARS-CoV-2/Wuhan/WIV05/2019__EPI_ISL_402128 spike protein mRNA gc (1-1273)(H69del_V70del_D614G)
aggagaaagcuuaccauguucguguuccugguccuccugccccuggugagcucccagugcgugaaccucaccacccgcacgcagcugccgcccgccuacaccaacagcuucacccggggcgucuacuaccccgacaagguguuccgcuccagcgugcugcacuccacccaggaccucuuccugcccuucuucagcaacgucacgugguuccacgccaucuccgggaccaacggcaccaagcgguucgacaacccggugcugcccuucaacgacggggucuacuucgcgagcaccgagaaguccaacaucauccgcggcuggaucuucgggacgacccucgacagcaagacccagucccugcugaucgugaacaacgccaccaacguggucaucaaggugugcgaguuccaguucugcaacgaccccuuccucggcguguacuaccacaagaacaacaagagcuggauggaguccgaguuccgggucuacagcuccgccaacaacugcacguucgaguacgugagccagcccuuccugauggaccuggagggcaagcaggggaacuucaagaaccuccgcgaguucguguucaagaacaucgacggcuacuucaagaucuacuccaagcacaccccgaucaaccugguccgggaccugccccagggguucagcgcccucgagccccugguggaccugcccaucggcaucaacaucacccgcuuccagacccuccuggcccugcaccgguccuaccucacgccgggggacagcagcuccggcuggaccgcgggcgccgccgccuacuacgugggguaccugcagccccgcaccuuccugcucaaguacaacgagaacggcaccaucacggacgcggucgacugcgcccuggacccccugagcgagaccaagugcacccucaaguccuucaccguggagaaggggaucuaccagacgagcaacuuccgggugcagcccaccgaguccaucguccgcuucccgaacaucaccaaccugugccccuucggcgagguguucaacgccacccgguucgccagcgucuacgccuggaaccgcaagcggaucuccaacugcguggcggacuacagcgugcuguacaacuccgccagcuucuccacguucaagugcuacggcgucagccccaccaagcucaacgaccugugcuucaccaacguguacgccgacuccuucgugauccgcggggacgagguccggcagaucgcccccggccagaccgggaagaucgccgacuacaacuacaagcugccggacgacuucacgggcugcgugaucgcguggaacagcaacaaccucgacuccaaggucgggggcaacuacaacuaccuguaccgccuguuccgcaagagcaaccucaagcccuucgagcgggacaucuccaccgagaucuaccaggccggcagcacccccugcaacgggguggagggcuucaacugcuacuucccccugcaguccuacggguuccagccgaccaacggcgugggguaccagcccuaccggguggucgugcugagcuucgagcuccugcacgcccccgccacggugugcggccccaagaaguccaccaaccuggucaagaacaagugcgugaacuucaacuucaacggccucaccgggaccggcgugcugaccgagagcaacaagaaguuccugccguuccagcaguucgggcgcgacaucgccgacacgaccgacgcgguccgcgacccccagacccuggagauccucgacaucacccccugcagcuucggcgggguguccgugaucacgccgggcaccaacaccagcaaccaggucgccgugcuguaccagggcgugaacugcaccgagguccccguggccauccacgccgaccagcugacgcccaccuggcggguguacuccaccggcagcaacgucuuccagacccgcgccgggugccucaucggcgcggagcacgugaacaacuccuacgagugcgacauccccaucggggccggcaucugcgccagcuaccagacgcagaccaacuccccgcggcgcgcccggagcguggcgucccagagcaucaucgccuacaccaugucccugggcgccgagaacagcgucgccuacuccaacaacagcaucgccauccccaccaacuucacgaucuccgugaccaccgagauccugcccgugagcaugaccaagacgagcgucgacugcaccauguacaucugcggggacuccaccgagugcagcaaccuccugcugcaguacggcuccuucugcacccagcucaaccgcgcgcugacggggaucgccguggagcaggacaagaacacccaggagguguucgcccaggucaagcagaucuacaagacgcccccgaucaaggacuucggcggguucaacuucagccagauccugcccgaccccuccaagcccagcaagcgguccuucaucgaggaccuccuguucaacaaggugacccuggccgacgccggcuucaucaagcaguacggcgacugccucggggacaucgcggcccgcgaccugaucugcgcccagaaguucaacggccugaccgugcucccgccccugcugaccgacgagaugaucgcccaguacaccagcgcccuccuggcggggaccaucacguccggcuggaccuucggggccggcgccgcccugcagauccccuucgcgaugcagauggccuaccgguucaacggcaucggggucacccagaacgugcucuacgagaaccagaagcugaucgccaaccaguucaacagcgccaucggcaagauccaggacucccugagcuccaccgccagcgcgcucgggaagcugcaggacguggucaaccagaacgcccaggcccugaacacgcucgugaagcagcuguccagcaacuucggcgccaucuccagcgugcugaacgacauccucucccgccuggacaaggucgaggccgaggugcagaucgaccggcugaucaccgggcgccuccagagccugcagaccuacgugacccagcagcugauccgggcggccgagauccgcgccagcgccaaccucgccgcgaccaagauguccgagugcguccugggccagagcaagcggguggacuucugcggcaagggguaccaccugauguccuucccccagagcgccccgcacggcguggucuuccuccacgugacguacguccccgcccaggagaagaacuucaccaccgcccccgcgaucugccacgacgggaaggcccacuucccccgcgagggcguguucguguccaacgggacccacugguucgucacgcagcggaacuucuacgagccgcagaucaucaccaccgacaacaccuucgugagcggcaacugcgacguggucaucggcaucgugaacaacacgguguacgacccccugcagcccgagcuggacuccuucaaggaggagcucgacaaguacuucaagaaccacaccagccccgacgucgaccugggggacaucuccggcaucaacgccagcguggugaacauccagaaggagaucgaccgccugaacgaggucgccaagaaccucaacgagucccugaucgaccugcaggagcucgggaaguacgagcaguacaucaaguggccgugguacaucuggcugggcuucaucgccggccugaucgcgaucgugauggugaccaucaugcucugcugcaugaccagcugcugcuccugccugaaggggugcugcagcugcggcuccugcugcaaguucgacgaggacgacagcgagcccguccugaagggggugaagcuccacuacacgugaggacuaguuauaagacugacuagcccgaugggccucccaacgggcccuccuccccuccuugcaccgagauuaauagaucuaaaaaaaaaaaaaaaaaaaaaaaaaaaaaaaaaaaaaaaaaaaaaaaaaaaaaaaaaaaaaaaaaaaaaaaaaaaaaaaaaaaaaaaaaaaaaaaaaaaa

SEQ ID NO: 25616 - RNA, 4017 nt, Artificial Sequence
  SARS-CoV-2/Wuhan/WIV05/2019__EPI_ISL_402128 spike protein mRNA gc (1-1273)(Y453F_D614G)
aggagaaagcuuaccauguucguguuccugguccuccugccccuggugagcucccagugcgugaaccucaccacccgcacgcagcugccgcccgccuacaccaacagcuucacccggggcgucuacuaccccgacaagguguuccgcuccagcgugcugcacuccacccaggaccucuuccugcccuucuucagcaacgucacgugguuccacgccauccacguguccgggaccaacggcaccaagcgguucgacaacccggugcugcccuucaacgacggggucuacuucgcgagcaccgagaaguccaacaucauccgcggcuggaucuucgggacgacccucgacagcaagacccagucccugcugaucgugaacaacgccaccaacguggucaucaaggugugcgaguuccaguucugcaacgaccccuuccucggcguguacuaccacaagaacaacaagagcuggauggaguccgaguuccgggucuacagcuccgccaacaacugcacguucgaguacgugagccagcccuuccugauggaccuggagggcaagcaggggaacuucaagaaccuccgcgaguucguguucaagaacaucgacggcuacuucaagaucuacuccaagcacaccccgaucaaccugguccgggaccugccccagggguucagcgcccucgagccccugguggaccugcccaucggcaucaacaucacccgcuuccagacccuccuggcccugcaccgguccuaccucacgccgggggacagcagcuccggcuggaccgcgggcgccgccgccuacuacgugggguaccugcagccccgcaccuuccugcucaaguacaacgagaacggcaccaucacggacgcggucgacugcgcccuggacccccugagcgagaccaagugcacccucaaguccuucaccguggagaaggggaucuaccagacgagcaacuuccgggugcagcccaccgaguccaucguccgcuucccgaacaucaccaaccugugccccuucggcgagguguucaacgccacccgguucgccagcgucuacgccuggaaccgcaagcggaucuccaacugcguggcggacuacagcgugcuguacaacuccgccagcuucuccacguucaagugcuacggcgucagccccaccaagcucaacgaccugugcuucaccaacguguacgccgacuccuucgugauccgcggggacgagguccggcagaucgcccccggccagaccgggaagaucgccgacuacaacuacaagcugccggacgacuucacgggcugcgugaucgcguggaacagcaacaaccucgacuccaaggucgggggcaacuacaacuaccuguuccgccuguuccgcaagagcaaccucaagcccuucgagcgggacaucuccaccgagaucuaccaggccggcagcacccccugcaacgggguggagggcuucaacugcuacuucccccugcaguccuacggguuccagccgaccaacggcgugggguaccagcccuaccggguggucgugcugagcuucgagcuccugcacgcccccgccacggugugcggccccaagaaguccaccaaccuggucaagaacaagugcgugaacuucaacuucaacggccucaccgggaccggcgugcugaccgagagcaacaagaaguuccugccguuccagcaguucgggcgcgacaucgccgacacgaccgacgcgguccgcgacccccagacccuggagauccucgacaucacccccugcagcuucggcgggguguccgugaucacgccgggcaccaacaccagcaaccaggucgccgugcuguaccagggcgugaacugcaccgagguccccguggccauccacgccgaccagcugacgcccaccuggcggguguacuccaccggcagcaacgucuuccagacccgcgccgggugccucaucggcgcggagcacgugaacaacuccuacgagugcgacauccccaucggggccggcaucugcgccagcuaccagacgcagaccaacuccccgcggcgcgcccggagcguggcgucccagagcaucaucgccuacaccaugucccugggcgccgagaacagcgucgccuacuccaacaacagcaucgccauccccaccaacuucacgaucuccgugaccaccgagauccugcccgugagcaugaccaagacgagcgucgacugcaccauguacaucugcggggacuccaccgagugcagcaaccuccugcugcaguacggcuccuucugcacccagcucaaccgcgcgcugacggggaucgccguggagcaggacaagaacacccaggagguguucgcccaggucaagcagaucuacaagacgcccccgaucaaggacuucggcggguucaacuucagccagauccugcccgaccccuccaagcccagcaagcgguccuucaucgaggaccuccuguucaacaaggugacccuggccgacgccggcuucaucaagcaguacggcgacugccucggggacaucgcggcccgcgaccugaucugcgcccagaaguucaacggccugaccgugcucccgccccugcugaccgacgagaugaucgcccaguacaccagcgcccuccuggcggggaccaucacguccggcuggaccuucggggccggcgccgcccugcagauccccuucgcgaugcagauggccuaccgguucaacggcaucggggucacccagaacgugcucuacgagaaccagaagcugaucgccaaccaguucaacagcgccaucggcaagauccaggacucccugagcuccaccgccagcgcgcucgggaagcugcaggacguggucaaccagaacgcccaggcccugaacacgcucgugaagcagcuguccagcaacuucggcgccaucuccagcgugcugaacgacauccucucccgccuggacaaggucgaggccgaggugcagaucgaccggcugaucaccgggcgccuccagagccugcagaccuacgugacccagcagcugauccgggcggccgagauccgcgccagcgccaaccucgccgcgaccaagauguccgagugcguccugggccagagcaagcggguggacuucugcggcaagggguaccaccugauguccuucccccagagcgccccgcacggcguggucuuccuccacgugacguacguccccgcccaggagaagaacuucaccaccgcccccgcgaucugccacgacgggaaggcccacuucccccgcgagggcguguucguguccaacgggacccacugguucgucacgcagcggaacuucuacgagccgcagaucaucaccaccgacaacaccuucgugagcggcaacugcgacguggucaucggcaucgugaacaacacgguguacgacccccugcagcccgagcuggacuccuucaaggaggagcucgacaaguacuucaagaaccacaccagccccgacgucgaccugggggacaucuccggcaucaacgccagcguggugaacauccagaaggagaucgaccgccugaacgaggucgccaagaaccucaacgagucccugaucgaccugcaggagcucgggaaguacgagcaguacaucaaguggccgugguacaucuggcugggcuucaucgccggccugaucgcgaucgugauggugaccaucaugcucugcugcaugaccagcugcugcuccugccugaaggggugcugcagcugcggcuccugcugcaaguucgacgaggacgacagcgagcccguccugaagggggugaagcuccacuacacgugaggacuaguuauaagacugacuagcccgaugggccucccaacgggcccuccuccccuccuugcaccgagauuaauagaucuaaaaaaaaaaaaaaaaaaaaaaaaaaaaaaaaaaaaaaaaaaaaaaaaaaaaaaaaaaaaaaaaaaaaaaaaaaaaaaaaaaaaaaaaaaaaaaaaaaaa

SEQ ID NO: 25617 - RNA, 4017 nt, Artificial Sequence
  SARS-CoV-2/Wuhan/WIV05/2019__EPI_ISL_402128 spike protein mRNA gc (1-1273)(D614G_I692V)
aggagaaagcuuaccauguucguguuccugguccuccugccccuggugagcucccagugcgugaaccucaccacccgcacgcagcugccgcccgccuacaccaacagcuucacccggggcgucuacuaccccgacaagguguuccgcuccagcgugcugcacuccacccaggaccucuuccugcccuucuucagcaacgucacgugguuccacgccauccacguguccgggaccaacggcaccaagcgguucgacaacccggugcugcccuucaacgacggggucuacuucgcgagcaccgagaaguccaacaucauccgcggcuggaucuucgggacgacccucgacagcaagacccagucccugcugaucgugaacaacgccaccaacguggucaucaaggugugcgaguuccaguucugcaacgaccccuuccucggcguguacuaccacaagaacaacaagagcuggauggaguccgaguuccgggucuacagcuccgccaacaacugcacguucgaguacgugagccagcccuuccugauggaccuggagggcaagcaggggaacuucaagaaccuccgcgaguucguguucaagaacaucgacggcuacuucaagaucuacuccaagcacaccccgaucaaccugguccgggaccugccccagggguucagcgcccucgagccccugguggaccugcccaucggcaucaacaucacccgcuuccagacccuccuggcccugcaccgguccuaccucacgccgggggacagcagcuccggcuggaccgcgggcgccgccgccuacuacgugggguaccugcagccccgcaccuuccugcucaaguacaacgagaacggcaccaucacggacgcggucgacugcgcccuggacccccugagcgagaccaagugcacccucaaguccuucaccguggagaaggggaucuaccagacgagcaacuuccgggugcagcccaccgaguccaucguccgcuucccgaacaucaccaaccugugccccuucggcgagguguucaacgccacccgguucgccagcgucuacgccuggaaccgcaagcggaucuccaacugcguggcggacuacagcgugcuguacaacuccgccagcuucuccacguucaagugcuacggcgucagccccaccaagcucaacgaccugugcuucaccaacguguacgccgacuccuucgugauccgcggggacgagguccggcagaucgcccccggccagaccgggaagaucgccgacuacaacuacaagcugccggacgacuucacgggcugcgugaucgcguggaacagcaacaaccucgacuccaaggucgggggcaacuacaacuaccuguaccgccuguuccgcaagagcaaccucaagcccuucgagcgggacaucuccaccgagaucuaccaggccggcagcacccccugcaacgggguggagggcuucaacugcuacuucccccugcaguccuacggguuccagccgaccaacggcgugggguaccagcccuaccggguggucgugcugagcuucgagcuccugcacgcccccgccacggugugcggccccaagaaguccaccaaccuggucaagaacaagugcgugaacuucaacuucaacggccucaccgggaccggcgugcugaccgagagcaacaagaaguuccugccguuccagcaguucgggcgcgacaucgccgacacgaccgacgcgguccgcgacccccagacccuggagauccucgacaucacccccugcagcuucggcgggguguccgugaucacgccgggcaccaacaccagcaaccaggucgccgugcuguaccagggcgugaacugcaccgagguccccguggccauccacgccgaccagcugacgcccaccuggcggguguacuccaccggcagcaacgucuuccagacccgcgccgggugccucaucggcgcggagcacgugaacaacuccuacgagugcgacauccccaucggggccggcaucugcgccagcuaccagacgcagaccaacuccccgcggcgcgcccggagcguggcgucccagagcgucaucgccuacaccaugucccugggcgccgagaacagcgucgccuacuccaacaacagcaucgccauccccaccaacuucacgaucuccgugaccaccgagauccugcccgugagcaugaccaagacgagcgucgacugcaccauguacaucugcggggacuccaccgagugcagcaaccuccugcugcaguacggcuccuucugcacccagcucaaccgcgcgcugacggggaucgccguggagcaggacaagaacacccaggagguguucgcccaggucaagcagaucuacaagacgcccccgaucaaggacuucggcggguucaacuucagccagauccugcccgaccccuccaagcccagcaagcgguccuucaucgaggaccuccuguucaacaaggugacccuggccgacgccggcuucaucaagcaguacggcgacugccucggggacaucgcggcccgcgaccugaucugcgcccagaaguucaacggccugaccgugcucccgccccugcugaccgacgagaugaucgcccaguacaccagcgcccuccuggcggggaccaucacguccggcuggaccuucggggccggcgccgcccugcagauccccuucgcgaugcagauggccuaccgguucaacggcaucggggucacccagaacgugcucuacgagaaccagaagcugaucgccaaccaguucaacagcgccaucggcaagauccaggacucccugagcuccaccgccagcgcgcucgggaagcugcaggacguggucaaccagaacgcccaggcccugaacacgcucgugaagcagcuguccagcaacuucggcgccaucuccagcgugcugaacgacauccucucccgccuggacaaggucgaggccgaggugcagaucgaccggcugaucaccgggcgccuccagagccugcagaccuacgugacccagcagcugauccgggcggccgagauccgcgccagcgccaaccucgccgcgaccaagauguccgagugcguccugggccagagcaagcggguggacuucugcggcaagggguaccaccugauguccuucccccagagcgccccgcacggcguggucuuccuccacgugacguacguccccgcccaggagaagaacuucaccaccgcccccgcgaucugccacgacgggaaggcccacuucccccgcgagggcguguucguguccaacgggacccacugguucgucacgcagcggaacuucuacgagccgcagaucaucaccaccgacaacaccuucgugagcggcaacugcgacguggucaucggcaucgugaacaacacgguguacgacccccugcagcccgagcuggacuccuucaaggaggagcucgacaaguacuucaagaaccacaccagccccgacgucgaccugggggacaucuccggcaucaacgccagcguggugaacauccagaaggagaucgaccgccugaacgaggucgccaagaaccucaacgagucccugaucgaccugcaggagcucgggaaguacgagcaguacaucaaguggccgugguacaucuggcugggcuucaucgccggccugaucgcgaucgugauggugaccaucaugcucugcugcaugaccagcugcugcuccugccugaaggggugcugcagcugcggcuccugcugcaaguucgacgaggacgacagcgagcccguccugaagggggugaagcuccacuacacgugaggacuaguuauaagacugacuagcccgaugggccucccaacgggcccuccuccccuccuugcaccgagauuaauagaucuaaaaaaaaaaaaaaaaaaaaaaaaaaaaaaaaaaaaaaaaaaaaaaaaaaaaaaaaaaaaaaaaaaaaaaaaaaaaaaaaaaaaaaaaaaaaaaaaaaaa

SEQ ID NO: 25618 - RNA, 4017 nt, Artificial Sequence
  SARS-CoV-2/Wuhan/WIV05/2019__EPI_ISL_402128 spike protein mRNA gc (1-1273)(D614G_M1229I)
aggagaaagcuuaccauguucguguuccugguccuccugccccuggugagcucccagugcgugaaccucaccacccgcacgcagcugccgcccgccuacaccaacagcuucacccggggcgucuacuaccccgacaagguguuccgcuccagcgugcugcacuccacccaggaccucuuccugcccuucuucagcaacgucacgugguuccacgccauccacguguccgggaccaacggcaccaagcgguucgacaacccggugcugcccuucaacgacggggucuacuucgcgagcaccgagaaguccaacaucauccgcggcuggaucuucgggacgacccucgacagcaagacccagucccugcugaucgugaacaacgccaccaacguggucaucaaggugugcgaguuccaguucugcaacgaccccuuccucggcguguacuaccacaagaacaacaagagcuggauggaguccgaguuccgggucuacagcuccgccaacaacugcacguucgaguacgugagccagcccuuccugauggaccuggagggcaagcaggggaacuucaagaaccuccgcgaguucguguucaagaacaucgacggcuacuucaagaucuacuccaagcacaccccgaucaaccugguccgggaccugccccagggguucagcgcccucgagccccugguggaccugcccaucggcaucaacaucacccgcuuccagacccuccuggcccugcaccgguccuaccucacgccgggggacagcagcuccggcuggaccgcgggcgccgccgccuacuacgugggguaccugcagccccgcaccuuccugcucaaguacaacgagaacggcaccaucacggacgcggucgacugcgcccuggacccccugagcgagaccaagugcacccucaaguccuucaccguggagaaggggaucuaccagacgagcaacuuccgggugcagcccaccgaguccaucguccgcuucccgaacaucaccaaccugugccccuucggcgagguguucaacgccacccgguucgccagcgucuacgccuggaaccgcaagcggaucuccaacugcguggcggacuacagcgugcuguacaacuccgccagcuucuccacguucaagugcuacggcgucagccccaccaagcucaacgaccugugcuucaccaacguguacgccgacuccuucgugauccgcggggacgagguccggcagaucgcccccggccagaccgggaagaucgccgacuacaacuacaagcugccggacgacuucacgggcugcgugaucgcguggaacagcaacaaccucgacuccaaggucgggggcaacuacaacuaccuguaccgccuguuccgcaagagcaaccucaagcccuucgagcgggacaucuccaccgagaucuaccaggccggcagcacccccugcaacgggguggagggcuucaacugcuacuucccccugcaguccuacggguuccagccgaccaacggcgugggguaccagcccuaccggguggucgugcugagcuucgagcuccugcacgcccccgccacggugugcggccccaagaaguccaccaaccuggucaagaacaagugcgugaacuucaacuucaacggccucaccgggaccggcgugcugaccgagagcaacaagaaguuccugccguuccagcaguucgggcgcgacaucgccgacacgaccgacgcgguccgcgacccccagacccuggagauccucgacaucacccccugcagcuucggcgggguguccgugaucacgccgggcaccaacaccagcaaccaggucgccgugcuguaccagggcgugaacugcaccgagguccccguggccauccacgccgaccagcugacgcccaccuggcggguguacuccaccggcagcaacgucuuccagacccgcgccgggugccucaucggcgcggagcacgugaacaacuccuacgagugcgacauccccaucggggccggcaucugcgccagcuaccagacgcagaccaacuccccgcggcgcgcccggagcguggcgucccagagcaucaucgccuacaccaugucccugggcgccgagaacagcgucgccuacuccaacaacagcaucgccauccccaccaacuucacgaucuccgugaccaccgagauccugcccgugagcaugaccaagacgagcgucgacugcaccauguacaucugcggggacuccaccgagugcagcaaccuccugcugcaguacggcuccuucugcacccagcucaaccgcgcgcugacggggaucgccguggagcaggacaagaacacccaggagguguucgcccaggucaagcagaucuacaagacgcccccgaucaaggacuucggcggguucaacuucagccagauccugcccgaccccuccaagcccagcaagcgguccuucaucgaggaccuccuguucaacaaggugacccuggccgacgccggcuucaucaagcaguacggcgacugccucggggacaucgcggcccgcgaccugaucugcgcccagaaguucaacggccugaccgugcucccgccccugcugaccgacgagaugaucgcccaguacaccagcgcccuccuggcggggaccaucacguccggcuggaccuucggggccggcgccgcccugcagauccccuucgcgaugcagauggccuaccgguucaacggcaucggggucacccagaacgugcucuacgagaaccagaagcugaucgccaaccaguucaacagcgccaucggcaagauccaggacucccugagcuccaccgccagcgcgcucgggaagcugcaggacguggucaaccagaacgcccaggcccugaacacgcucgugaagcagcuguccagcaacuucggcgccaucuccagcgugcugaacgacauccucucccgccuggacaaggucgaggccgaggugcagaucgaccggcugaucaccgggcgccuccagagccugcagaccuacgugacccagcagcugauccgggcggccgagauccgcgccagcgccaaccucgccgcgaccaagauguccgagugcguccugggccagagcaagcggguggacuucugcggcaagggguaccaccugauguccuucccccagagcgccccgcacggcguggucuuccuccacgugacguacguccccgcccaggagaagaacuucaccaccgcccccgcgaucugccacgacgggaaggcccacuucccccgcgagggcguguucguguccaacgggacccacugguucgucacgcagcggaacuucuacgagccgcagaucaucaccaccgacaacaccuucgugagcggcaacugcgacguggucaucggcaucgugaacaacacgguguacgacccccugcagcccgagcuggacuccuucaaggaggagcucgacaaguacuucaagaaccacaccagccccgacgucgaccugggggacaucuccggcaucaacgccagcguggugaacauccagaaggagaucgaccgccugaacgaggucgccaagaaccucaacgagucccugaucgaccugcaggagcucgggaaguacgagcaguacaucaaguggccgugguacaucuggcugggcuucaucgccggccugaucgcgaucgugaucgugaccaucaugcucugcugcaugaccagcugcugcuccugccugaaggggugcugcagcugcggcuccugcugcaaguucgacgaggacgacagcgagcccguccugaagggggugaagcuccacuacacgugaggacuaguuauaagacugacuagcccgaugggccucccaacgggcccuccuccccuccuugcaccgagauuaauagaucuaaaaaaaaaaaaaaaaaaaaaaaaaaaaaaaaaaaaaaaaaaaaaaaaaaaaaaaaaaaaaaaaaaaaaaaaaaaaaaaaaaaaaaaaaaaaaaaaaaaa

SEQ ID NO: 25619 - RNA, 4011 nt, Artificial Sequence
  SARS-CoV-2/Wuhan/WIV05/2019__EPI_ISL_402128 spike protein mRNA gc (1-1273)(H69del_V70del_A222V_Y453F_S477N_D614G_I692V)
aggagaaagcuuaccauguucguguuccugguccuccugccccuggugagcucccagugcgugaaccucaccacccgcacgcagcugccgcccgccuacaccaacagcuucacccggggcgucuacuaccccgacaagguguuccgcuccagcgugcugcacuccacccaggaccucuuccugcccuucuucagcaacgucacgugguuccacgccaucuccgggaccaacggcaccaagcgguucgacaacccggugcugcccuucaacgacggggucuacuucgcgagcaccgagaaguccaacaucauccgcggcuggaucuucgggacgacccucgacagcaagacccagucccugcugaucgugaacaacgccaccaacguggucaucaaggugugcgaguuccaguucugcaacgaccccuuccucggcguguacuaccacaagaacaacaagagcuggauggaguccgaguuccgggucuacagcuccgccaacaacugcacguucgaguacgugagccagcccuuccugauggaccuggagggcaagcaggggaacuucaagaaccuccgcgaguucguguucaagaacaucgacggcuacuucaagaucuacuccaagcacaccccgaucaaccugguccgggaccugccccagggguucagcguccucgagccccugguggaccugcccaucggcaucaacaucacccgcuuccagacccuccuggcccugcaccgguccuaccucacgccgggggacagcagcuccggcuggaccgcgggcgccgccgccuacuacgugggguaccugcagccccgcaccuuccugcucaaguacaacgagaacggcaccaucacggacgcggucgacugcgcccuggacccccugagcgagaccaagugcacccucaaguccuucaccguggagaaggggaucuaccagacgagcaacuuccgggugcagcccaccgaguccaucguccgcuucccgaacaucaccaaccugugccccuucggcgagguguucaacgccacccgguucgccagcgucuacgccuggaaccgcaagcggaucuccaacugcguggcggacuacagcgugcuguacaacuccgccagcuucuccacguucaagugcuacggcgucagccccaccaagcucaacgaccugugcuucaccaacguguacgccgacuccuucgugauccgcggggacgagguccggcagaucgcccccggccagaccgggaagaucgccgacuacaacuacaagcugccggacgacuucacgggcugcgugaucgcguggaacagcaacaaccucgacuccaaggucgggggcaacuacaacuaccuguuccgccuguuccgcaagagcaaccucaagcccuucgagcgggacaucuccaccgagaucuaccaggccggcaacacccccugcaacgggguggagggcuucaacugcuacuucccccugcaguccuacggguuccagccgaccaacggcgugggguaccagcccuaccggguggucgugcugagcuucgagcuccugcacgcccccgccacggugugcggccccaagaaguccaccaaccuggucaagaacaagugcgugaacuucaacuucaacggccucaccgggaccggcgugcugaccgagagcaacaagaaguuccugccguuccagcaguucgggcgcgacaucgccgacacgaccgacgcgguccgcgacccccagacccuggagauccucgacaucacccccugcagcuucggcgggguguccgugaucacgccgggcaccaacaccagcaaccaggucgccgugcuguaccagggcgugaacugcaccgagguccccguggccauccacgccgaccagcugacgcccaccuggcggguguacuccaccggcagcaacgucuuccagacccgcgccgggugccucaucggcgcggagcacgugaacaacuccuacgagugcgacauccccaucggggccggcaucugcgccagcuaccagacgcagaccaacuccccgcggcgcgcccggagcguggcgucccagagcgucaucgccuacaccaugucccugggcgccgagaacagcgucgccuacuccaacaacagcaucgccauccccaccaacuucacgaucuccgugaccaccgagauccugcccgugagcaugaccaagacgagcgucgacugcaccauguacaucugcggggacuccaccgagugcagcaaccuccugcugcaguacggcuccuucugcacccagcucaaccgcgcgcugacggggaucgccguggagcaggacaagaacacccaggagguguucgcccaggucaagcagaucuacaagacgcccccgaucaaggacuucggcggguucaacuucagccagauccugcccgaccccuccaagcccagcaagcgguccuucaucgaggaccuccuguucaacaaggugacccuggccgacgccggcuucaucaagcaguacggcgacugccucggggacaucgcggcccgcgaccugaucugcgcccagaaguucaacggccugaccgugcucccgccccugcugaccgacgagaugaucgcccaguacaccagcgcccuccuggcggggaccaucacguccggcuggaccuucggggccggcgccgcccugcagauccccuucgcgaugcagauggccuaccgguucaacggcaucggggucacccagaacgugcucuacgagaaccagaagcugaucgccaaccaguucaacagcgccaucggcaagauccaggacucccugagcuccaccgccagcgcgcucgggaagcugcaggacguggucaaccagaacgcccaggcccugaacacgcucgugaagcagcuguccagcaacuucggcgccaucuccagcgugcugaacgacauccucucccgccuggacaaggucgaggccgaggugcagaucgaccggcugaucaccgggcgccuccagagccugcagaccuacgugacccagcagcugauccgggcggccgagauccgcgccagcgccaaccucgccgcgaccaagauguccgagugcguccugggccagagcaagcggguggacuucugcggcaagggguaccaccugauguccuucccccagagcgccccgcacggcguggucuuccuccacgugacguacguccccgcccaggagaagaacuucaccaccgcccccgcgaucugccacgacgggaaggcccacuucccccgcgagggcguguucguguccaacgggacccacugguucgucacgcagcggaacuucuacgagccgcagaucaucaccaccgacaacaccuucgugagcggcaacugcgacguggucaucggcaucgugaacaacacgguguacgacccccugcagcccgagcuggacuccuucaaggaggagcucgacaaguacuucaagaaccacaccagccccgacgucgaccugggggacaucuccggcaucaacgccagcguggugaacauccagaaggagaucgaccgccugaacgaggucgccaagaaccucaacgagucccugaucgaccugcaggagcucgggaaguacgagcaguacaucaaguggccgugguacaucuggcugggcuucaucgccggccugaucgcgaucgugauggugaccaucaugcucugcugcaugaccagcugcugcuccugccugaaggggugcugcagcugcggcuccugcugcaaguucgacgaggacgacagcgagcccguccugaagggggugaagcuccacuacacgugaggacuaguuauaagacugacuagcccgaugggccucccaacgggcccuccuccccuccuugcaccgagauuaauagaucuaaaaaaaaaaaaaaaaaaaaaaaaaaaaaaaaaaaaaaaaaaaaaaaaaaaaaaaaaaaaaaaaaaaaaaaaaaaaaaaaaaaaaaaaaaaaaaaaaaaa

SEQ ID NO: 25620 - RNA, 4011 nt, Artificial Sequence
  SARS-CoV-2/Wuhan/WIV05/2019__EPI_ISL_402128 spike protein mRNA gc (1-1273)(H69del_V70del_Y453F_D614G_I692V_M1229I)
aggagaaagcuuaccauguucguguuccugguccuccugccccuggugagcucccagugcgugaaccucaccacccgcacgcagcugccgcccgccuacaccaacagcuucacccggggcgucuacuaccccgacaagguguuccgcuccagcgugcugcacuccacccaggaccucuuccugcccuucuucagcaacgucacgugguuccacgccaucuccgggaccaacggcaccaagcgguucgacaacccggugcugcccuucaacgacggggucuacuucgcgagcaccgagaaguccaacaucauccgcggcuggaucuucgggacgacccucgacagcaagacccagucccugcugaucgugaacaacgccaccaacguggucaucaaggugugcgaguuccaguucugcaacgaccccuuccucggcguguacuaccacaagaacaacaagagcuggauggaguccgaguuccgggucuacagcuccgccaacaacugcacguucgaguacgugagccagcccuuccugauggaccuggagggcaagcaggggaacuucaagaaccuccgcgaguucguguucaagaacaucgacggcuacuucaagaucuacuccaagcacaccccgaucaaccugguccgggaccugccccagggguucagcgcccucgagccccugguggaccugcccaucggcaucaacaucacccgcuuccagacccuccuggcccugcaccgguccuaccucacgccgggggacagcagcuccggcuggaccgcgggcgccgccgccuacuacgugggguaccugcagccccgcaccuuccugcucaaguacaacgagaacggcaccaucacggacgcggucgacugcgcccuggacccccugagcgagaccaagugcacccucaaguccuucaccguggagaaggggaucuaccagacgagcaacuuccgggugcagcccaccgaguccaucguccgcuucccgaacaucaccaaccugugccccuucggcgagguguucaacgccacccgguucgccagcgucuacgccuggaaccgcaagcggaucuccaacugcguggcggacuacagcgugcuguacaacuccgccagcuucuccacguucaagugcuacggcgucagccccaccaagcucaacgaccugugcuucaccaacguguacgccgacuccuucgugauccgcggggacgagguccggcagaucgcccccggccagaccgggaagaucgccgacuacaacuacaagcugccggacgacuucacgggcugcgugaucgcguggaacagcaacaaccucgacuccaaggucgggggcaacuacaacuaccuguuccgccuguuccgcaagagcaaccucaagcccuucgagcgggacaucuccaccgagaucuaccaggccggcagcacccccugcaacgggguggagggcuucaacugcuacuucccccugcaguccuacggguuccagccgaccaacggcgugggguaccagcccuaccggguggucgugcugagcuucgagcuccugcacgcccccgccacggugugcggccccaagaaguccaccaaccuggucaagaacaagugcgugaacuucaacuucaacggccucaccgggaccggcgugcugaccgagagcaacaagaaguuccugccguuccagcaguucgggcgcgacaucgccgacacgaccgacgcgguccgcgacccccagacccuggagauccucgacaucacccccugcagcuucggcgggguguccgugaucacgccgggcaccaacaccagcaaccaggucgccgugcuguaccagggcgugaacugcaccgagguccccguggccauccacgccgaccagcugacgcccaccuggcggguguacuccaccggcagcaacgucuuccagacccgcgccgggugccucaucggcgcggagcacgugaacaacuccuacgagugcgacauccccaucggggccggcaucugcgccagcuaccagacgcagaccaacuccccgcggcgcgcccggagcguggcgucccagagcgugaucgccuacaccaugucccugggcgccgagaacagcgucgccuacuccaacaacagcaucgccauccccaccaacuucacgaucuccgugaccaccgagauccugcccgugagcaugaccaagacgagcgucgacugcaccauguacaucugcggggacuccaccgagugcagcaaccuccugcugcaguacggcuccuucugcacccagcucaaccgcgcgcugacggggaucgccguggagcaggacaagaacacccaggagguguucgcccaggucaagcagaucuacaagacgcccccgaucaaggacuucggcggguucaacuucagccagauccugcccgaccccuccaagcccagcaagcgguccuucaucgaggaccuccuguucaacaaggugacccuggccgacgccggcuucaucaagcaguacggcgacugccucggggacaucgcggcccgcgaccugaucugcgcccagaaguucaacggccugaccgugcucccgccccugcugaccgacgagaugaucgcccaguacaccagcgcccuccuggcggggaccaucacguccggcuggaccuucggggccggcgccgcccugcagauccccuucgcgaugcagauggccuaccgguucaacggcaucggggucacccagaacgugcucuacgagaaccagaagcugaucgccaaccaguucaacagcgccaucggcaagauccaggacucccugagcuccaccgccagcgcgcucgggaagcugcaggacguggucaaccagaacgcccaggcccugaacacgcucgugaagcagcuguccagcaacuucggcgccaucuccagcgugcugaacgacauccucucccgccuggacaaggucgaggccgaggugcagaucgaccggcugaucaccgggcgccuccagagccugcagaccuacgugacccagcagcugauccgggcggccgagauccgcgccagcgccaaccucgccgcgaccaagauguccgagugcguccugggccagagcaagcggguggacuucugcggcaagggguaccaccugauguccuucccccagagcgccccgcacggcguggucuuccuccacgugacguacguccccgcccaggagaagaacuucaccaccgcccccgcgaucugccacgacgggaaggcccacuucccccgcgagggcguguucguguccaacgggacccacugguucgucacgcagcggaacuucuacgagccgcagaucaucaccaccgacaacaccuucgugagcggcaacugcgacguggucaucggcaucgugaacaacacgguguacgacccccugcagcccgagcuggacuccuucaaggaggagcucgacaaguacuucaagaaccacaccagccccgacgucgaccugggggacaucuccggcaucaacgccagcguggugaacauccagaaggagaucgaccgccugaacgaggucgccaagaaccucaacgagucccugaucgaccugcaggagcucgggaaguacgagcaguacaucaaguggccgugguacaucuggcugggcuucaucgccggccugaucgcgaucgugaucgugaccaucaugcucugcugcaugaccagcugcugcuccugccugaaggggugcugcagcugcggcuccugcugcaaguucgacgaggacgacagcgagcccguccugaagggggugaagcuccacuacacgugaggacuaguuauaagacugacuagcccgaugggccucccaacgggcccuccuccccuccuugcaccgagauuaauagaucuaaaaaaaaaaaaaaaaaaaaaaaaaaaaaaaaaaaaaaaaaaaaaaaaaaaaaaaaaaaaaaaaaaaaaaaaaaaaaaaaaaaaaaaaaaaaaaaaaaaa

SEQ ID NO: 25621 - RNA, 4008 nt, Artificial Sequence
  SARS-CoV-2/Wuhan/WIV05/2019__EPI_ISL_402128 spike protein mRNA gc (1-1273)(H69del_V70del_Y144del_N501Y_A570D_D614G_P681H_T716I_S982 A_D1118H)
aggagaaagcuuaccauguucguguuccugguccuccugccccuggugagcucccagugcgugaaccucaccacccgcacgcagcugccgcccgccuacaccaacagcuucacccggggcgucuacuaccccgacaagguguuccgcuccagcgugcugcacuccacccaggaccucuuccugcccuucuucagcaacgucacgugguuccacgccaucuccgggaccaacggcaccaagcgguucgacaacccggugcugcccuucaacgacggggucuacuucgcgagcaccgagaaguccaacaucauccgcggcuggaucuucgggacgacccucgacagcaagacccagucccugcugaucgugaacaacgccaccaacguggucaucaaggugugcgaguuccaguucugcaacgaccccuuccucggcguguaccacaagaacaacaagagcuggauggaguccgaguuccgggucuacagcuccgccaacaacugcacguucgaguacgugagccagcccuuccugauggaccuggagggcaagcaggggaacuucaagaaccuccgcgaguucguguucaagaacaucgacggcuacuucaagaucuacuccaagcacaccccgaucaaccugguccgggaccugccccagggguucagcgcccucgagccccugguggaccugcccaucggcaucaacaucacccgcuuccagacccuccuggcccugcaccgguccuaccucacgccgggggacagcagcuccggcuggaccgcgggcgccgccgccuacuacgugggguaccugcagccccgcaccuuccugcucaaguacaacgagaacggcaccaucacggacgcggucgacugcgcccuggacccccugagcgagaccaagugcacccucaaguccuucaccguggagaaggggaucuaccagacgagcaacuuccgggugcagcccaccgaguccaucguccgcuucccgaacaucaccaaccugugccccuucggcgagguguucaacgccacccgguucgccagcgucuacgccuggaaccgcaagcggaucuccaacugcguggcggacuacagcgugcuguacaacuccgccagcuucuccacguucaagugcuacggcgucagccccaccaagcucaacgaccugugcuucaccaacguguacgccgacuccuucgugauccgcggggacgagguccggcagaucgcccccggccagaccgggaagaucgccgacuacaacuacaagcugccggacgacuucacgggcugcgugaucgcguggaacagcaacaaccucgacuccaaggucgggggcaacuacaacuaccuguaccgccuguuccgcaagagcaaccucaagcccuucgagcgggacaucuccaccgagaucuaccaggccggcagcacccccugcaacgggguggagggcuucaacugcuacuucccccugcaguccuacggguuccagccgaccuacggcgugggguaccagcccuaccggguggucgugcugagcuucgagcuccugcacgcccccgccacggugugcggccccaagaaguccaccaaccuggucaagaacaagugcgugaacuucaacuucaacggccucaccgggaccggcgugcugaccgagagcaacaagaaguuccugccguuccagcaguucgggcgcgacaucgacgacacgaccgacgcgguccgcgacccccagacccuggagauccucgacaucacccccugcagcuucggcgggguguccgugaucacgccgggcaccaacaccagcaaccaggucgccgugcuguaccagggcgugaacugcaccgagguccccguggccauccacgccgaccagcugacgcccaccuggcggguguacuccaccggcagcaacgucuuccagacccgcgccgggugccucaucggcgcggagcacgugaacaacuccuacgagugcgacauccccaucggggccggcaucugcgccagcuaccagacgcagaccaacucccaccggcgcgcccggagcguggcgucccagagcaucaucgccuacaccaugucccugggcgccgagaacagcgucgccuacuccaacaacagcaucgccauccccaucaacuucacgaucuccgugaccaccgagauccugcccgugagcaugaccaagacgagcgucgacugcaccauguacaucugcggggacuccaccgagugcagcaaccuccugcugcaguacggcuccuucugcacccagcucaaccgcgcgcugacggggaucgccguggagcaggacaagaacacccaggagguguucgcccaggucaagcagaucuacaagacgcccccgaucaaggacuucggcggguucaacuucagccagauccugcccgaccccuccaagcccagcaagcgguccuucaucgaggaccuccuguucaacaaggugacccuggccgacgccggcuucaucaagcaguacggcgacugccucggggacaucgcggcccgcgaccugaucugcgcccagaaguucaacggccugaccgugcucccgccccugcugaccgacgagaugaucgcccaguacaccagcgcccuccuggcggggaccaucacguccggcuggaccuucggggccggcgccgcccugcagauccccuucgcgaugcagauggccuaccgguucaacggcaucggggucacccagaacgugcucuacgagaaccagaagcugaucgccaaccaguucaacagcgccaucggcaagauccaggacucccugagcuccaccgccagcgcgcucgggaagcugcaggacguggucaaccagaacgcccaggcccugaacacgcucgugaagcagcuguccagcaacuucggcgccaucuccagcgugcugaacgacauccucgcccgccuggacaaggucgaggccgaggugcagaucgaccggcugaucaccgggcgccuccagagccugcagaccuacgugacccagcagcugauccgggcggccgagauccgcgccagcgccaaccucgccgcgaccaagauguccgagugcguccugggccagagcaagcggguggacuucugcggcaagggguaccaccugauguccuucccccagagcgccccgcacggcguggucuuccuccacgugacguacguccccgcccaggagaagaacuucaccaccgcccccgcgaucugccacgacgggaaggcccacuucccccgcgagggcguguucguguccaacgggacccacugguucgucacgcagcggaacuucuacgagccgcagaucaucaccacccacaacaccuucgugagcggcaacugcgacguggucaucggcaucgugaacaacacgguguacgacccccugcagcccgagcuggacuccuucaaggaggagcucgacaaguacuucaagaaccacaccagccccgacgucgaccugggggacaucuccggcaucaacgccagcguggugaacauccagaaggagaucgaccgccugaacgaggucgccaagaaccucaacgagucccugaucgaccugcaggagcucgggaaguacgagcaguacaucaaguggccgugguacaucuggcugggcuucaucgccggccugaucgcgaucgugauggugaccaucaugcucugcugcaugaccagcugcugcuccugccugaaggggugcugcagcugcggcuccugcugcaaguucgacgaggacgacagcgagcccguccugaagggggugaagcuccacuacacgugaggacuaguuauaagacugacuagcccgaugggccucccaacgggcccuccuccccuccuugcaccgagauuaauagaucuaaaaaaaaaaaaaaaaaaaaaaaaaaaaaaaaaaaaaaaaaaaaaaaaaaaaaaaaaaaaaaaaaaaaaaaaaaaaaaaaaaaaaaaaaaaaaaaaaaaa

SEQ ID NO: 25622 - RNA, 4017 nt, Artificial Sequence
  SARS-CoV-2/Wuhan/WIV05/2019__EPI_ISL_402128 spike protein mRNA gc (1-1273)(K417N_E484K_N501Y_D614G)
aggagaaagcuuaccauguucguguuccugguccuccugccccuggugagcucccagugcgugaaccucaccacccgcacgcagcugccgcccgccuacaccaacagcuucacccggggcgucuacuaccccgacaagguguuccgcuccagcgugcugcacuccacccaggaccucuuccugcccuucuucagcaacgucacgugguuccacgccauccacguguccgggaccaacggcaccaagcgguucgacaacccggugcugcccuucaacgacggggucuacuucgcgagcaccgagaaguccaacaucauccgcggcuggaucuucgggacgacccucgacagcaagacccagucccugcugaucgugaacaacgccaccaacguggucaucaaggugugcgaguuccaguucugcaacgaccccuuccucggcguguacuaccacaagaacaacaagagcuggauggaguccgaguuccgggucuacagcuccgccaacaacugcacguucgaguacgugagccagcccuuccugauggaccuggagggcaagcaggggaacuucaagaaccuccgcgaguucguguucaagaacaucgacggcuacuucaagaucuacuccaagcacaccccgaucaaccugguccgggaccugccccagggguucagcgcccucgagccccugguggaccugcccaucggcaucaacaucacccgcuuccagacccuccuggcccugcaccgguccuaccucacgccgggggacagcagcuccggcuggaccgcgggcgccgccgccuacuacgugggguaccugcagccccgcaccuuccugcucaaguacaacgagaacggcaccaucacggacgcggucgacugcgcccuggacccccugagcgagaccaagugcacccucaaguccuucaccguggagaaggggaucuaccagacgagcaacuuccgggugcagcccaccgaguccaucguccgcuucccgaacaucaccaaccugugccccuucggcgagguguucaacgccacccgguucgccagcgucuacgccuggaaccgcaagcggaucuccaacugcguggcggacuacagcgugcuguacaacuccgccagcuucuccacguucaagugcuacggcgucagccccaccaagcucaacgaccugugcuucaccaacguguacgccgacuccuucgugauccgcggggacgagguccggcagaucgcccccggccagaccgggaacaucgccgacuacaacuacaagcugccggacgacuucacgggcugcgugaucgcguggaacagcaacaaccucgacuccaaggucgggggcaacuacaacuaccuguaccgccuguuccgcaagagcaaccucaagcccuucgagcgggacaucuccaccgagaucuaccaggccggcagcacccccugcaacggggugaagggcuucaacugcuacuucccccugcaguccuacggguuccagccgaccuacggcgugggguaccagcccuaccggguggucgugcugagcuucgagcuccugcacgcccccgccacggugugcggccccaagaaguccaccaaccuggucaagaacaagugcgugaacuucaacuucaacggccucaccgggaccggcgugcugaccgagagcaacaagaaguuccugccguuccagcaguucgggcgcgacaucgccgacacgaccgacgcgguccgcgacccccagacccuggagauccucgacaucacccccugcagcuucggcgggguguccgugaucacgccgggcaccaacaccagcaaccaggucgccgugcuguaccagggcgugaacugcaccgagguccccguggccauccacgccgaccagcugacgcccaccuggcggguguacuccaccggcagcaacgucuuccagacccgcgccgggugccucaucggcgcggagcacgugaacaacuccuacgagugcgacauccccaucggggccggcaucugcgccagcuaccagacgcagaccaacuccccgcggcgcgcccggagcguggcgucccagagcaucaucgccuacaccaugucccugggcgccgagaacagcgucgccuacuccaacaacagcaucgccauccccaccaacuucacgaucuccgugaccaccgagauccugcccgugagcaugaccaagacgagcgucgacugcaccauguacaucugcggggacuccaccgagugcagcaaccuccugcugcaguacggcuccuucugcacccagcucaaccgcgcgcugacggggaucgccguggagcaggacaagaacacccaggagguguucgcccaggucaagcagaucuacaagacgcccccgaucaaggacuucggcggguucaacuucagccagauccugcccgaccccuccaagcccagcaagcgguccuucaucgaggaccuccuguucaacaaggugacccuggccgacgccggcuucaucaagcaguacggcgacugccucggggacaucgcggcccgcgaccugaucugcgcccagaaguucaacggccugaccgugcucccgccccugcugaccgacgagaugaucgcccaguacaccagcgcccuccuggcggggaccaucacguccggcuggaccuucggggccggcgccgcccugcagauccccuucgcgaugcagauggccuaccgguucaacggcaucggggucacccagaacgugcucuacgagaaccagaagcugaucgccaaccaguucaacagcgccaucggcaagauccaggacucccugagcuccaccgccagcgcgcucgggaagcugcaggacguggucaaccagaacgcccaggcccugaacacgcucgugaagcagcuguccagcaacuucggcgccaucuccagcgugcugaacgacauccucucccgccuggacaaggucgaggccgaggugcagaucgaccggcugaucaccgggcgccuccagagccugcagaccuacgugacccagcagcugauccgggcggccgagauccgcgccagcgccaaccucgccgcgaccaagauguccgagugcguccugggccagagcaagcggguggacuucugcggcaagggguaccaccugauguccuucccccagagcgccccgcacggcguggucuuccuccacgugacguacguccccgcccaggagaagaacuucaccaccgcccccgcgaucugccacgacgggaaggcccacuucccccgcgagggcguguucguguccaacgggacccacugguucgucacgcagcggaacuucuacgagccgcagaucaucaccaccgacaacaccuucgugagcggcaacugcgacguggucaucggcaucgugaacaacacgguguacgacccccugcagcccgagcuggacuccuucaaggaggagcucgacaaguacuucaagaaccacaccagccccgacgucgaccugggggacaucuccggcaucaacgccagcguggugaacauccagaaggagaucgaccgccugaacgaggucgccaagaaccucaacgagucccugaucgaccugcaggagcucgggaaguacgagcaguacaucaaguggccgugguacaucuggcugggcuucaucgccggccugaucgcgaucgugauggugaccaucaugcucugcugcaugaccagcugcugcuccugccugaaggggugcugcagcugcggcuccugcugcaaguucgacgaggacgacagcgagcccguccugaagggggugaagcuccacuacacgugaggacuaguuauaagacugacuagcccgaugggccucccaacgggcccuccuccccuccuugcaccgagauuaauagaucuaaaaaaaaaaaaaaaaaaaaaaaaaaaaaaaaaaaaaaaaaaaaaaaaaaaaaaaaaaaaaaaaaaaaaaaaaaaaaaaaaaaaaaaaaaaaaaaaaaaa

SEQ ID NO: 25623 - RNA, 4008 nt, Artificial Sequence
  SARS-CoV-2/Wuhan/WIV05/2019__EPI_ISL_402128 spike protein mRNA gc (1-1273)(L18F_D80A_D215G_L242del_A243del_L244del_R246I_K417N_E484 K_N501Y_D614G_A701V)
aggagaaagcuuaccauguucguguuccugguccuccugccccuggugagcucccagugcgugaacuucaccacccgcacgcagcugccgcccgccuacaccaacagcuucacccggggcgucuacuaccccgacaagguguuccgcuccagcgugcugcacuccacccaggaccucuuccugcccuucuucagcaacgucacgugguuccacgccauccacguguccgggaccaacggcaccaagcgguucgccaacccggugcugcccuucaacgacggggucuacuucgcgagcaccgagaaguccaacaucauccgcggcuggaucuucgggacgacccucgacagcaagacccagucccugcugaucgugaacaacgccaccaacguggucaucaaggugugcgaguuccaguucugcaacgaccccuuccucggcguguacuaccacaagaacaacaagagcuggauggaguccgaguuccgggucuacagcuccgccaacaacugcacguucgaguacgugagccagcccuuccugauggaccuggagggcaagcaggggaacuucaagaaccuccgcgaguucguguucaagaacaucgacggcuacuucaagaucuacuccaagcacaccccgaucaaccugguccggggccugccccagggguucagcgcccucgagccccugguggaccugcccaucggcaucaacaucacccgcuuccagacccuccacaucuccuaccucacgccgggggacagcagcuccggcuggaccgcgggcgccgccgccuacuacgugggguaccugcagccccgcaccuuccugcucaaguacaacgagaacggcaccaucacggacgcggucgacugcgcccuggacccccugagcgagaccaagugcacccucaaguccuucaccguggagaaggggaucuaccagacgagcaacuuccgggugcagcccaccgaguccaucguccgcuucccgaacaucaccaaccugugccccuucggcgagguguucaacgccacccgguucgccagcgucuacgccuggaaccgcaagcggaucuccaacugcguggcggacuacagcgugcuguacaacuccgccagcuucuccacguucaagugcuacggcgucagccccaccaagcucaacgaccugugcuucaccaacguguacgccgacuccuucgugauccgcggggacgagguccggcagaucgcccccggccagaccgggaacaucgccgacuacaacuacaagcugccggacgacuucacgggcugcgugaucgcguggaacagcaacaaccucgacuccaaggucgggggcaacuacaacuaccuguaccgccuguuccgcaagagcaaccucaagcccuucgagcgggacaucuccaccgagaucuaccaggccggcagcacccccugcaacggggugaagggcuucaacugcuacuucccccugcaguccuacggguuccagccgaccuacggcgugggguaccagcccuaccggguggucgugcugagcuucgagcuccugcacgcccccgccacggugugcggccccaagaaguccaccaaccuggucaagaacaagugcgugaacuucaacuucaacggccucaccgggaccggcgugcugaccgagagcaacaagaaguuccugccguuccagcaguucgggcgcgacaucgccgacacgaccgacgcgguccgcgacccccagacccuggagauccucgacaucacccccugcagcuucggcgggguguccgugaucacgccgggcaccaacaccagcaaccaggucgccgugcuguaccagggcgugaacugcaccgagguccccguggccauccacgccgaccagcugacgcccaccuggcggguguacuccaccggcagcaacgucuuccagacccgcgccgggugccucaucggcgcggagcacgugaacaacuccuacgagugcgacauccccaucggggccggcaucugcgccagcuaccagacgcagaccaacuccccgcggcgcgcccggagcguggcgucccagagcaucaucgccuacaccaugucccugggcguggagaacagcgucgccuacuccaacaacagcaucgccauccccaccaacuucacgaucuccgugaccaccgagauccugcccgugagcaugaccaagacgagcgucgacugcaccauguacaucugcggggacuccaccgagugcagcaaccuccugcugcaguacggcuccuucugcacccagcucaaccgcgcgcugacggggaucgccguggagcaggacaagaacacccaggagguguucgcccaggucaagcagaucuacaagacgcccccgaucaaggacuucggcggguucaacuucagccagauccugcccgaccccuccaagcccagcaagcgguccuucaucgaggaccuccuguucaacaaggugacccuggccgacgccggcuucaucaagcaguacggcgacugccucggggacaucgcggcccgcgaccugaucugcgcccagaaguucaacggccugaccgugcucccgccccugcugaccgacgagaugaucgcccaguacaccagcgcccuccuggcggggaccaucacguccggcuggaccuucggggccggcgccgcccugcagauccccuucgcgaugcagauggccuaccgguucaacggcaucggggucacccagaacgugcucuacgagaaccagaagcugaucgccaaccaguucaacagcgccaucggcaagauccaggacucccugagcuccaccgccagcgcgcucgggaagcugcaggacguggucaaccagaacgcccaggcccugaacacgcucgugaagcagcuguccagcaacuucggcgccaucuccagcgugcugaacgacauccucucccgccuggacaaggucgaggccgaggugcagaucgaccggcugaucaccgggcgccuccagagccugcagaccuacgugacccagcagcugauccgggcggccgagauccgcgccagcgccaaccucgccgcgaccaagauguccgagugcguccugggccagagcaagcggguggacuucugcggcaagggguaccaccugauguccuucccccagagcgccccgcacggcguggucuuccuccacgugacguacguccccgcccaggagaagaacuucaccaccgcccccgcgaucugccacgacgggaaggcccacuucccccgcgagggcguguucguguccaacgggacccacugguucgucacgcagcggaacuucuacgagccgcagaucaucaccaccgacaacaccuucgugagcggcaacugcgacguggucaucggcaucgugaacaacacgguguacgacccccugcagcccgagcuggacuccuucaaggaggagcucgacaaguacuucaagaaccacaccagccccgacgucgaccugggggacaucuccggcaucaacgccagcguggugaacauccagaaggagaucgaccgccugaacgaggucgccaagaaccucaacgagucccugaucgaccugcaggagcucgggaaguacgagcaguacaucaaguggccgugguacaucuggcugggcuucaucgccggccugaucgcgaucgugauggugaccaucaugcucugcugcaugaccagcugcugcuccugccugaaggggugcugcagcugcggcuccugcugcaaguucgacgaggacgacagcgagcccguccugaagggggugaagcuccacuacacgugaggacuaguuauaagacugacuagcccgaugggccucccaacgggcccuccuccccuccuugcaccgagauuaauagaucuaaaaaaaaaaaaaaaaaaaaaaaaaaaaaaaaaaaaaaaaaaaaaaaaaaaaaaaaaaaaaaaaaaaaaaaaaaaaaaaaaaaaaaaaaaaaaaaaaaaa

SEQ ID NO: 25624 - RNA, 4017 nt, Artificial Sequence
  SARS-CoV-2/Wuhan/WIV05/2019__EPI_ISL_402128 spike protein mRNA gc (1-1273)(E484K_D614G)
aggagaaagcuuaccauguucguguuccugguccuccugccccuggugagcucccagugcgugaaccucaccacccgcacgcagcugccgcccgccuacaccaacagcuucacccggggcgucuacuaccccgacaagguguuccgcuccagcgugcugcacuccacccaggaccucuuccugcccuucuucagcaacgucacgugguuccacgccauccacguguccgggaccaacggcaccaagcgguucgacaacccggugcugcccuucaacgacggggucuacuucgcgagcaccgagaaguccaacaucauccgcggcuggaucuucgggacgacccucgacagcaagacccagucccugcugaucgugaacaacgccaccaacguggucaucaaggugugcgaguuccaguucugcaacgaccccuuccucggcguguacuaccacaagaacaacaagagcuggauggaguccgaguuccgggucuacagcuccgccaacaacugcacguucgaguacgugagccagcccuuccugauggaccuggagggcaagcaggggaacuucaagaaccuccgcgaguucguguucaagaacaucgacggcuacuucaagaucuacuccaagcacaccccgaucaaccugguccgggaccugccccagggguucagcgcccucgagccccugguggaccugcccaucggcaucaacaucacccgcuuccagacccuccuggcccugcaccgguccuaccucacgccgggggacagcagcuccggcuggaccgcgggcgccgccgccuacuacgugggguaccugcagccccgcaccuuccugcucaaguacaacgagaacggcaccaucacggacgcggucgacugcgcccuggacccccugagcgagaccaagugcacccucaaguccuucaccguggagaaggggaucuaccagacgagcaacuuccgggugcagcccaccgaguccaucguccgcuucccgaacaucaccaaccugugccccuucggcgagguguucaacgccacccgguucgccagcgucuacgccuggaaccgcaagcggaucuccaacugcguggcggacuacagcgugcuguacaacuccgccagcuucuccacguucaagugcuacggcgucagccccaccaagcucaacgaccugugcuucaccaacguguacgccgacuccuucgugauccgcggggacgagguccggcagaucgcccccggccagaccgggaagaucgccgacuacaacuacaagcugccggacgacuucacgggcugcgugaucgcguggaacagcaacaaccucgacuccaaggucgggggcaacuacaacuaccuguaccgccuguuccgcaagagcaaccucaagcccuucgagcgggacaucuccaccgagaucuaccaggccggcagcacccccugcaacggggugaagggcuucaacugcuacuucccccugcaguccuacggguuccagccgaccaacggcgugggguaccagcccuaccggguggucgugcugagcuucgagcuccugcacgcccccgccacggugugcggccccaagaaguccaccaaccuggucaagaacaagugcgugaacuucaacuucaacggccucaccgggaccggcgugcugaccgagagcaacaagaaguuccugccguuccagcaguucgggcgcgacaucgccgacacgaccgacgcgguccgcgacccccagacccuggagauccucgacaucacccccugcagcuucggcgggguguccgugaucacgccgggcaccaacaccagcaaccaggucgccgugcuguaccagggcgugaacugcaccgagguccccguggccauccacgccgaccagcugacgcccaccuggcggguguacuccaccggcagcaacgucuuccagacccgcgccgggugccucaucggcgcggagcacgugaacaacuccuacgagugcgacauccccaucggggccggcaucugcgccagcuaccagacgcagaccaacuccccgcggcgcgcccggagcguggcgucccagagcaucaucgccuacaccaugucccugggcgccgagaacagcgucgccuacuccaacaacagcaucgccauccccaccaacuucacgaucuccgugaccaccgagauccugcccgugagcaugaccaagacgagcgucgacugcaccauguacaucugcggggacuccaccgagugcagcaaccuccugcugcaguacggcuccuucugcacccagcucaaccgcgcgcugacggggaucgccguggagcaggacaagaacacccaggagguguucgcccaggucaagcagaucuacaagacgcccccgaucaaggacuucggcggguucaacuucagccagauccugcccgaccccuccaagcccagcaagcgguccuucaucgaggaccuccuguucaacaaggugacccuggccgacgccggcuucaucaagcaguacggcgacugccucggggacaucgcggcccgcgaccugaucugcgcccagaaguucaacggccugaccgugcucccgccccugcugaccgacgagaugaucgcccaguacaccagcgcccuccuggcggggaccaucacguccggcuggaccuucggggccggcgccgcccugcagauccccuucgcgaugcagauggccuaccgguucaacggcaucggggucacccagaacgugcucuacgagaaccagaagcugaucgccaaccaguucaacagcgccaucggcaagauccaggacucccugagcuccaccgccagcgcgcucgggaagcugcaggacguggucaaccagaacgcccaggcccugaacacgcucgugaagcagcuguccagcaacuucggcgccaucuccagcgugcugaacgacauccucucccgccuggacaaggucgaggccgaggugcagaucgaccggcugaucaccgggcgccuccagagccugcagaccuacgugacccagcagcugauccgggcggccgagauccgcgccagcgccaaccucgccgcgaccaagauguccgagugcguccugggccagagcaagcggguggacuucugcggcaagggguaccaccugauguccuucccccagagcgccccgcacggcguggucuuccuccacgugacguacguccccgcccaggagaagaacuucaccaccgcccccgcgaucugccacgacgggaaggcccacuucccccgcgagggcguguucguguccaacgggacccacugguucgucacgcagcggaacuucuacgagccgcagaucaucaccaccgacaacaccuucgugagcggcaacugcgacguggucaucggcaucgugaacaacacgguguacgacccccugcagcccgagcuggacuccuucaaggaggagcucgacaaguacuucaagaaccacaccagccccgacgucgaccugggggacaucuccggcaucaacgccagcguggugaacauccagaaggagaucgaccgccugaacgaggucgccaagaaccucaacgagucccugaucgaccugcaggagcucgggaaguacgagcaguacaucaaguggccgugguacaucuggcugggcuucaucgccggccugaucgcgaucgugauggugaccaucaugcucugcugcaugaccagcugcugcuccugccugaaggggugcugcagcugcggcuccugcugcaaguucgacgaggacgacagcgagcccguccugaagggggugaagcuccacuacacgugaggacuaguuauaagacugacuagcccgaugggccucccaacgggcccuccuccccuccuugcaccgagauuaauagaucuaaaaaaaaaaaaaaaaaaaaaaaaaaaaaaaaaaaaaaaaaaaaaaaaaaaaaaaaaaaaaaaaaaaaaaaaaaaaaaaaaaaaaaaaaaaaaaaaaaaa

SEQ ID NO: 25625 - RNA, 4017 nt, Artificial Sequence
  SARS-CoV-2/Wuhan/WIV05/2019__EPI_ISL_402128 spike protein mRNA gc (1-1273)(L18F_T20N_P26S_D138Y_R190S_K417T_E484K_N501Y_D614G_H655Y _T1027I)
aggagaaagcuuaccauguucguguuccugguccuccugccccuggugagcucccagugcgugaacuucaccaaccgcacgcagcugccgagcgccuacaccaacagcuucacccggggcgucuacuaccccgacaagguguuccgcuccagcgugcugcacuccacccaggaccucuuccugcccuucuucagcaacgucacgugguuccacgccauccacguguccgggaccaacggcaccaagcgguucgacaacccggugcugcccuucaacgacggggucuacuucgcgagcaccgagaaguccaacaucauccgcggcuggaucuucgggacgacccucgacagcaagacccagucccugcugaucgugaacaacgccaccaacguggucaucaaggugugcgaguuccaguucugcaacuaccccuuccucggcguguacuaccacaagaacaacaagagcuggauggaguccgaguuccgggucuacagcuccgccaacaacugcacguucgaguacgugagccagcccuuccugauggaccuggagggcaagcaggggaacuucaagaaccucagcgaguucguguucaagaacaucgacggcuacuucaagaucuacuccaagcacaccccgaucaaccugguccgggaccugccccagggguucagcgcccucgagccccugguggaccugcccaucggcaucaacaucacccgcuuccagacccuccuggcccugcaccgguccuaccucacgccgggggacagcagcuccggcuggaccgcgggcgccgccgccuacuacgugggguaccugcagccccgcaccuuccugcucaaguacaacgagaacggcaccaucacggacgcggucgacugcgcccuggacccccugagcgagaccaagugcacccucaaguccuucaccguggagaaggggaucuaccagacgagcaacuuccgggugcagcccaccgaguccaucguccgcuucccgaacaucaccaaccugugccccuucggcgagguguucaacgccacccgguucgccagcgucuacgccuggaaccgcaagcggaucuccaacugcguggcggacuacagcgugcuguacaacuccgccagcuucuccacguucaagugcuacggcgucagccccaccaagcucaacgaccugugcuucaccaacguguacgccgacuccuucgugauccgcggggacgagguccggcagaucgcccccggccagaccgggaccaucgccgacuacaacuacaagcugccggacgacuucacgggcugcgugaucgcguggaacagcaacaaccucgacuccaaggucgggggcaacuacaacuaccuguaccgccuguuccgcaagagcaaccucaagcccuucgagcgggacaucuccaccgagaucuaccaggccggcagcacccccugcaacggggugaagggcuucaacugcuacuucccccugcaguccuacggguuccagccgaccuacggcgugggguaccagcccuaccggguggucgugcugagcuucgagcuccugcacgcccccgccacggugugcggccccaagaaguccaccaaccuggucaagaacaagugcgugaacuucaacuucaacggccucaccgggaccggcgugcugaccgagagcaacaagaaguuccugccguuccagcaguucgggcgcgacaucgccgacacgaccgacgcgguccgcgacccccagacccuggagauccucgacaucacccccugcagcuucggcgggguguccgugaucacgccgggcaccaacaccagcaaccaggucgccgugcuguaccagggcgugaacugcaccgagguccccguggccauccacgccgaccagcugacgcccaccuggcggguguacuccaccggcagcaacgucuuccagacccgcgccgggugccucaucggcgcggaguacgugaacaacuccuacgagugcgacauccccaucggggccggcaucugcgccagcuaccagacgcagaccaacuccccgcggcgcgcccggagcguggcgucccagagcaucaucgccuacaccaugucccugggcgccgagaacagcgucgccuacuccaacaacagcaucgccauccccaccaacuucacgaucuccgugaccaccgagauccugcccgugagcaugaccaagacgagcgucgacugcaccauguacaucugcggggacuccaccgagugcagcaaccuccugcugcaguacggcuccuucugcacccagcucaaccgcgcgcugacggggaucgccguggagcaggacaagaacacccaggagguguucgcccaggucaagcagaucuacaagacgcccccgaucaaggacuucggcggguucaacuucagccagauccugcccgaccccuccaagcccagcaagcgguccuucaucgaggaccuccuguucaacaaggugacccuggccgacgccggcuucaucaagcaguacggcgacugccucggggacaucgcggcccgcgaccugaucugcgcccagaaguucaacggccugaccgugcucccgccccugcugaccgacgagaugaucgcccaguacaccagcgcccuccuggcggggaccaucacguccggcuggaccuucggggccggcgccgcccugcagauccccuucgcgaugcagauggccuaccgguucaacggcaucggggucacccagaacgugcucuacgagaaccagaagcugaucgccaaccaguucaacagcgccaucggcaagauccaggacucccugagcuccaccgccagcgcgcucgggaagcugcaggacguggucaaccagaacgcccaggcccugaacacgcucgugaagcagcuguccagcaacuucggcgccaucuccagcgugcugaacgacauccucucccgccuggacaaggucgaggccgaggugcagaucgaccggcugaucaccgggcgccuccagagccugcagaccuacgugacccagcagcugauccgggcggccgagauccgcgccagcgccaaccucgccgcgaucaagauguccgagugcguccugggccagagcaagcggguggacuucugcggcaagggguaccaccugauguccuucccccagagcgccccgcacggcguggucuuccuccacgugacguacguccccgcccaggagaagaacuucaccaccgcccccgcgaucugccacgacgggaaggcccacuucccccgcgagggcguguucguguccaacgggacccacugguucgucacgcagcggaacuucuacgagccgcagaucaucaccaccgacaacaccuucgugagcggcaacugcgacguggucaucggcaucgugaacaacacgguguacgacccccugcagcccgagcuggacuccuucaaggaggagcucgacaaguacuucaagaaccacaccagccccgacgucgaccugggggacaucuccggcaucaacgccagcguggugaacauccagaaggagaucgaccgccugaacgaggucgccaagaaccucaacgagucccugaucgaccugcaggagcucgggaaguacgagcaguacaucaaguggccgugguacaucuggcugggcuucaucgccggccugaucgcgaucgugauggugaccaucaugcucugcugcaugaccagcugcugcuccugccugaaggggugcugcagcugcggcuccugcugcaaguucgacgaggacgacagcgagcccguccugaagggggugaagcuccacuacacgugaggacuaguuauaagacugacuagcccgaugggccucccaacgggcccuccuccccuccuugcaccgagauuaauagaucuaaaaaaaaaaaaaaaaaaaaaaaaaaaaaaaaaaaaaaaaaaaaaaaaaaaaaaaaaaaaaaaaaaaaaaaaaaaaaaaaaaaaaaaaaaaaaaaaaaaa

SEQ ID NO: 25626 - RNA, 4017 nt, Artificial Sequence
  SARS-CoV-2/Wuhan/WIV05/2019__EPI_ISL_402128 spike protein mRNA gc (1-1273)(S13I_W152C_L452R_D614G)
aggagaaagcuuaccauguucguguuccugguccuccugccccuggugagcauccagugcgugaaccucaccacccgcacgcagcugccgcccgccuacaccaacagcuucacccggggcgucuacuaccccgacaagguguuccgcuccagcgugcugcacuccacccaggaccucuuccugcccuucuucagcaacgucacgugguuccacgccauccacguguccgggaccaacggcaccaagcgguucgacaacccggugcugcccuucaacgacggggucuacuucgcgagcaccgagaaguccaacaucauccgcggcuggaucuucgggacgacccucgacagcaagacccagucccugcugaucgugaacaacgccaccaacguggucaucaaggugugcgaguuccaguucugcaacgaccccuuccucggcguguacuaccacaagaacaacaagagcugcauggaguccgaguuccgggucuacagcuccgccaacaacugcacguucgaguacgugagccagcccuuccugauggaccuggagggcaagcaggggaacuucaagaaccuccgcgaguucguguucaagaacaucgacggcuacuucaagaucuacuccaagcacaccccgaucaaccugguccgggaccugccccagggguucagcgcccucgagccccugguggaccugcccaucggcaucaacaucacccgcuuccagacccuccuggcccugcaccgguccuaccucacgccgggggacagcagcuccggcuggaccgcgggcgccgccgccuacuacgugggguaccugcagccccgcaccuuccugcucaaguacaacgagaacggcaccaucacggacgcggucgacugcgcccuggacccccugagcgagaccaagugcacccucaaguccuucaccguggagaaggggaucuaccagacgagcaacuuccgggugcagcccaccgaguccaucguccgcuucccgaacaucaccaaccugugccccuucggcgagguguucaacgccacccgguucgccagcgucuacgccuggaaccgcaagcggaucuccaacugcguggcggacuacagcgugcuguacaacuccgccagcuucuccacguucaagugcuacggcgucagccccaccaagcucaacgaccugugcuucaccaacguguacgccgacuccuucgugauccgcggggacgagguccggcagaucgcccccggccagaccgggaagaucgccgacuacaacuacaagcugccggacgacuucacgggcugcgugaucgcguggaacagcaacaaccucgacuccaaggucgggggcaacuacaacuaccgcuaccgccuguuccgcaagagcaaccucaagcccuucgagcgggacaucuccaccgagaucuaccaggccggcagcacccccugcaacgggguggagggcuucaacugcuacuucccccugcaguccuacggguuccagccgaccaacggcgugggguaccagcccuaccggguggucgugcugagcuucgagcuccugcacgcccccgccacggugugcggccccaagaaguccaccaaccuggucaagaacaagugcgugaacuucaacuucaacggccucaccgggaccggcgugcugaccgagagcaacaagaaguuccugccguuccagcaguucgggcgcgacaucgccgacacgaccgacgcgguccgcgacccccagacccuggagauccucgacaucacccccugcagcuucggcgggguguccgugaucacgccgggcaccaacaccagcaaccaggucgccgugcuguaccagggcgugaacugcaccgagguccccguggccauccacgccgaccagcugacgcccaccuggcggguguacuccaccggcagcaacgucuuccagacccgcgccgggugccucaucggcgcggagcacgugaacaacuccuacgagugcgacauccccaucggggccggcaucugcgccagcuaccagacgcagaccaacuccccgcggcgcgcccggagcguggcgucccagagcaucaucgccuacaccaugucccugggcgccgagaacagcgucgccuacuccaacaacagcaucgccauccccaccaacuucacgaucuccgugaccaccgagauccugcccgugagcaugaccaagacgagcgucgacugcaccauguacaucugcggggacuccaccgagugcagcaaccuccugcugcaguacggcuccuucugcacccagcucaaccgcgcgcugacggggaucgccguggagcaggacaagaacacccaggagguguucgcccaggucaagcagaucuacaagacgcccccgaucaaggacuucggcggguucaacuucagccagauccugcccgaccccuccaagcccagcaagcgguccuucaucgaggaccuccuguucaacaaggugacccuggccgacgccggcuucaucaagcaguacggcgacugccucggggacaucgcggcccgcgaccugaucugcgcccagaaguucaacggccugaccgugcucccgccccugcugaccgacgagaugaucgcccaguacaccagcgcccuccuggcggggaccaucacguccggcuggaccuucggggccggcgccgcccugcagauccccuucgcgaugcagauggccuaccgguucaacggcaucggggucacccagaacgugcucuacgagaaccagaagcugaucgccaaccaguucaacagcgccaucggcaagauccaggacucccugagcuccaccgccagcgcgcucgggaagcugcaggacguggucaaccagaacgcccaggcccugaacacgcucgugaagcagcuguccagcaacuucggcgccaucuccagcgugcugaacgacauccucucccgccuggacaaggucgaggccgaggugcagaucgaccggcugaucaccgggcgccuccagagccugcagaccuacgugacccagcagcugauccgggcggccgagauccgcgccagcgccaaccucgccgcgaccaagauguccgagugcguccugggccagagcaagcggguggacuucugcggcaagggguaccaccugauguccuucccccagagcgccccgcacggcguggucuuccuccacgugacguacguccccgcccaggagaagaacuucaccaccgcccccgcgaucugccacgacgggaaggcccacuucccccgcgagggcguguucguguccaacgggacccacugguucgucacgcagcggaacuucuacgagccgcagaucaucaccaccgacaacaccuucgugagcggcaacugcgacguggucaucggcaucgugaacaacacgguguacgacccccugcagcccgagcuggacuccuucaaggaggagcucgacaaguacuucaagaaccacaccagccccgacgucgaccugggggacaucuccggcaucaacgccagcguggugaacauccagaaggagaucgaccgccugaacgaggucgccaagaaccucaacgagucccugaucgaccugcaggagcucgggaaguacgagcaguacaucaaguggccgugguacaucuggcugggcuucaucgccggccugaucgcgaucgugauggugaccaucaugcucugcugcaugaccagcugcugcuccugccugaaggggugcugcagcugcggcuccugcugcaaguucgacgaggacgacagcgagcccguccugaagggggugaagcuccacuacacgugaggacuaguuauaagacugacuagcccgaugggccucccaacgggcccuccuccccuccuugcaccgagauuaauagaucuaaaaaaaaaaaaaaaaaaaaaaaaaaaaaaaaaaaaaaaaaaaaaaaaaaaaaaaaaaaaaaaaaaaaaaaaaaaaaaaaaaaaaaaaaaaaaaaaaaaa

SEQ ID NO: 25627 - RNA, 4017 nt, Artificial Sequence; identical to SEQ ID NO: 25609
  SARS-CoV-2/Wuhan/WIV05/2019__EPI_ISL_402128 spike protein mRNA gc (1-1273)

SEQ ID NO: 25628 - RNA, 4017 nt, Artificial Sequence
  SARS-CoV-2/Wuhan/WIV05/2019__EPI_ISL_402128 spike protein mRNA gc (1-1273)(D614G)
aggagaaagcuuaccauguucguguuccugguccuccugccccuggugagcucccagugcgugaaccucaccacccgcacgcagcugccgcccgccuacaccaacagcuucacccggggcgucuacuaccccgacaagguguuccgcuccagcgugcugcacuccacccaggaccucuuccugcccuucuucagcaacgucacgugguuccacgccauccacguguccgggaccaacggcaccaagcgguucgacaacccggugcugcccuucaacgacggggucuacuucgcgagcaccgagaaguccaacaucauccgcggcuggaucuucgggacgacccucgacagcaagacccagucccugcugaucgugaacaacgccaccaacguggucaucaaggugugcgaguuccaguucugcaacgaccccuuccucggcguguacuaccacaagaacaacaagagcuggauggaguccgaguuccgggucuacagcuccgccaacaacugcacguucgaguacgugagccagcccuuccugauggaccuggagggcaagcaggggaacuucaagaaccuccgcgaguucguguucaagaacaucgacggcuacuucaagaucuacuccaagcacaccccgaucaaccugguccgggaccugccccagggguucagcgcccucgagccccugguggaccugcccaucggcaucaacaucacccgcuuccagacccuccuggcccugcaccgguccuaccucacgccgggggacagcagcuccggcuggaccgcgggcgccgccgccuacuacgugggguaccugcagccccgcaccuuccugcucaaguacaacgagaacggcaccaucacggacgcggucgacugcgcccuggacccccugagcgagaccaagugcacccucaaguccuucaccguggagaaggggaucuaccagacgagcaacuuccgggugcagcccaccgaguccaucguccgcuucccgaacaucaccaaccugugccccuucggcgagguguucaacgccacccgguucgccagcgucuacgccuggaaccgcaagcggaucuccaacugcguggcggacuacagcgugcuguacaacuccgccagcuucuccacguucaagugcuacggcgucagccccaccaagcucaacgaccugugcuucaccaacguguacgccgacuccuucgugauccgcggggacgagguccggcagaucgcccccggccagaccgggaagaucgccgacuacaacuacaagcugccggacgacuucacgggcugcgugaucgcguggaacagcaacaaccucgacuccaaggucgggggcaacuacaacuaccuguaccgccuguuccgcaagagcaaccucaagcccuucgagcgggacaucuccaccgagaucuaccaggccggcagcacccccugcaacgggguggagggcuucaacugcuacuucccccugcaguccuacggguuccagccgaccaacggcgugggguaccagcccuaccggguggucgugcugagcuucgagcuccugcacgcccccgccacggugugcggccccaagaaguccaccaaccuggucaagaacaagugcgugaacuucaacuucaacggccucaccgggaccggcgugcugaccgagagcaacaagaaguuccugccguuccagcaguucgggcgcgacaucgccgacacgaccgacgcgguccgcgacccccagacccuggagauccucgacaucacccccugcagcuucggcgggguguccgugaucacgccgggcaccaacaccagcaaccaggucgccgugcuguaccagggcgugaacugcaccgagguccccguggccauccacgccgaccagcugacgcccaccuggcggguguacuccaccgggagcaacgucuuccagacccgcgccggcugccucaucggggcggagcacgugaacaacuccuacgagugcgacauccccaucggcgccggcaucugcgccagcuaccagacgcagaccaacuccccgcggcgcgcccggagcguggcgucccagagcaucaucgccuacaccaugucccugggggccgagaacagcgucgccuacuccaacaacagcaucgccauccccaccaacuucacgaucuccgugaccaccgagauccugcccgugagcaugaccaagacgagcgucgacugcaccauguacaucugcggcgacuccaccgagugcagcaaccuccugcugcaguacggguccuucugcacccagcucaaccgcgcgcugacgggcaucgccguggagcaggacaagaacacccaggagguguucgcccaggucaagcagaucuacaagacgcccccgaucaaggacuucgggggcuucaacuucagccagauccugcccgaccccuccaagcccagcaagcgguccuucaucgaggaccuccuguucaacaaggugacccuggccgacgccggcuucaucaagcaguacggggacugccucggcgacaucgcggcccgcgaccugaucugcgcccagaaguucaacgggcugaccgugcucccgccccugcugaccgacgagaugaucgcccaguacaccagcgcccuccuggcgggcaccaucacguccggguggaccuucggcgccggcgccgcccugcagauccccuucgcgaugcagauggccuaccgguucaacgggaucggcgucacccagaacgugcucuacgagaaccagaagcugaucgccaaccaguucaacagcgccaucgggaagauccaggacucccugagcuccaccgccagcgcgcucggcaagcugcaggacguggucaaccagaacgcccaggcccugaacacgcucgugaagcagcuguccagcaacuucggggccaucuccagcgugcugaacgacauccucucccgccuggacaaggucgaggccgaggugcagaucgaccggcugaucaccggccgccuccagagccugcagaccuacgugacccagcagcugauccgggcggccgagauccgcgccagcgccaaccucgccgcgaccaagauguccgagugcguccugggccagagcaagcggguggacuucugcgggaagggcuaccaccugauguccuucccccagagcgccccgcacgggguggucuuccuccacgugacguacguccccgcccaggagaagaacuucaccaccgcccccgcgaucugccacgacggcaaggcccacuucccccgcgaggggguguucguguccaacggcacccacugguucgucacgcagcggaacuucuacgagccgcagaucaucaccaccgacaacaccuucgugagcggcaacugcgacguggucaucgggaucgugaacaacacgguguacgacccccugcagcccgagcuggacuccuucaaggaggagcucgacaaguacuucaagaaccacaccagccccgacgucgaccugggcgacaucuccgggaucaacgccagcguggugaacauccagaaggagaucgaccgccugaacgaggucgccaagaaccucaacgagucccugaucgaccugcaggagcucggcaaguacgagcaguacaucaaguggccgugguacaucuggcugggcuucaucgccgggcugaucgcgaucgugauggugaccaucaugcucugcugcaugaccagcugcugcuccugccugaagggcugcugcagcugcggguccugcugcaaguucgacgaggacgacagcgagcccguccugaagggcgugaagcuccacuacacgugaggacuaguuauaagacugacuagcccgaugggccucccaacgggcccuccuccccuccuugcaccgagauuaauagaucuaaaaaaaaaaaaaaaaaaaaaaaaaaaaaaaaaaaaaaaaaaaaaaaaaaaaaaaaaaaaaaaaaaaaaaaaaaaaaaaaaaaaaaaaaaaaaaaaaaaa

SEQ ID NO: 25629 - RNA, 4017 nt, Artificial Sequence
  SARS-CoV-2/Wuhan/WIV05/2019__EPI_ISL_402128 spike protein mRNA gc (1-1273)(A222V_D614G)
aggagaaagcuuaccauguucguguuccugguccuccugccccuggugagcucccagugcgugaaccucaccacccgcacgcagcugccgcccgccuacaccaacagcuucacccggggcgucuacuaccccgacaagguguuccgcuccagcgugcugcacuccacccaggaccucuuccugcccuucuucagcaacgucacgugguuccacgccauccacguguccgggaccaacggcaccaagcgguucgacaacccggugcugcccuucaacgacggggucuacuucgcgagcaccgagaaguccaacaucauccgcggcuggaucuucgggacgacccucgacagcaagacccagucccugcugaucgugaacaacgccaccaacguggucaucaaggugugcgaguuccaguucugcaacgaccccuuccucggcguguacuaccacaagaacaacaagagcuggauggaguccgaguuccgggucuacagcuccgccaacaacugcacguucgaguacgugagccagcccuuccugauggaccuggagggcaagcaggggaacuucaagaaccuccgcgaguucguguucaagaacaucgacggcuacuucaagaucuacuccaagcacaccccgaucaaccugguccgggaccugccccagggguucagcgugcucgagccccugguggaccugcccaucggcaucaacaucacccgcuuccagacccuccuggcccugcaccgguccuaccucacgccgggggacagcagcuccggcuggaccgccggcgcggccgccuacuacgucggguaccugcagccccgcaccuuccugcucaaguacaacgagaacggcaccaucacggacgccguggacugcgcgcuggacccccugagcgagaccaagugcacccucaaguccuucaccguggagaaggggaucuaccagacgagcaacuuccggguccagcccaccgaguccaucgugcgcuucccgaacaucaccaaccugugccccuucggcgaggucuucaacgccacccgguucgccagcguguacgccuggaaccgcaagcggaucuccaacugcguggccgacuacagcguccuguacaacuccgcgagcuucuccacguucaagugcuacggcgugagccccaccaagcucaacgaccugugcuucaccaacguguacgccgacuccuucgucauccgcggggacgaggugcggcagaucgcccccggccagaccgggaagaucgccgacuacaacuacaagcugccggacgacuucacgggcugcgugaucgccuggaacagcaacaaccucgacuccaaggucgggggcaacuacaacuaccuguaccgccuguuccgcaagagcaaccucaagcccuucgagcgggacaucuccaccgagaucuaccaggcgggcagcacccccugcaacgggguggagggcuucaacugcuacuucccccugcaguccuacggguuccagccgaccaacggcgugggguaccagcccuaccgggucguggugcugagcuucgagcuccugcacgcccccgccacggucugcggccccaagaaguccaccaaccuggugaagaacaagugcgugaacuucaacuucaacggccucaccgggaccggcguccugaccgagagcaacaagaaguuccugccguuccagcaguucgggcgcgacaucgccgacacgaccgacgccgugcgcgacccccagacccuggagauccucgacaucacccccugcagcuucggcgggguguccgucaucacgccgggcaccaacaccagcaaccagguggcggugcuguaccagggcgucaacugcaccgaggugcccguggccauccacgccgaccagcugacgcccaccuggcgggucuacuccaccgggagcaacguguuccagacccgcgccggcugccucaucggggccgagcacgugaacaacuccuacgagugcgacauccccaucggcgcgggcaucugcgccagcuaccagacgcagaccaacuccccgcggcgcgcccggagcgucgccucccagagcaucaucgcguacaccaugucccugggggccgagaacagcguggccuacuccaacaacagcaucgccauccccaccaacuucacgaucuccgugaccaccgagauccugcccgucagcaugaccaagacgagcguggacugcaccauguacaucugcggcgacuccaccgagugcagcaaccuccugcugcaguacggguccuucugcacccagcucaaccgcgcccugacgggcaucgcgguggagcaggacaagaacacccaggaggucuucgcccaggugaagcagaucuacaagacgcccccgaucaaggacuucgggggcuucaacuucagccagauccugcccgaccccuccaagcccagcaagcgguccuucaucgaggaccuccuguucaacaaggugacccuggccgacgccggcuucaucaagcaguacggggacugccucggcgacaucgccgcgcgcgaccugaucugcgcccagaaguucaacgggcugaccguccucccgccccugcugaccgacgagaugaucgcccaguacaccagcgcccuccuggccggcaccaucacguccggguggaccuucggcgcgggcgccgcccugcagauccccuucgccaugcagauggcguaccgguucaacgggaucggcgugacccagaacgugcucuacgagaaccagaagcugaucgccaaccaguucaacagcgccaucgggaagauccaggacucccugagcuccaccgccagcgcccucggcaagcugcaggacgucgugaaccagaacgcgcaggcccugaacacgcucgugaagcagcuguccagcaacuucggggccaucuccagcguccugaacgacauccucucccgccuggacaagguggaggccgaggugcagaucgaccggcugaucaccggccgccuccagagccugcagaccuacgucacccagcagcugauccgggccgcggagauccgcgccagcgccaaccucgccgccaccaagauguccgagugcgugcugggccagagcaagcggguggacuucugcgggaagggcuaccaccugauguccuucccccagagcgcgccgcacggggucguguuccuccacgucacguacgugcccgcccaggagaagaacuucaccaccgcccccgccaucugccacgacggcaaggcgcacuucccccgcgaggggguguucgucuccaacggcacccacugguucgugacgcagcggaacuucuacgagccgcagaucaucaccaccgacaacaccuucgugagcggcaacugcgacgucgugaucgggaucgugaacaacacggucuacgacccccugcagcccgagcuggacuccuucaaggaggagcucgacaaguacuucaagaaccacaccagccccgacguggaccugggcgacaucuccgggaucaacgccagcguggucaacauccagaaggagaucgaccgccugaacgagguggccaagaaccucaacgagucccugaucgaccugcaggagcucggcaaguacgagcaguacaucaaguggccgugguacaucuggcugggcuucaucgccgggcugaucgccaucgugauggucaccaucaugcucugcugcaugaccagcugcugcuccugccugaagggcugcugcagcugcggguccugcugcaaguucgacgaggacgacagcgagcccgugcugaagggcgugaagcuccacuacacgugaggacuaguuauaagacugacuagcccgaugggccucccaacgggcccuccuccccuccuugcaccgagauuaauagaucuaaaaaaaaaaaaaaaaaaaaaaaaaaaaaaaaaaaaaaaaaaaaaaaaaaaaaaaaaaaaaaaaaaaaaaaaaaaaaaaaaaaaaaaaaaaaaaaaaaaa

SEQ ID NO: 25630 - RNA, 4017 nt, Artificial Sequence
  SARS-CoV-2/Wuhan/WIV05/2019__EPI_ISL_402128 spike protein mRNA gc (1-1273)(N439K_D614G)
aggagaaagcuuaccauguucguguuccugguccuccugccccuggugagcucccagugcgugaaccucaccacccgcacgcagcugccgcccgccuacaccaacagcuucacccggggcgucuacuaccccgacaagguguuccgcuccagcgugcugcacuccacccaggaccucuuccugcccuucuucagcaacgucacgugguuccacgccauccacguguccgggaccaacggcaccaagcgguucgacaacccggugcugcccuucaacgacggggucuacuucgcgagcaccgagaaguccaacaucauccgcggcuggaucuucgggacgacccucgacagcaagacccagucccugcugaucgugaacaacgccaccaacguggucaucaaggugugcgaguuccaguucugcaacgaccccuuccucggcguguacuaccacaagaacaacaagagcuggauggaguccgaguuccgggucuacagcuccgccaacaacugcacguucgaguacgugagccagcccuuccugauggaccuggagggcaagcaggggaacuucaagaaccuccgcgaguucguguucaagaacaucgacggcuacuucaagaucuacuccaagcacaccccgaucaaccugguccgggaccugccccagggguucagcgcccucgagccccugguggaccugcccaucggcaucaacaucacccgcuuccagacccuccuggcccugcaccgguccuaccucacgccgggggacagcagcuccggcuggaccgcgggcgccgccgccuacuacgugggguaccugcagccccgcaccuuccugcucaaguacaacgagaacggcaccaucacggacgcggucgacugcgcccuggacccccugagcgagaccaagugcacccucaaguccuucaccguggagaaggggaucuaccagacgagcaacuuccgggugcagcccaccgaguccaucguccgcuucccgaacaucaccaaccugugccccuucggcgagguguucaacgccacccgguucgccagcgucuacgccuggaaccgcaagcggaucuccaacugcguggcggacuacagcgugcuguacaacuccgccagcuucuccacguucaagugcuacggcgucagccccaccaagcucaacgaccugugcuucaccaacguguacgccgacuccuucgugauccgcggggacgagguccggcagaucgcccccggccagaccgggaagaucgccgacuacaacuacaagcugccggacgacuucacgggcugcgugaucgcguggaacagcaagaaccucgacuccaaggucgggggcaacuacaacuaccuguaccgccuguuccgcaagagcaaccucaagcccuucgagcgggacaucuccaccgagaucuaccaggccggcagcacccccugcaacgggguggagggcuucaacugcuacuucccccugcaguccuacggguuccagccgaccaacggcgugggguaccagcccuaccggguggucgugcugagcuucgagcuccugcacgcccccgccacggugugcggccccaagaaguccaccaaccuggucaagaacaagugcgugaacuucaacuucaacggccucaccgggaccggcgugcugaccgagagcaacaagaaguuccugccguuccagcaguucgggcgcgacaucgccgacacgaccgacgcgguccgcgacccccagacccuggagauccucgacaucacccccugcagcuucggcgggguguccgugaucacgccgggcaccaacaccagcaaccaggucgccgugcuguaccagggcgugaacugcaccgagguccccguggccauccacgccgaccagcugacgcccaccuggcggguguacuccaccgggagcaacgucuuccagacccgcgccggcugccucaucggggcggagcacgugaacaacuccuacgagugcgacauccccaucggcgccggcaucugcgccagcuaccagacgcagaccaacuccccgcggcgcgcccggagcguggcgucccagagcaucaucgccuacaccaugucccugggggccgagaacagcgucgccuacuccaacaacagcaucgccauccccaccaacuucacgaucuccgugaccaccgagauccugcccgugagcaugaccaagacgagcgucgacugcaccauguacaucugcggcgacuccaccgagugcagcaaccuccugcugcaguacggguccuucugcacccagcucaaccgcgcgcugacgggcaucgccguggagcaggacaagaacacccaggagguguucgcccaggucaagcagaucuacaagacgcccccgaucaaggacuucgggggcuucaacuucagccagauccugcccgaccccuccaagcccagcaagcgguccuucaucgaggaccuccuguucaacaaggugacccuggccgacgccggcuucaucaagcaguacggggacugccucggcgacaucgcggcccgcgaccugaucugcgcccagaaguucaacgggcugaccgugcucccgccccugcugaccgacgagaugaucgcccaguacaccagcgcccuccuggcgggcaccaucacguccggguggaccuucggcgccggcgccgcccugcagauccccuucgcgaugcagauggccuaccgguucaacgggaucggcgucacccagaacgugcucuacgagaaccagaagcugaucgccaaccaguucaacagcgccaucgggaagauccaggacucccugagcuccaccgccagcgcgcucggcaagcugcaggacguggucaaccagaacgcccaggcccugaacacgcucgugaagcagcuguccagcaacuucggggccaucuccagcgugcugaacgacauccucucccgccuggacaaggucgaggccgaggugcagaucgaccggcugaucaccggccgccuccagagccugcagaccuacgugacccagcagcugauccgggcggccgagauccgcgccagcgccaaccucgccgcgaccaagauguccgagugcguccugggccagagcaagcggguggacuucugcgggaagggcuaccaccugauguccuucccccagagcgccccgcacgggguggucuuccuccacgugacguacguccccgcccaggagaagaacuucaccaccgcccccgcgaucugccacgacggcaaggcccacuucccccgcgaggggguguucguguccaacggcacccacugguucgucacgcagcggaacuucuacgagccgcagaucaucaccaccgacaacaccuucgugagcggcaacugcgacguggucaucgggaucgugaacaacacgguguacgacccccugcagcccgagcuggacuccuucaaggaggagcucgacaaguacuucaagaaccacaccagccccgacgucgaccugggcgacaucuccgggaucaacgccagcguggugaacauccagaaggagaucgaccgccugaacgaggucgccaagaaccucaacgagucccugaucgaccugcaggagcucggcaaguacgagcaguacaucaaguggccgugguacaucuggcugggcuucaucgccgggcugaucgcgaucgugauggugaccaucaugcucugcugcaugaccagcugcugcuccugccugaagggcugcugcagcugcggguccugcugcaaguucgacgaggacgacagcgagcccguccugaagggcgugaagcuccacuacacgugaggacuaguuauaagacugacuagcccgaugggccucccaacgggcccuccuccccuccuugcaccgagauuaauagaucuaaaaaaaaaaaaaaaaaaaaaaaaaaaaaaaaaaaaaaaaaaaaaaaaaaaaaaaaaaaaaaaaaaaaaaaaaaaaaaaaaaaaaaaaaaaaaaaaaaaa

SEQ ID NO: 25631 - RNA, 4017 nt, Artificial Sequence
  SARS-CoV-2/Wuhan/WIV05/2019__EPI_ISL_402128 spike protein mRNA gc (1-1273)(S477N_D614G)
aggagaaagcuuaccauguucguguuccugguccuccugccccuggugagcucccagugcgugaaccucaccacccgcacgcagcugccgcccgccuacaccaacagcuucacccggggcgucuacuaccccgacaagguguuccgcuccagcgugcugcacuccacccaggaccucuuccugcccuucuucagcaacgucacgugguuccacgccauccacguguccgggaccaacggcaccaagcgguucgacaacccggugcugcccuucaacgacggggucuacuucgcgagcaccgagaaguccaacaucauccgcggcuggaucuucgggacgacccucgacagcaagacccagucccugcugaucgugaacaacgccaccaacguggucaucaaggugugcgaguuccaguucugcaacgaccccuuccucggcguguacuaccacaagaacaacaagagcuggauggaguccgaguuccgggucuacagcuccgccaacaacugcacguucgaguacgugagccagcccuuccugauggaccuggagggcaagcaggggaacuucaagaaccuccgcgaguucguguucaagaacaucgacggcuacuucaagaucuacuccaagcacaccccgaucaaccugguccgggaccugccccagggguucagcgcccucgagccccugguggaccugcccaucggcaucaacaucacccgcuuccagacccuccuggcccugcaccgguccuaccucacgccgggggacagcagcuccggcuggaccgcgggcgccgccgccuacuacgugggguaccugcagccccgcaccuuccugcucaaguacaacgagaacggcaccaucacggacgcggucgacugcgcccuggacccccugagcgagaccaagugcacccucaaguccuucaccguggagaaggggaucuaccagacgagcaacuuccgggugcagcccaccgaguccaucguccgcuucccgaacaucaccaaccugugccccuucggcgagguguucaacgccacccgguucgccagcgucuacgccuggaaccgcaagcggaucuccaacugcguggcggacuacagcgugcuguacaacuccgccagcuucuccacguucaagugcuacggcgucagccccaccaagcucaacgaccugugcuucaccaacguguacgccgacuccuucgugauccgcggggacgagguccggcagaucgcccccggccagaccgggaagaucgccgacuacaacuacaagcugccggacgacuucacgggcugcgugaucgcguggaacagcaacaaccucgacuccaaggucgggggcaacuacaacuaccuguaccgccuguuccgcaagagcaaccucaagcccuucgagcgggacaucuccaccgagaucuaccaggccggcaacacccccugcaacgggguggagggcuucaacugcuacuucccccugcagagcuacggguuccagccgaccaacggcgugggguaccagcccuaccggguggucgugcuguccuucgagcuccugcacgcccccgccacggugugcggccccaagaaguccaccaaccuggucaagaacaagugcgugaacuucaacuucaacggccucaccgggaccggcgugcugaccgagagcaacaagaaguuccugccguuccagcaguucgggcgcgacaucgccgacacgaccgacgcgguccgcgacccccagacccuggagauccucgacaucacccccugcagcuucggcggggugagcgugaucacgccgggcaccaacaccuccaaccaggucgccgugcuguaccagggcgugaacugcaccgagguccccguggccauccacgccgaccagcugacgcccaccuggcggguguacagcaccggguccaacgucuuccagacccgcgccggcugccucaucggggcggagcacgugaacaacagcuacgagugcgacauccccaucggcgccggcaucugcgccuccuaccagacgcagaccaacagcccgcggcgcgcccgguccguggcgagccaguccaucaucgccuacaccaugagccugggggccgagaacuccgucgccuacagcaacaacuccaucgccauccccaccaacuucacgaucagcgugaccaccgagauccugcccguguccaugaccaagacgagcgucgacugcaccauguacaucugcggcgacagcaccgagugcuccaaccuccugcugcaguacgggagcuucugcacccagcucaaccgcgcgcugacgggcaucgccguggagcaggacaagaacacccaggagguguucgcccaggucaagcagaucuacaagacgcccccgaucaaggacuucgggggcuucaacuucucccagauccugcccgaccccagcaagcccuccaagcggagcuucaucgaggaccuccuguucaacaaggugacccuggccgacgccggcuucaucaagcaguacggggacugccucggcgacaucgcggcccgcgaccugaucugcgcccagaaguucaacgggcugaccgugcucccgccccugcugaccgacgagaugaucgcccaguacaccuccgcccuccuggcgggcaccaucacgagcggguggaccuucggcgccggcgccgcccugcagauccccuucgcgaugcagauggccuaccgguucaacgggaucggcgucacccagaacgugcucuacgagaaccagaagcugaucgccaaccaguucaacuccgccaucgggaagauccaggacagccuguccagcaccgccuccgcgcucggcaagcugcaggacguggucaaccagaacgcccaggcccugaacacgcucgugaagcagcugagcuccaacuucggggccaucagcuccgugcugaacgacauccucagccgccuggacaaggucgaggccgaggugcagaucgaccggcugaucaccggccgccuccagucccugcagaccuacgugacccagcagcugauccgggcggccgagauccgcgccagcgccaaccucgccgcgaccaagaugagcgagugcguccugggccaguccaagcggguggacuucugcgggaagggcuaccaccugaugagcuucccccaguccgccccgcacgggguggucuuccuccacgugacguacguccccgcccaggagaagaacuucaccaccgcccccgcgaucugccacgacggcaaggcccacuucccccgcgaggggguguucgugagcaacggcacccacugguucgucacgcagcggaacuucuacgagccgcagaucaucaccaccgacaacaccuucguguccggcaacugcgacguggucaucgggaucgugaacaacacgguguacgacccccugcagcccgagcuggacagcuucaaggaggagcucgacaaguacuucaagaaccacaccucccccgacgucgaccugggcgacaucagcgggaucaacgccuccguggugaacauccagaaggagaucgaccgccugaacgaggucgccaagaaccucaacgagagccugaucgaccugcaggagcucggcaaguacgagcaguacaucaaguggccgugguacaucuggcugggcuucaucgccgggcugaucgcgaucgugauggugaccaucaugcucugcugcaugaccuccugcugcagcugccugaagggcugcugcuccugcgggagcugcugcaaguucgacgaggacgacuccgagcccguccugaagggcgugaagcuccacuacacgugaggacuaguuauaagacugacuagcccgaugggccucccaacgggcccuccuccccuccuugcaccgagauuaauagaucuaaaaaaaaaaaaaaaaaaaaaaaaaaaaaaaaaaaaaaaaaaaaaaaaaaaaaaaaaaaaaaaaaaaaaaaaaaaaaaaaaaaaaaaaaaaaaaaaaaaa

SEQ ID NO: 25632 - RNA, 4017 nt, Artificial Sequence
  SARS-CoV-2/Wuhan/WIV05/2019__EPI_ISL_402128 spike protein mRNA gc (1-1273)(N501Y_D614G)
aggagaaagcuuaccauguucguguuccugguccuccugccccuggugagcucccagugcgugaaccucaccacccgcacgcagcugccgcccgccuacaccaacagcuucacccggggcgucuacuaccccgacaagguguuccgcuccagcgugcugcacuccacccaggaccucuuccugcccuucuucagcaacgucacgugguuccacgccauccacguguccgggaccaacggcaccaagcgguucgacaacccggugcugcccuucaacgacggggucuacuucgcgagcaccgagaaguccaacaucauccgcggcuggaucuucgggacgacccucgacagcaagacccagucccugcugaucgugaacaacgccaccaacguggucaucaaggugugcgaguuccaguucugcaacgaccccuuccucggcguguacuaccacaagaacaacaagagcuggauggaguccgaguuccgggucuacagcuccgccaacaacugcacguucgaguacgugagccagcccuuccugauggaccuggagggcaagcaggggaacuucaagaaccuccgcgaguucguguucaagaacaucgacggcuacuucaagaucuacuccaagcacaccccgaucaaccugguccgggaccugccccagggguucagcgcccucgagccccugguggaccugcccaucggcaucaacaucacccgcuuccagacccuccuggcccugcaccgguccuaccucacgccgggggacagcagcuccggcuggaccgcgggcgccgccgccuacuacgugggguaccugcagccccgcaccuuccugcucaaguacaacgagaacggcaccaucacggacgcggucgacugcgcccuggacccccugagcgagaccaagugcacccucaaguccuucaccguggagaaggggaucuaccagacgagcaacuuccgggugcagcccaccgaguccaucguccgcuucccgaacaucaccaaccugugccccuucggcgagguguucaacgccacccgguucgccagcgucuacgccuggaaccgcaagcggaucuccaacugcguggcggacuacagcgugcuguacaacuccgccagcuucuccacguucaagugcuacggcgucagccccaccaagcucaacgaccugugcuucaccaacguguacgccgacuccuucgugauccgcggggacgagguccggcagaucgcccccggccagaccgggaagaucgccgacuacaacuacaagcugccggacgacuucacgggcugcgugaucgcguggaacagcaacaaccucgacuccaaggucgggggcaacuacaacuaccuguaccgccuguuccgcaagagcaaccucaagcccuucgagcgggacaucuccaccgagaucuaccaggccggcagcacccccugcaacgggguggagggcuucaacugcuacuucccccugcaguccuacggguuccagccgaccuacggcgugggguaccagcccuaccggguggucgugcugagcuucgagcuccugcacgcccccgccacggugugcggccccaagaaguccaccaaccuggucaagaacaagugcgugaacuucaacuucaacggccucaccgggaccggcgugcugaccgagagcaacaagaaguuccugccguuccagcaguucgggcgcgacaucgccgacacgaccgacgcgguccgcgacccccagacccuggagauccucgacaucacccccugcagcuucggcgggguguccgugaucacgccgggcaccaacaccagcaaccaggucgccgugcuguaccagggcgugaacugcaccgagguccccguggccauccacgccgaccagcugacgcccaccuggcggguguacuccaccgggagcaacgucuuccagacccgcgccggcugccucaucggggcggagcacgugaacaacuccuacgagugcgacauccccaucggcgccggcaucugcgccagcuaccagacgcagaccaacuccccgcggcgcgcccggagcguggcgucccagagcaucaucgccuacaccaugucccugggggccgagaacagcgucgccuacuccaacaacagcaucgccauccccaccaacuucacgaucuccgugaccaccgagauccugcccgugagcaugaccaagacgagcgucgacugcaccauguacaucugcggcgacuccaccgagugcagcaaccuccugcugcaguacggguccuucugcacccagcucaaccgcgcgcugacgggcaucgccguggagcaggacaagaacacccaggagguguucgcccaggucaagcagaucuacaagacgcccccgaucaaggacuucgggggcuucaacuucagccagauccugcccgaccccuccaagcccagcaagcgguccuucaucgaggaccuccuguucaacaaggugacccuggccgacgccggcuucaucaagcaguacggggacugccucggcgacaucgcggcccgcgaccugaucugcgcccagaaguucaacgggcugaccgugcucccgccccugcugaccgacgagaugaucgcccaguacaccagcgcccuccuggcgggcaccaucacguccggguggaccuucggcgccggcgccgcccugcagauccccuucgcgaugcagauggccuaccgguucaacgggaucggcgucacccagaacgugcucuacgagaaccagaagcugaucgccaaccaguucaacagcgccaucgggaagauccaggacucccugagcuccaccgccagcgcgcucggcaagcugcaggacguggucaaccagaacgcccaggcccugaacacgcucgugaagcagcuguccagcaacuucggggccaucuccagcgugcugaacgacauccucucccgccuggacaaggucgaggccgaggugcagaucgaccggcugaucaccggccgccuccagagccugcagaccuacgugacccagcagcugauccgggcggccgagauccgcgccagcgccaaccucgccgcgaccaagauguccgagugcguccugggccagagcaagcggguggacuucugcgggaagggcuaccaccugauguccuucccccagagcgccccgcacgggguggucuuccuccacgugacguacguccccgcccaggagaagaacuucaccaccgcccccgcgaucugccacgacggcaaggcccacuucccccgcgaggggguguucguguccaacggcacccacugguucgucacgcagcggaacuucuacgagccgcagaucaucaccaccgacaacaccuucgugagcggcaacugcgacguggucaucgggaucgugaacaacacgguguacgacccccugcagcccgagcuggacuccuucaaggaggagcucgacaaguacuucaagaaccacaccagccccgacgucgaccugggcgacaucuccgggaucaacgccagcguggugaacauccagaaggagaucgaccgccugaacgaggucgccaagaaccucaacgagucccugaucgaccugcaggagcucggcaaguacgagcaguacaucaaguggccgugguacaucuggcugggcuucaucgccgggcugaucgcgaucgugauggugaccaucaugcucugcugcaugaccagcugcugcuccugccugaagggcugcugcagcugcggguccugcugcaaguucgacgaggacgacagcgagcccguccugaagggcgugaagcuccacuacacgugaggacuaguuauaagacugacuagcccgaugggccucccaacgggcccuccuccccuccuugcaccgagauuaauagaucuaaaaaaaaaaaaaaaaaaaaaaaaaaaaaaaaaaaaaaaaaaaaaaaaaaaaaaaaaaaaaaaaaaaaaaaaaaaaaaaaaaaaaaaaaaaaaaaaaaaa

SEQ ID NO: 25633 - RNA, 4011 nt, Artificial Sequence
  SARS-CoV-2/Wuhan/WIV05/2019__EPI_ISL_402128 spike protein mRNA gc (1-1273)(H69del_V70del_D614G)
aggagaaagcuuaccauguucguguuccugguccuccugccccuggugagcucccagugcgugaaccucaccacccgcacgcagcugccgcccgccuacaccaacagcuucacccggggcgucuacuaccccgacaagguguuccgcuccagcgugcugcacuccacccaggaccucuuccugcccuucuucagcaacgucacgugguuccacgccaucuccgggaccaacggcaccaagcgguucgacaacccggugcugcccuucaacgacgggguguacuucgcgagcaccgagaaguccaacaucauccgcggcuggaucuucgggacgacccucgacagcaagacccagucccugcugaucgucaacaacgccaccaacguggugaucaaggucugcgaguuccaguucugcaacgaccccuuccucggcguguacuaccacaagaacaacaagagcuggauggaguccgaguuccggguguacagcuccgccaacaacugcacguucgaguacgucagccagcccuuccugauggaccuggagggcaagcaggggaacuucaagaaccuccgcgaguucguguucaagaacaucgacggcuacuucaagaucuacuccaagcacaccccgaucaaccuggugcgggaccugccccagggguucagcgcccucgagccccuggucgaccugcccaucggcaucaacaucacccgcuuccagacccuccuggcccugcaccgguccuaccucacgccgggggacagcagcuccggcuggaccgcgggcgccgccgccuacuacgugggguaccugcagccccgcaccuuccugcucaaguacaacgagaacggcaccaucacggacgcgguggacugcgcccuggacccccugagcgagaccaagugcacccucaaguccuucaccgucgagaaggggaucuaccagacgagcaacuuccgggugcagcccaccgaguccaucgugcgcuucccgaacaucaccaaccugugccccuucggcgaggucuucaacgccacccgguucgccagcguguacgccuggaaccgcaagcggaucuccaacugcgucgcggacuacagcgugcuguacaacuccgccagcuucuccacguucaagugcuacggcgugagccccaccaagcucaacgaccugugcuucaccaacgucuacgccgacuccuucgugauccgcggggacgaggugcggcagaucgcccccggccagaccgggaagaucgccgacuacaacuacaagcugccggacgacuucacgggcugcgucaucgcguggaacagcaacaaccucgacuccaaggucgggggcaacuacaacuaccuguaccgccuguuccgcaagagcaaccucaagcccuucgagcgggacaucuccaccgagaucuaccaggccggcagcacccccugcaacgggguggagggcuucaacugcuacuucccccugcaguccuacggguuccagccgaccaacggcgugggguaccagcccuaccggguggugguccugagcuucgagcuccugcacgcccccgccacggugugcggccccaagaaguccaccaaccuggugaagaacaagugcgucaacuucaacuucaacggccucaccgggaccggcgugcugaccgagagcaacaagaaguuccugccguuccagcaguucgggcgcgacaucgccgacacgaccgacgcggugcgcgacccccagacccuggagauccucgacaucacccccugcagcuucggcggggucuccgugaucacgccgggcaccaacaccagcaaccagguggccguccuguaccagggcgugaacugcaccgaggugcccgucgccauccacgccgaccagcugacgcccaccuggcggguguacuccaccgggagcaacguguuccagacccgcgccggcugccucaucggggcggagcacgucaacaacuccuacgagugcgacauccccaucggcgccggcaucugcgccagcuaccagacgcagaccaacuccccgcggcgcgcccggagcguggcgucccagagcaucaucgccuacaccaugucccugggggccgagaacagcguggccuacuccaacaacagcaucgccauccccaccaacuucacgaucuccgucaccaccgagauccugcccgugagcaugaccaagacgagcguggacugcaccauguacaucugcggcgacuccaccgagugcagcaaccuccugcugcaguacggguccuucugcacccagcucaaccgcgcgcugacgggcaucgccgucgagcaggacaagaacacccaggagguguucgcccaggugaagcagaucuacaagacgcccccgaucaaggacuucgggggcuucaacuucagccagauccugcccgaccccuccaagcccagcaagcgguccuucaucgaggaccuccuguucaacaaggucacccuggccgacgccggcuucaucaagcaguacggggacugccucggcgacaucgcggcccgcgaccugaucugcgcccagaaguucaacgggcugaccgugcucccgccccugcugaccgacgagaugaucgcccaguacaccagcgcccuccuggcgggcaccaucacguccggguggaccuucggcgccggcgccgcccugcagauccccuucgcgaugcagauggccuaccgguucaacgggaucggcgugacccagaacguccucuacgagaaccagaagcugaucgccaaccaguucaacagcgccaucgggaagauccaggacucccugagcuccaccgccagcgcgcucggcaagcugcaggacguggugaaccagaacgcccaggcccugaacacgcucgucaagcagcuguccagcaacuucggggccaucuccagcgugcugaacgacauccucucccgccuggacaagguggaggccgagguccagaucgaccggcugaucaccggccgccuccagagccugcagaccuacgugacccagcagcugauccgggcggccgagauccgcgccagcgccaaccucgccgcgaccaagauguccgagugcgugcugggccagagcaagcgggucgacuucugcgggaagggcuaccaccugauguccuucccccagagcgccccgcacggggugguguuccuccacgucacguacgugcccgcccaggagaagaacuucaccaccgcccccgcgaucugccacgacggcaaggcccacuucccccgcgagggggucuucguguccaacggcacccacugguucgugacgcagcggaacuucuacgagccgcagaucaucaccaccgacaacaccuucgucagcggcaacugcgacguggugaucgggaucgucaacaacacgguguacgacccccugcagcccgagcuggacuccuucaaggaggagcucgacaaguacuucaagaaccacaccagccccgacguggaccugggcgacaucuccgggaucaacgccagcgucgugaacauccagaaggagaucgaccgccugaacgagguggccaagaaccucaacgagucccugaucgaccugcaggagcucggcaaguacgagcaguacaucaaguggccgugguacaucuggcugggcuucaucgccgggcugaucgcgaucgucauggugaccaucaugcucugcugcaugaccagcugcugcuccugccugaagggcugcugcagcugcggguccugcugcaaguucgacgaggacgacagcgagcccgugcugaagggcgucaagcuccacuacacgugaggacuaguuauaagacugacuagcccgaugggccucccaacgggcccuccuccccuccuugcaccgagauuaauagaucuaaaaaaaaaaaaaaaaaaaaaaaaaaaaaaaaaaaaaaaaaaaaaaaaaaaaaaaaaaaaaaaaaaaaaaaaaaaaaaaaaaaaaaaaaaaaaaaaaaaa

SEQ ID NO: 25634 - RNA, 4017 nt, Artificial Sequence
  SARS-CoV-2/Wuhan/WIV05/2019__EPI_ISL_402128 spike protein mRNA gc (1-1273)(Y453F_D614G)
aggagaaagcuuaccauguucguguuccugguccuccugccccuggugagcucccagugcgugaaccucaccacccgcacgcagcugccgcccgccuacaccaacagcuucacccggggcgucuacuaccccgacaagguguuccgcuccagcgugcugcacuccacccaggaccucuuccugcccuucuucagcaacgucacgugguuccacgccauccacguguccgggaccaacggcaccaagcgguucgacaacccggugcugcccuucaacgacggggucuacuucgcgagcaccgagaaguccaacaucauccgcggcuggaucuucgggacgacccucgacagcaagacccagucccugcugaucgugaacaacgccaccaacguggucaucaaggugugcgaguuccaguucugcaacgaccccuuccucggcguguacuaccacaagaacaacaagagcuggauggaguccgaguuccgggucuacagcuccgccaacaacugcacguucgaguacgugagccagcccuuccugauggaccuggagggcaagcaggggaacuucaagaaccuccgcgaguucguguucaagaacaucgacggcuacuucaagaucuacuccaagcacaccccgaucaaccugguccgggaccugccccagggguucagcgcccucgagccccugguggaccugcccaucggcaucaacaucacccgcuuccagacccuccuggcccugcaccgguccuaccucacgccgggggacagcagcuccggcuggaccgcgggcgccgccgccuacuacgugggguaccugcagccccgcaccuuccugcucaaguacaacgagaacggcaccaucacggacgcggucgacugcgcccuggacccccugagcgagaccaagugcacccucaaguccuucaccguggagaaggggaucuaccagacgagcaacuuccgggugcagcccaccgaguccaucguccgcuucccgaacaucaccaaccugugccccuucggcgagguguucaacgccacccgguucgccagcgucuacgccuggaaccgcaagcggaucuccaacugcguggcggacuacagcgugcuguacaacuccgccagcuucuccacguucaagugcuacggcgucagccccaccaagcucaacgaccugugcuucaccaacguguacgccgacuccuucgugauccgcggggacgagguccggcagaucgcccccggccagaccgggaagaucgccgacuacaacuacaagcugccggacgacuucacgggcugcgugaucgcguggaacagcaacaaccucgacuccaaggucgggggcaacuacaacuaccuguuccgccuguuccgcaagagcaaccucaagcccuucgagcgggacaucuccaccgagaucuaccaggccggcagcacccccugcaacgggguggagggcuucaacugcuacuucccccugcaguccuacggguuccagccgaccaacggcgugggguaccagcccuaccggguggucgugcugagcuucgagcuccugcacgcccccgccacggugugcggccccaagaaguccaccaaccuggucaagaacaagugcgugaacuucaacuucaacggccucaccgggaccggcgugcugaccgagagcaacaagaaguuccugccguuccagcaguucgggcgcgacaucgccgacacgaccgacgcgguccgcgacccccagacccuggagauccucgacaucacccccugcagcuucggcgggguguccgugaucacgccgggcaccaacaccagcaaccaggucgccgugcuguaccagggcgugaacugcaccgagguccccguggccauccacgccgaccagcugacgcccaccuggcggguguacuccaccgggagcaacgucuuccagacccgcgccggcugccucaucggggcggagcacgugaacaacuccuacgagugcgacauccccaucggcgccggcaucugcgccagcuaccagacgcagaccaacuccccgcggcgcgcccggagcguggcgucccagagcaucaucgccuacaccaugucccugggggccgagaacagcgucgccuacuccaacaacagcaucgccauccccaccaacuucacgaucuccgugaccaccgagauccugcccgugagcaugaccaagacgagcgucgacugcaccauguacaucugcggcgacuccaccgagugcagcaaccuccugcugcaguacggguccuucugcacccagcucaaccgcgcgcugacgggcaucgccguggagcaggacaagaacacccaggagguguucgcccaggucaagcagaucuacaagacgcccccgaucaaggacuucgggggcuucaacuucagccagauccugcccgaccccuccaagcccagcaagcgguccuucaucgaggaccuccuguucaacaaggugacccuggccgacgccggcuucaucaagcaguacggggacugccucggcgacaucgcggcccgcgaccugaucugcgcccagaaguucaacgggcugaccgugcucccgccccugcugaccgacgagaugaucgcccaguacaccagcgcccuccuggcgggcaccaucacguccggguggaccuucggcgccggcgccgcccugcagauccccuucgcgaugcagauggccuaccgguucaacgggaucggcgucacccagaacgugcucuacgagaaccagaagcugaucgccaaccaguucaacagcgccaucgggaagauccaggacucccugagcuccaccgccagcgcgcucggcaagcugcaggacguggucaaccagaacgcccaggcccugaacacgcucgugaagcagcuguccagcaacuucggggccaucuccagcgugcugaacgacauccucucccgccuggacaaggucgaggccgaggugcagaucgaccggcugaucaccggccgccuccagagccugcagaccuacgugacccagcagcugauccgggcggccgagauccgcgccagcgccaaccucgccgcgaccaagauguccgagugcguccugggccagagcaagcggguggacuucugcgggaagggcuaccaccugauguccuucccccagagcgccccgcacgggguggucuuccuccacgugacguacguccccgcccaggagaagaacuucaccaccgcccccgcgaucugccacgacggcaaggcccacuucccccgcgaggggguguucguguccaacggcacccacugguucgucacgcagcggaacuucuacgagccgcagaucaucaccaccgacaacaccuucgugagcggcaacugcgacguggucaucgggaucgugaacaacacgguguacgacccccugcagcccgagcuggacuccuucaaggaggagcucgacaaguacuucaagaaccacaccagccccgacgucgaccugggcgacaucuccgggaucaacgccagcguggugaacauccagaaggagaucgaccgccugaacgaggucgccaagaaccucaacgagucccugaucgaccugcaggagcucggcaaguacgagcaguacaucaaguggccgugguacaucuggcugggcuucaucgccgggcugaucgcgaucgugauggugaccaucaugcucugcugcaugaccagcugcugcuccugccugaagggcugcugcagcugcggguccugcugcaaguucgacgaggacgacagcgagcccguccugaagggcgugaagcuccacuacacgugaggacuaguuauaagacugacuagcccgaugggccucccaacgggcccuccuccccuccuugcaccgagauuaauagaucuaaaaaaaaaaaaaaaaaaaaaaaaaaaaaaaaaaaaaaaaaaaaaaaaaaaaaaaaaaaaaaaaaaaaaaaaaaaaaaaaaaaaaaaaaaaaaaaaaaaa

SEQ ID NO: 25635 - RNA, 4017 nt, Artificial Sequence
  SARS-CoV-2/Wuhan/WIV05/2019__EPI_ISL_402128 spike protein mRNA gc (1-1273)(D614G_I692V)
aggagaaagcuuaccauguucguguuccugguccuccugccccuggugagcucccagugcgugaaccucaccacccgcacgcagcugccgcccgccuacaccaacagcuucacccggggcgucuacuaccccgacaagguguuccgcuccagcgugcugcacuccacccaggaccucuuccugcccuucuucagcaacgucacgugguuccacgccauccacguguccgggaccaacggcaccaagcgguucgacaacccggugcugcccuucaacgacggggucuacuucgcgagcaccgagaaguccaacaucauccgcggcuggaucuucgggacgacccucgacagcaagacccagucccugcugaucgugaacaacgccaccaacguggucaucaaggugugcgaguuccaguucugcaacgaccccuuccucggcguguacuaccacaagaacaacaagagcuggauggaguccgaguuccgggucuacagcuccgccaacaacugcacguucgaguacgugagccagcccuuccugauggaccuggagggcaagcaggggaacuucaagaaccuccgcgaguucguguucaagaacaucgacggcuacuucaagaucuacuccaagcacaccccgaucaaccugguccgggaccugccccagggguucagcgcccucgagccccugguggaccugcccaucggcaucaacaucacccgcuuccagacccuccuggcccugcaccgguccuaccucacgccgggggacagcagcuccggcuggaccgcgggcgccgccgccuacuacgugggguaccugcagccccgcaccuuccugcucaaguacaacgagaacggcaccaucacggacgcggucgacugcgcccuggacccccugagcgagaccaagugcacccucaaguccuucaccguggagaaggggaucuaccagacgagcaacuuccgggugcagcccaccgaguccaucguccgcuucccgaacaucaccaaccugugccccuucggcgagguguucaacgccacccgguucgccagcgucuacgccuggaaccgcaagcggaucuccaacugcguggcggacuacagcgugcuguacaacuccgccagcuucuccacguucaagugcuacggcgucagccccaccaagcucaacgaccugugcuucaccaacguguacgccgacuccuucgugauccgcggggacgagguccggcagaucgcccccggccagaccgggaagaucgccgacuacaacuacaagcugccggacgacuucacgggcugcgugaucgcguggaacagcaacaaccucgacuccaaggucgggggcaacuacaacuaccuguaccgccuguuccgcaagagcaaccucaagcccuucgagcgggacaucuccaccgagaucuaccaggccggcagcacccccugcaacgggguggagggcuucaacugcuacuucccccugcaguccuacggguuccagccgaccaacggcgugggguaccagcccuaccggguggucgugcugagcuucgagcuccugcacgcccccgccacggugugcggccccaagaaguccaccaaccuggucaagaacaagugcgugaacuucaacuucaacggccucaccgggaccggcgugcugaccgagagcaacaagaaguuccugccguuccagcaguucgggcgcgacaucgccgacacgaccgacgcgguccgcgacccccagacccuggagauccucgacaucacccccugcagcuucggcgggguguccgugaucacgccgggcaccaacaccagcaaccaggucgccgugcuguaccagggcgugaacugcaccgagguccccguggccauccacgccgaccagcugacgcccaccuggcggguguacuccaccgggagcaacgucuuccagacccgcgccggcugccucaucggggcggagcacgugaacaacuccuacgagugcgacauccccaucggcgccggcaucugcgccagcuaccagacgcagaccaacuccccgcggcgcgcccggagcguggcgucccagagcgucaucgccuacaccaugucccugggggccgagaacagcguggccuacuccaacaacagcaucgccauccccaccaacuucacgaucuccgugaccaccgagauccugcccgucagcaugaccaagacgagcguggacugcaccauguacaucugcggcgacuccaccgagugcagcaaccuccugcugcaguacggguccuucugcacccagcucaaccgcgcgcugacgggcaucgccguggagcaggacaagaacacccaggaggucuucgcccaggugaagcagaucuacaagacgcccccgaucaaggacuucgggggcuucaacuucagccagauccugcccgaccccuccaagcccagcaagcgguccuucaucgaggaccuccuguucaacaaggugacccuggccgacgccggcuucaucaagcaguacggggacugccucggcgacaucgcggcccgcgaccugaucugcgcccagaaguucaacgggcugaccguccucccgccccugcugaccgacgagaugaucgcccaguacaccagcgcccuccuggcgggcaccaucacguccggguggaccuucggcgccggcgccgcccugcagauccccuucgcgaugcagauggccuaccgguucaacgggaucggcgugacccagaacgugcucuacgagaaccagaagcugaucgccaaccaguucaacagcgccaucgggaagauccaggacucccugagcuccaccgccagcgcgcucggcaagcugcaggacgucgugaaccagaacgcccaggcccugaacacgcucgugaagcagcuguccagcaacuucggggccaucuccagcguccugaacgacauccucucccgccuggacaagguggaggccgaggugcagaucgaccggcugaucaccggccgccuccagagccugcagaccuacgucacccagcagcugauccgggcggccgagauccgcgccagcgccaaccucgccgcgaccaagauguccgagugcgugcugggccagagcaagcggguggacuucugcgggaagggcuaccaccugauguccuucccccagagcgccccgcacggggucguguuccuccacgucacguacgugcccgcccaggagaagaacuucaccaccgcccccgcgaucugccacgacggcaaggcccacuucccccgcgaggggguguucgucuccaacggcacccacugguucgugacgcagcggaacuucuacgagccgcagaucaucaccaccgacaacaccuucgugagcggcaacugcgacgucgugaucgggaucgugaacaacacggucuacgacccccugcagcccgagcuggacuccuucaaggaggagcucgacaaguacuucaagaaccacaccagccccgacguggaccugggcgacaucuccgggaucaacgccagcguggucaacauccagaaggagaucgaccgccugaacgagguggccaagaaccucaacgagucccugaucgaccugcaggagcucggcaaguacgagcaguacaucaaguggccgugguacaucuggcugggcuucaucgccgggcugaucgcgaucgugauggucaccaucaugcucugcugcaugaccagcugcugcuccugccugaagggcugcugcagcugcggguccugcugcaaguucgacgaggacgacagcgagcccgugcugaagggcgugaagcuccacuacacgugaggacuaguuauaagacugacuagcccgaugggccucccaacgggcccuccuccccuccuugcaccgagauuaauagaucuaaaaaaaaaaaaaaaaaaaaaaaaaaaaaaaaaaaaaaaaaaaaaaaaaaaaaaaaaaaaaaaaaaaaaaaaaaaaaaaaaaaaaaaaaaaaaaaaaaaa

SEQ ID NO: 25636 - RNA, 4017 nt, Artificial Sequence
  SARS-CoV-2/Wuhan/WIV05/2019__EPI_ISL_402128 spike protein mRNA gc (1-1273)(D614G_M1229I)
aggagaaagcuuaccauguucguguuccugguccuccugccccuggugagcucccagugcgugaaccucaccacccgcacgcagcugccgcccgccuacaccaacagcuucacccggggcgucuacuaccccgacaagguguuccgcuccagcgugcugcacuccacccaggaccucuuccugcccuucuucagcaacgucacgugguuccacgccauccacguguccgggaccaacggcaccaagcgguucgacaacccggugcugcccuucaacgacggggucuacuucgcgagcaccgagaaguccaacaucauccgcggcuggaucuucgggacgacccucgacagcaagacccagucccugcugaucgugaacaacgccaccaacguggucaucaaggugugcgaguuccaguucugcaacgaccccuuccucggcguguacuaccacaagaacaacaagagcuggauggaguccgaguuccgggucuacagcuccgccaacaacugcacguucgaguacgugagccagcccuuccugauggaccuggagggcaagcaggggaacuucaagaaccuccgcgaguucguguucaagaacaucgacggcuacuucaagaucuacuccaagcacaccccgaucaaccugguccgggaccugccccagggguucagcgcccucgagccccugguggaccugcccaucggcaucaacaucacccgcuuccagacccuccuggcccugcaccgguccuaccucacgccgggggacagcagcuccggcuggaccgcgggcgccgccgccuacuacgugggguaccugcagccccgcaccuuccugcucaaguacaacgagaacggcaccaucacggacgcggucgacugcgcccuggacccccugagcgagaccaagugcacccucaaguccuucaccguggagaaggggaucuaccagacgagcaacuuccgggugcagcccaccgaguccaucguccgcuucccgaacaucaccaaccugugccccuucggcgagguguucaacgccacccgguucgccagcgucuacgccuggaaccgcaagcggaucuccaacugcguggcggacuacagcgugcuguacaacuccgccagcuucuccacguucaagugcuacggcgucagccccaccaagcucaacgaccugugcuucaccaacguguacgccgacuccuucgugauccgcggggacgagguccggcagaucgcccccggccagaccgggaagaucgccgacuacaacuacaagcugccggacgacuucacgggcugcgugaucgcguggaacagcaacaaccucgacuccaaggucgggggcaacuacaacuaccuguaccgccuguuccgcaagagcaaccucaagcccuucgagcgggacaucuccaccgagaucuaccaggccggcagcacccccugcaacgggguggagggcuucaacugcuacuucccccugcaguccuacggguuccagccgaccaacggcgugggguaccagcccuaccggguggucgugcugagcuucgagcuccugcacgcccccgccacggugugcggccccaagaaguccaccaaccuggucaagaacaagugcgugaacuucaacuucaacggccucaccgggaccggcgugcugaccgagagcaacaagaaguuccugccguuccagcaguucgggcgcgacaucgccgacacgaccgacgcgguccgcgacccccagacccuggagauccucgacaucacccccugcagcuucggcgggguguccgugaucacgccgggcaccaacaccagcaaccaggucgccgugcuguaccagggcgugaacugcaccgagguccccguggccauccacgccgaccagcugacgcccaccuggcggguguacuccaccgggagcaacgucuuccagacccgcgccggcugccucaucggggcggagcacgugaacaacuccuacgagugcgacauccccaucggcgccggcaucugcgccagcuaccagacgcagaccaacuccccgcggcgcgcccggagcguggcgucccagagcaucaucgccuacaccaugucccugggggccgagaacagcgucgccuacuccaacaacagcaucgccauccccaccaacuucacgaucuccgugaccaccgagauccugcccgugagcaugaccaagacgagcgucgacugcaccauguacaucugcggcgacuccaccgagugcagcaaccuccugcugcaguacggguccuucugcacccagcucaaccgcgcgcugacgggcaucgccguggagcaggacaagaacacccaggagguguucgcccaggucaagcagaucuacaagacgcccccgaucaaggacuucgggggcuucaacuucagccagauccugcccgaccccuccaagcccagcaagcgguccuucaucgaggaccuccuguucaacaaggugacccuggccgacgccggcuucaucaagcaguacggggacugccucggcgacaucgcggcccgcgaccugaucugcgcccagaaguucaacgggcugaccgugcucccgccccugcugaccgacgagaugaucgcccaguacaccagcgcccuccuggcgggcaccaucacguccggguggaccuucggcgccggcgccgcccugcagauccccuucgcgaugcagauggccuaccgguucaacgggaucggcgucacccagaacgugcucuacgagaaccagaagcugaucgccaaccaguucaacagcgccaucgggaagauccaggacucccugagcuccaccgccagcgcgcucggcaagcugcaggacguggucaaccagaacgcccaggcccugaacacgcucgugaagcagcuguccagcaacuucggggccaucuccagcgugcugaacgacauccucucccgccuggacaaggucgaggccgaggugcagaucgaccggcugaucaccggccgccuccagagccugcagaccuacgugacccagcagcugauccgggcggccgagauccgcgccagcgccaaccucgccgcgaccaagauguccgagugcguccugggccagagcaagcggguggacuucugcgggaagggcuaccaccugauguccuucccccagagcgccccgcacgggguggucuuccuccacgugacguacguccccgcccaggagaagaacuucaccaccgcccccgcgaucugccacgacggcaaggcccacuucccccgcgaggggguguucguguccaacggcacccacugguucgucacgcagcggaacuucuacgagccgcagaucaucaccaccgacaacaccuucgugagcggcaacugcgacguggucaucgggaucgugaacaacacgguguacgacccccugcagcccgagcuggacuccuucaaggaggagcucgacaaguacuucaagaaccacaccagccccgacgucgaccugggcgacaucuccgggaucaacgccagcguggugaacauccagaaggagaucgaccgccugaacgaggucgccaagaaccucaacgagucccugaucgaccugcaggagcucggcaaguacgagcaguacaucaaguggccgugguacaucuggcugggcuucaucgccgggcugaucgcgaucgugaucgugaccaucaugcucugcugcaugaccagcugcugcuccugccugaagggcugcugcagcugcggguccugcugcaaguucgacgaggacgacagcgagcccguccugaagggcgugaagcuccacuacacgugaggacuaguuauaagacugacuagcccgaugggccucccaacgggcccuccuccccuccuugcaccgagauuaauagaucuaaaaaaaaaaaaaaaaaaaaaaaaaaaaaaaaaaaaaaaaaaaaaaaaaaaaaaaaaaaaaaaaaaaaaaaaaaaaaaaaaaaaaaaaaaaaaaaaaaaa

SEQ ID NO: 25637 - RNA, 4011 nt, Artificial Sequence
  SARS-CoV-2/Wuhan/WIV05/2019__EPI_ISL_402128 spike protein mRNA gc (1-1273)(H69del_V70del_A222V_Y453F_S477N_D614G_I692V)
aggagaaagcuuaccauguucguguuccugguccuccugccccuggugagcucccagugcgugaaccucaccacccgcacgcagcugccgcccgccuacaccaacagcuucacccggggcgucuacuaccccgacaagguguuccgcuccagcgugcugcacuccacccaggaccucuuccugcccuucuucagcaacgucacgugguuccacgccaucuccgggaccaacggcaccaagcgguucgacaacccggugcugcccuucaacgacgggguguacuucgcgagcaccgagaaguccaacaucauccgcggcuggaucuucgggacgacccucgacagcaagacccagucccugcugaucgucaacaacgccaccaacguggugaucaaggucugcgaguuccaguucugcaacgaccccuuccucggcguguacuaccacaagaacaacaagagcuggauggaguccgaguuccggguguacagcuccgccaacaacugcacguucgaguacgucagccagcccuuccugauggaccuggagggcaagcaggggaacuucaagaaccuccgcgaguucguguucaagaacaucgacggcuacuucaagaucuacuccaagcacaccccgaucaaccuggugcgggaccugccccagggguucagcguccucgagccccugguggaccugcccaucggcaucaacaucacccgcuuccagacccuccuggcccugcaccgguccuaccucacgccgggggacagcagcuccggcuggaccgccggcgcggccgccuacuacgugggguaccugcagccccgcaccuuccugcucaaguacaacgagaacggcaccaucacggacgccgucgacugcgcgcuggacccccugagcgagaccaagugcacccucaaguccuucaccguggagaaggggaucuaccagacgagcaacuuccgggugcagcccaccgaguccaucguccgcuucccgaacaucaccaaccugugccccuucggcgagguguucaacgccacccgguucgccagcgucuacgccuggaaccgcaagcggaucuccaacugcguggccgacuacagcgugcuguacaacuccgcgagcuucuccacguucaagugcuacggcgucagccccaccaagcucaacgaccugugcuucaccaacguguacgccgacuccuucgugauccgcggggacgagguccggcagaucgcccccggccagaccgggaagaucgccgacuacaacuacaagcugccggacgacuucacgggcugcgugaucgccuggaacagcaacaaccucgacuccaaggucgggggcaacuacaacuaccuguuccgccuguuccgcaagagcaaccucaagcccuucgagcgggacaucuccaccgagaucuaccaggcgggcaacacccccugcaacgggguggagggcuucaacugcuacuucccccugcagagcuacggguuccagccgaccaacggcgugggguaccagcccuaccggguggucgugcuguccuucgagcuccugcacgcccccgccacggugugcggccccaagaaguccaccaaccuggucaagaacaagugcgugaacuucaacuucaacggccucaccgggaccggcgugcugaccgagagcaacaagaaguuccugccguuccagcaguucgggcgcgacaucgccgacacgaccgacgccguccgcgacccccagacccuggagauccucgacaucacccccugcagcuucggcggggugagcgugaucacgccgggcaccaacaccuccaaccaggucgcggugcuguaccagggcgugaacugcaccgagguccccguggccauccacgccgaccagcugacgcccaccuggcggguguacagcaccggguccaacgucuuccagacccgcgccggcugccucaucggggccgagcacgugaacaacagcuacgagugcgacauccccaucggcgcgggcaucugcgccuccuaccagacgcagaccaacagcccgcggcgcgcccgguccguggccagccaguccgucaucgcguacaccaugagccugggggccgagaacuccguggccuacagcaacaacuccaucgccauccccaccaacuucacgaucagcgugaccaccgagauccugcccgucuccaugaccaagacgagcguggacugcaccauguacaucugcggcgacagcaccgagugcuccaaccuccugcugcaguacgggagcuucugcacccagcucaaccgcgcccugacgggcaucgcgguggagcaggacaagaacacccaggaggucuucgcccaggugaagcagaucuacaagacgcccccgaucaaggacuucgggggcuucaacuucucccagauccugcccgaccccagcaagcccuccaagcggagcuucaucgaggaccuccuguucaacaaggugacccuggccgacgccggcuucaucaagcaguacggggacugccucggcgacaucgccgcgcgcgaccugaucugcgcccagaaguucaacgggcugaccguccucccgccccugcugaccgacgagaugaucgcccaguacaccuccgcccuccuggccggcaccaucacgagcggguggaccuucggcgcgggcgccgcccugcagauccccuucgccaugcagauggcguaccgguucaacgggaucggcgugacccagaacgugcucuacgagaaccagaagcugaucgccaaccaguucaacuccgccaucgggaagauccaggacagccuguccagcaccgccuccgcccucggcaagcugcaggacgucgugaaccagaacgcgcaggcccugaacacgcucgugaagcagcugagcuccaacuucggggccaucagcuccguccugaacgacauccucagccgccuggacaagguggaggccgaggugcagaucgaccggcugaucaccggccgccuccagucccugcagaccuacgucacccagcagcugauccgggccgcggagauccgcgccagcgccaaccucgccgccaccaagaugagcgagugcgugcugggccaguccaagcggguggacuucugcgggaagggcuaccaccugaugagcuucccccaguccgcgccgcacggggucguguuccuccacgucacguacgugcccgcccaggagaagaacuucaccaccgcccccgccaucugccacgacggcaaggcgcacuucccccgcgaggggguguucgucagcaacggcacccacugguucgugacgcagcggaacuucuacgagccgcagaucaucaccaccgacaacaccuucguguccggcaacugcgacgucgugaucgggaucgugaacaacacggucuacgacccccugcagcccgagcuggacagcuucaaggaggagcucgacaaguacuucaagaaccacaccucccccgacguggaccugggcgacaucagcgggaucaacgccuccguggucaacauccagaaggagaucgaccgccugaacgagguggccaagaaccucaacgagagccugaucgaccugcaggagcucggcaaguacgagcaguacaucaaguggccgugguacaucuggcugggcuucaucgccgggcugaucgccaucgugauggucaccaucaugcucugcugcaugaccuccugcugcagcugccugaagggcugcugcuccugcgggagcugcugcaaguucgacgaggacgacuccgagcccgugcugaagggcgugaagcuccacuacacgugaggacuaguuauaagacugacuagcccgaugggccucccaacgggcccuccuccccuccuugcaccgagauuaauagaucuaaaaaaaaaaaaaaaaaaaaaaaaaaaaaaaaaaaaaaaaaaaaaaaaaaaaaaaaaaaaaaaaaaaaaaaaaaaaaaaaaaaaaaaaaaaaaaaaaaaa

SEQ ID NO: 25638 - RNA, 4011 nt, Artificial Sequence
  SARS-CoV-2/Wuhan/WIV05/2019__EPI_ISL_402128 spike protein mRNA gc (1-1273)(H69del_V70del_Y453F_D614G_I692V_M1229I)
aggagaaagcuuaccauguucguguuccugguccuccugccccuggugagcucccagugcgugaaccucaccacccgcacgcagcugccgcccgccuacaccaacagcuucacccggggcgucuacuaccccgacaagguguuccgcuccagcgugcugcacuccacccaggaccucuuccugcccuucuucagcaacgucacgugguuccacgccaucuccgggaccaacggcaccaagcgguucgacaacccggugcugcccuucaacgacgggguguacuucgcgagcaccgagaaguccaacaucauccgcggcuggaucuucgggacgacccucgacagcaagacccagucccugcugaucgucaacaacgccaccaacguggugaucaaggucugcgaguuccaguucugcaacgaccccuuccucggcguguacuaccacaagaacaacaagagcuggauggaguccgaguuccggguguacagcuccgccaacaacugcacguucgaguacgucagccagcccuuccugauggaccuggagggcaagcaggggaacuucaagaaccuccgcgaguucguguucaagaacaucgacggcuacuucaagaucuacuccaagcacaccccgaucaaccuggugcgggaccugccccagggguucagcgcccucgagccccuggucgaccugcccaucggcaucaacaucacccgcuuccagacccuccuggcccugcaccgguccuaccucacgccgggggacagcagcuccggcuggaccgcgggcgccgccgccuacuacgugggguaccugcagccccgcaccuuccugcucaaguacaacgagaacggcaccaucacggacgcgguggacugcgcccuggacccccugagcgagaccaagugcacccucaaguccuucaccgucgagaaggggaucuaccagacgagcaacuuccgggugcagcccaccgaguccaucgugcgcuucccgaacaucaccaaccugugccccuucggcgaggucuucaacgccacccgguucgccagcguguacgccuggaaccgcaagcggaucuccaacugcgucgcggacuacagcgugcuguacaacuccgccagcuucuccacguucaagugcuacggcgugagccccaccaagcucaacgaccugugcuucaccaacgucuacgccgacuccuucgugauccgcggggacgaggugcggcagaucgcccccggccagaccgggaagaucgccgacuacaacuacaagcugccggacgacuucacgggcugcgucaucgcguggaacagcaacaaccucgacuccaaggucgggggcaacuacaacuaccuguuccgccuguuccgcaagagcaaccucaagcccuucgagcgggacaucuccaccgagaucuaccaggccggcagcacccccugcaacgggguggagggcuucaacugcuacuucccccugcaguccuacggguuccagccgaccaacggcgugggguaccagcccuaccggguggugguccugagcuucgagcuccugcacgcccccgccacggugugcggccccaagaaguccaccaaccuggugaagaacaagugcgucaacuucaacuucaacggccucaccgggaccggcgugcugaccgagagcaacaagaaguuccugccguuccagcaguucgggcgcgacaucgccgacacgaccgacgcggugcgcgacccccagacccuggagauccucgacaucacccccugcagcuucggcggggucuccgugaucacgccgggcaccaacaccagcaaccagguggccguccuguaccagggcgugaacugcaccgaggugcccgucgccauccacgccgaccagcugacgcccaccuggcggguguacuccaccgggagcaacguguuccagacccgcgccggcugccucaucggggcggagcacgucaacaacuccuacgagugcgacauccccaucggcgccggcaucugcgccagcuaccagacgcagaccaacuccccgcggcgcgcccggagcguggcgucccagagcgugaucgccuacaccaugucccugggggccgagaacagcgucgccuacuccaacaacagcaucgccauccccaccaacuucacgaucuccgugaccaccgagauccugcccgugagcaugaccaagacgagcgucgacugcaccauguacaucugcggcgacuccaccgagugcagcaaccuccugcugcaguacggguccuucugcacccagcucaaccgcgcgcugacgggcaucgccguggagcaggacaagaacacccaggagguguucgcccaggucaagcagaucuacaagacgcccccgaucaaggacuucgggggcuucaacuucagccagauccugcccgaccccuccaagcccagcaagcgguccuucaucgaggaccuccuguucaacaaggugacccuggccgacgccggcuucaucaagcaguacggggacugccucggcgacaucgcggcccgcgaccugaucugcgcccagaaguucaacgggcugaccgugcucccgccccugcugaccgacgagaugaucgcccaguacaccagcgcccuccuggcgggcaccaucacguccggguggaccuucggcgccggcgccgcccugcagauccccuucgcgaugcagauggccuaccgguucaacgggaucggcgucacccagaacgugcucuacgagaaccagaagcugaucgccaaccaguucaacagcgccaucgggaagauccaggacucccugagcuccaccgccagcgcgcucggcaagcugcaggacguggucaaccagaacgcccaggcccugaacacgcucgugaagcagcuguccagcaacuucggggccaucuccagcgugcugaacgacauccucucccgccuggacaaggucgaggccgaggugcagaucgaccggcugaucaccggccgccuccagagccugcagaccuacgugacccagcagcugauccgggcggccgagauccgcgccagcgccaaccucgccgcgaccaagauguccgagugcguccugggccagagcaagcggguggacuucugcgggaagggcuaccaccugauguccuucccccagagcgccccgcacgggguggucuuccuccacgugacguacguccccgcccaggagaagaacuucaccaccgcccccgcgaucugccacgacggcaaggcccacuucccccgcgaggggguguucguguccaacggcacccacugguucgucacgcagcggaacuucuacgagccgcagaucaucaccaccgacaacaccuucgugagcggcaacugcgacguggucaucgggaucgugaacaacacgguguacgacccccugcagcccgagcuggacuccuucaaggaggagcucgacaaguacuucaagaaccacaccagccccgacgucgaccugggcgacaucuccgggaucaacgccagcguggugaacauccagaaggagaucgaccgccugaacgaggucgccaagaaccucaacgagucccugaucgaccugcaggagcucggcaaguacgagcaguacaucaaguggccgugguacaucuggcugggcuucaucgccgggcugaucgcgaucgugaucgugaccaucaugcucugcugcaugaccagcugcugcuccugccugaagggcugcugcagcugcggguccugcugcaaguucgacgaggacgacagcgagcccguccugaagggcgugaagcuccacuacacgugaggacuaguuauaagacugacuagcccgaugggccucccaacgggcccuccuccccuccuugcaccgagauuaauagaucuaaaaaaaaaaaaaaaaaaaaaaaaaaaaaaaaaaaaaaaaaaaaaaaaaaaaaaaaaaaaaaaaaaaaaaaaaaaaaaaaaaaaaaaaaaaaaaaaaaaa

SEQ ID NO: 25639 - RNA, 4008 nt, Artificial Sequence
  SARS-CoV-2/Wuhan/WIV05/2019__EPI_ISL_402128 spike protein mRNA gc (1-1273)(H69del_V70del_Y144del_N501Y_A570D_D614G_P681H_T716I_S982 A_D1118H)
aggagaaagcuuaccauguucguguuccugguccuccugccccuggugagcucccagugcgugaaccucaccacccgcacgcagcugccgcccgccuacaccaacagcuucacccggggcgucuacuaccccgacaagguguuccgcuccagcgugcugcacuccacccaggaccucuuccugcccuucuucagcaacgucacgugguuccacgccaucuccgggaccaacggcaccaagcgguucgacaacccggugcugcccuucaacgacgggguguacuucgcgagcaccgagaaguccaacaucauccgcggcuggaucuucgggacgacccucgacagcaagacccagucccugcugaucgucaacaacgccaccaacguggugaucaaggucugcgaguuccaguucugcaacgaccccuuccucggcguguaccacaagaacaacaagagcuggauggaguccgaguuccggguguacagcuccgccaacaacugcacguucgaguacgucagccagcccuuccugauggaccuggagggcaagcaggggaacuucaagaaccuccgcgaguucguguucaagaacaucgacggcuacuucaagaucuacuccaagcacaccccgaucaaccuggugcgggaccugccccagggguucagcgcccucgagccccuggucgaccugcccaucggcaucaacaucacccgcuuccagacccuccuggcccugcaccgguccuaccucacgccgggggacagcagcuccggcuggaccgcgggcgccgccgccuacuacgugggguaccugcagccccgcaccuuccugcucaaguacaacgagaacggcaccaucacggacgcgguggacugcgcccuggacccccugagcgagaccaagugcacccucaaguccuucaccgucgagaaggggaucuaccagacgagcaacuuccgggugcagcccaccgaguccaucgugcgcuucccgaacaucaccaaccugugccccuucggcgaggucuucaacgccacccgguucgccagcguguacgccuggaaccgcaagcggaucuccaacugcgucgcggacuacagcgugcuguacaacuccgccagcuucuccacguucaagugcuacggcgugagccccaccaagcucaacgaccugugcuucaccaacgucuacgccgacuccuucgugauccgcggggacgaggugcggcagaucgcccccggccagaccgggaagaucgccgacuacaacuacaagcugccggacgacuucacgggcugcgucaucgcguggaacagcaacaaccucgacuccaaggucgggggcaacuacaacuaccuguaccgccuguuccgcaagagcaaccucaagcccuucgagcgggacaucuccaccgagaucuaccaggccggcagcacccccugcaacgggguggagggcuucaacugcuacuucccccugcaguccuacggguuccagccgaccuacggcgugggguaccagcccuaccggguggugguccugagcuucgagcuccugcacgcccccgccacggugugcggccccaagaaguccaccaaccuggugaagaacaagugcgucaacuucaacuucaacggccucaccgggaccggcgugcugaccgagagcaacaagaaguuccugccguuccagcaguucgggcgcgacaucgacgacacgaccgacgccgugcgcgacccccagacccuggagauccucgacaucacccccugcagcuucggcggggucuccgugaucacgccgggcaccaacaccagcaaccagguggcgguccuguaccagggcgugaacugcaccgaggugcccgucgccauccacgccgaccagcugacgcccaccuggcggguguacuccaccgggagcaacguguuccagacccgcgccggcugccucaucggggccgagcacgucaacaacuccuacgagugcgacauccccaucggcgcgggcaucugcgccagcuaccagacgcagaccaacucccaccggcgcgcccggagcguggccucccagagcaucaucgcguacaccaugucccugggggccgagaacagcguggccuacuccaacaacagcaucgccaucccgaucaacuucaccaucuccgucacgaccgagauccugcccgugagcaugaccaagaccagcguggacugcacgauguacaucugcggcgacuccaccgagugcagcaaccuccugcugcaguacggguccuucugcacccagcucaaccgcgcccugaccggcaucgcggucgagcaggacaagaacacgcaggagguguucgcccaggugaagcagaucuacaagaccccgcccaucaaggacuucgggggcuucaacuucagccagauccugcccgaccccuccaagcccagcaagcgguccuucaucgaggaccuccuguucaacaaggucacccuggccgacgccggcuucaucaagcaguacggggacugccucggcgacaucgccgcgcgcgaccugaucugcgcccagaaguucaacgggcugaccgugcugcccccgcuccugacggacgagaugaucgcccaguacaccagcgcccuccuggccggcaccaucaccuccggguggacguucggcgcgggcgccgcccugcagauccccuucgccaugcagauggcguaccgguucaacgggaucggcgugacccagaacguccucuacgagaaccagaagcugaucgccaaccaguucaacagcgccaucgggaagauccaggacucccugagcuccaccgccagcgcccucggcaagcugcaggacguggugaaccagaacgcgcaggcccugaacacccucgucaagcagcuguccagcaacuucggggccaucuccagcgugcugaacgacauccucgcccgccuggacaagguggaggccgagguccagaucgaccggcugaucacgggccgccuccagucccugcagaccuacgugacccagcagcugauccgggcggccgagauccgcgccagcgccaaccucgccgcgaccaagaugagcgagugcgugcugggccaguccaagcgggucgacuucugcgggaagggcuaccaccugaugagcuucccccaguccgcgccccacggggugguguuccuccacgucaccuacgugccggcccaggagaagaacuucacgaccgcccccgccaucugccacgacggcaaggcccacuucccccgcgagggggucuucgugagcaacggcacccacugguucgugacccagcggaacuucuacgagccccagaucaucacgacccacaacaccuucgucuccggcaacugcgacguggugaucgggaucgucaacaacaccguguacgacccgcugcagcccgagcuggacagcuucaaggaggagcucgacaaguacuucaagaaccacacgucccccgacguggaccugggcgacaucagcgggaucaacgccuccgucgugaacauccagaaggagaucgaccgccugaacgagguggccaagaaccucaacgagagccugaucgaccugcaggagcucggcaaguacgagcaguacaucaaguggcccugguacaucuggcugggcuucaucgccgggcugaucgcgaucgucauggugaccaucaugcucugcugcaugaccuccugcugcagcugccugaagggcugcugcuccugcgggagcugcugcaaguucgacgaggacgacuccgagccggugcugaagggcgucaagcuccacuacaccugaggacuaguuauaagacugacuagcccgaugggccucccaacgggcccuccuccccuccuugcaccgagauuaauagaucuaaaaaaaaaaaaaaaaaaaaaaaaaaaaaaaaaaaaaaaaaaaaaaaaaaaaaaaaaaaaaaaaaaaaaaaaaaaaaaaaaaaaaaaaaaaaaaaaaaaa

SEQ ID NO: 25640 - RNA, 4017 nt, Artificial Sequence
  SARS-CoV-2/Wuhan/WIV05/2019__EPI_ISL_402128 spike protein mRNA gc (1-1273)(K417N_E484K_N501Y_D614G)
aggagaaagcuuaccauguucguguuccugguccuccugccccuggugagcucccagugcgugaaccucaccacccgcacgcagcugccgcccgccuacaccaacagcuucacccggggcgucuacuaccccgacaagguguuccgcuccagcgugcugcacuccacccaggaccucuuccugcccuucuucagcaacgucacgugguuccacgccauccacguguccgggaccaacggcaccaagcgguucgacaacccggugcugcccuucaacgacggggucuacuucgcgagcaccgagaaguccaacaucauccgcggcuggaucuucgggacgacccucgacagcaagacccagucccugcugaucgugaacaacgccaccaacguggucaucaaggugugcgaguuccaguucugcaacgaccccuuccucggcguguacuaccacaagaacaacaagagcuggauggaguccgaguuccgggucuacagcuccgccaacaacugcacguucgaguacgugagccagcccuuccugauggaccuggagggcaagcaggggaacuucaagaaccuccgcgaguucguguucaagaacaucgacggcuacuucaagaucuacuccaagcacaccccgaucaaccugguccgggaccugccccagggguucagcgcccucgagccccugguggaccugcccaucggcaucaacaucacccgcuuccagacccuccuggcccugcaccgguccuaccucacgccgggggacagcagcuccggcuggaccgcgggcgccgccgccuacuacgugggguaccugcagccccgcaccuuccugcucaaguacaacgagaacggcaccaucacggacgcggucgacugcgcccuggacccccugagcgagaccaagugcacccucaaguccuucaccguggagaaggggaucuaccagacgagcaacuuccgggugcagcccaccgaguccaucguccgcuucccgaacaucaccaaccugugccccuucggcgagguguucaacgccacccgguucgccagcgucuacgccuggaaccgcaagcggaucuccaacugcguggcggacuacagcgugcuguacaacuccgccagcuucuccacguucaagugcuacggcgucagccccaccaagcucaacgaccugugcuucaccaacguguacgccgacuccuucgugauccgcggggacgagguccggcagaucgcccccggccagaccgggaacaucgccgacuacaacuacaagcugccggacgacuucacgggcugcgugaucgcguggaacagcaacaaccucgacuccaaggucgggggcaacuacaacuaccuguaccgccuguuccgcaagagcaaccucaagcccuucgagcgggacaucuccaccgagaucuaccaggccggcagcacccccugcaacggggugaagggcuucaacugcuacuucccccugcaguccuacggguuccagccgaccuacggcgugggguaccagcccuaccggguggucgugcugagcuucgagcuccugcacgcccccgccacggugugcggccccaagaaguccaccaaccuggucaagaacaagugcgugaacuucaacuucaacggccucaccgggaccggcgugcugaccgagagcaacaagaaguuccugccguuccagcaguucgggcgcgacaucgccgacacgaccgacgcgguccgcgacccccagacccuggagauccucgacaucacccccugcagcuucggcgggguguccgugaucacgccgggcaccaacaccagcaaccaggucgccgugcuguaccagggcgugaacugcaccgagguccccguggccauccacgccgaccagcugacgcccaccuggcggguguacuccaccgggagcaacgucuuccagacccgcgccggcugccucaucggggcggagcacgugaacaacuccuacgagugcgacauccccaucggcgccggcaucugcgccagcuaccagacgcagaccaacuccccgcggcgcgcccggagcguggcgucccagagcaucaucgccuacaccaugucccugggggccgagaacagcgucgccuacuccaacaacagcaucgccauccccaccaacuucacgaucuccgugaccaccgagauccugcccgugagcaugaccaagacgagcgucgacugcaccauguacaucugcggcgacuccaccgagugcagcaaccuccugcugcaguacggguccuucugcacccagcucaaccgcgcgcugacgggcaucgccguggagcaggacaagaacacccaggagguguucgcccaggucaagcagaucuacaagacgcccccgaucaaggacuucgggggcuucaacuucagccagauccugcccgaccccuccaagcccagcaagcgguccuucaucgaggaccuccuguucaacaaggugacccuggccgacgccggcuucaucaagcaguacggggacugccucggcgacaucgcggcccgcgaccugaucugcgcccagaaguucaacgggcugaccgugcucccgccccugcugaccgacgagaugaucgcccaguacaccagcgcccuccuggcgggcaccaucacguccggguggaccuucggcgccggcgccgcccugcagauccccuucgcgaugcagauggccuaccgguucaacgggaucggcgucacccagaacgugcucuacgagaaccagaagcugaucgccaaccaguucaacagcgccaucgggaagauccaggacucccugagcuccaccgccagcgcgcucggcaagcugcaggacguggucaaccagaacgcccaggcccugaacacgcucgugaagcagcuguccagcaacuucggggccaucuccagcgugcugaacgacauccucucccgccuggacaaggucgaggccgaggugcagaucgaccggcugaucaccggccgccuccagagccugcagaccuacgugacccagcagcugauccgggcggccgagauccgcgccagcgccaaccucgccgcgaccaagauguccgagugcguccugggccagagcaagcggguggacuucugcgggaagggcuaccaccugauguccuucccccagagcgccccgcacgggguggucuuccuccacgugacguacguccccgcccaggagaagaacuucaccaccgcccccgcgaucugccacgacggcaaggcccacuucccccgcgaggggguguucguguccaacggcacccacugguucgucacgcagcggaacuucuacgagccgcagaucaucaccaccgacaacaccuucgugagcggcaacugcgacguggucaucgggaucgugaacaacacgguguacgacccccugcagcccgagcuggacuccuucaaggaggagcucgacaaguacuucaagaaccacaccagccccgacgucgaccugggcgacaucuccgggaucaacgccagcguggugaacauccagaaggagaucgaccgccugaacgaggucgccaagaaccucaacgagucccugaucgaccugcaggagcucggcaaguacgagcaguacaucaaguggccgugguacaucuggcugggcuucaucgccgggcugaucgcgaucgugauggugaccaucaugcucugcugcaugaccagcugcugcuccugccugaagggcugcugcagcugcggguccugcugcaaguucgacgaggacgacagcgagcccguccugaagggcgugaagcuccacuacacgugaggacuaguuauaagacugacuagcccgaugggccucccaacgggcccuccuccccuccuugcaccgagauuaauagaucuaaaaaaaaaaaaaaaaaaaaaaaaaaaaaaaaaaaaaaaaaaaaaaaaaaaaaaaaaaaaaaaaaaaaaaaaaaaaaaaaaaaaaaaaaaaaaaaaaaaa

SEQ ID NO: 25641 - RNA, 4008 nt, Artificial Sequence
  SARS-CoV-2/Wuhan/WIV05/2019__EPI_ISL_402128 spike protein mRNA gc (1-1273)(L18F_D80A_D215G_L242del_A243del_L244del_R246I_K417N_E484 K_N501Y_D614G_A701V)
aggagaaagcuuaccauguucguguuccugguccuccugccccuggugagcucccagugcgugaacuucaccacccgcacgcagcucccgcccgccuacaccaacagcuucacccggggcgucuacuaccccgacaagguguuccgcuccagcgugcugcacuccacccaggaccuguuccuccccuucuucagcaacgucacgugguuccacgccauccacguguccgggaccaacggcaccaagcgguucgcgaacccggugcugcccuucaacgacggggucuacuucgccagcaccgagaaguccaacaucauccgcggcuggaucuucgggacgacccuggacagcaagacccagucccuccugaucgugaacaacgccaccaacguggucaucaaggugugcgaguuccaguucugcaacgaccccuuccugggcguguacuaccacaagaacaacaagagcuggauggaguccgaguuccgggucuacagcuccgccaacaacugcacguucgaguacgugagccagcccuuccucauggaccuggagggcaagcaggggaacuucaagaaccugcgcgaguucguguucaagaacaucgacggcuacuucaagaucuacuccaagcacaccccgaucaaccucguccgggggcugccccagggcuucagcgcccuggagccccucguggaccugcccaucgggaucaacaucacccgcuuccagacccugcacaucuccuaccucacgccgggcgacagcagcuccggcuggaccgcgggggccgccgccuacuacgugggcuaccugcagccccggaccuuccugcucaaguacaacgagaacgggaccaucacggacgcggucgacugcgcccuggacccccugagcgagaccaagugcacccucaaguccuucaccguggagaagggcaucuaccagacgagcaacuuccgcgugcagcccaccgaguccaucguccgguucccgaacaucaccaaccugugccccuucggcgagguguucaacgccacccgcuucgccagcgucuacgccuggaaccggaagcgcaucuccaacugcguggcggacuacagcgugcuguacaacuccgccagcuucuccacguucaagugcuacggggucagccccaccaagcucaacgaccugugcuucaccaacguguacgccgacuccuucgugauccggggcgacgagguccgccagaucgcccccgggcagaccggcaacaucgccgacuacaacuacaagcugccggacgacuucacggggugcgugaucgcguggaacagcaacaaccucgacuccaaggugggcggcaacuacaacuaccuguaccggcuguuccgcaagagcaaccucaagcccuucgagcgggacaucuccaccgagaucuaccaggccgggagcacccccugcaacggcgucaagggguucaacugcuacuucccccugcaguccuacggcuuccagccgaccuacggggugggcuaccagcccuaccgcguggucgugcugagcuucgagcuccugcacgcccccgccacggugugcggccccaagaaguccaccaaccuggucaagaacaagugcgugaacuucaacuucaacgggcucaccggcaccggggugcugaccgagagcaacaagaaguuccugccguuccagcaguucggccgggacaucgccgacacgaccgacgcgguccgcgacccccagacccucgagauccuggacaucacccccugcagcuucgggggcguguccgugaucacgccgggcaccaacaccagcaaccaggucgccgugcuguaccagggggugaacugcaccgagguccccguggccauccacgccgaccagcugacgcccaccuggcgcguguacuccaccggcagcaacgucuuccagacccgggccgggugccucaucggcgcggagcacgugaacaacuccuacgagugcgacauccccaucggcgccgggaucugcgccagcuaccagacgcagaccaacuccccgcgccgggcccgcagcguggcgucccagagcaucaucgccuacaccaugucccugggcgucgagaacagcguggccuacuccaacaacagcaucgccauccccaccaacuucacgaucuccgugaccaccgagauccugcccgucagcaugaccaagacgagcguggacugcaccauguacaucugcggggacuccaccgagugcagcaaccuccugcugcaguacggcuccuucugcacccagcucaaccgggcccugacggggaucgcgguggagcaggacaagaacacccaggaggucuucgcccaggugaagcagaucuacaagacgcccccgaucaaggacuucggcggcuucaacuucagccagauccugcccgaccccuccaagcccagcaagcgcuccuucaucgaggaccuccuguucaacaaggugacccuggccgacgccggguucaucaagcaguacggcgacugccucggggacaucgccgcgcgggaccugaucugcgcccagaaguucaacggccugaccguccucccgccccugcugaccgacgagaugaucgcccaguacaccagcgcccuccuggccgggaccaucacguccggcuggaccuucggcgcgggggccgcccugcagauccccuucgccaugcagauggcguaccgcuucaacggcaucggggugacccagaacgugcucuacgagaaccagaagcugaucgccaaccaguucaacagcgccaucggcaagauccaggacucccugagcuccaccgccagcgcccucgggaagcugcaggacgucgugaaccagaacgcgcaggcccugaacacgcucgugaagcagcuguccagcaacuucggcgccaucuccagcguccugaacgacauccucucccggcuggacaagguggaggccgaggugcagaucgaccgccugaucaccggccggcuccagagccugcagaccuacgucacccagcagcugauccgcgccgcggagauccgggccagcgccaaccucgccgccaccaagauguccgagugcgugcuggggcagagcaagcgcguggacuucugcggcaagggguaccaccugauguccuucccccagagcgcgccgcacggcgucguguuccuccacgucacguacgugcccgcccaggagaagaacuucaccaccgcccccgccaucugccacgacgggaaggcgcacuucccccgggagggcguguucgucuccaacggcacccacugguucgugacgcagcgcaacuucuacgagccgcagaucaucaccaccgacaacaccuucgugagcgggaacugcgacgucgugaucggcaucgugaacaacacggucuacgacccccugcagcccgagcuggacuccuucaaggaggagcucgacaaguacuucaagaaccacaccagccccgacguggaccugggggacaucuccggcaucaacgccagcguggucaacauccagaaggagaucgaccggcugaacgagguggccaagaaccucaacgagucccugaucgaccugcaggagcucggcaaguacgagcaguacaucaaguggccgugguacaucuggcugggguucaucgccggccugaucgccaucgugauggucaccaucaugcucugcugcaugaccagcugcugcuccugccugaaggggugcugcagcugcggcuccugcugcaaguucgacgaggacgacagcgagcccgugcugaagggggugaagcuccacuacacgugaggacuaguuauaagacugacuagcccgaugggccucccaacgggcccuccuccccuccuugcaccgagauuaauagaucuaaaaaaaaaaaaaaaaaaaaaaaaaaaaaaaaaaaaaaaaaaaaaaaaaaaaaaaaaaaaaaaaaaaaaaaaaaaaaaaaaaaaaaaaaaaaaaaaaaaa

SEQ ID NO: 25642 - RNA, 4017 nt, Artificial Sequence
  SARS-CoV-2/Wuhan/WIV05/2019__EPI_ISL_402128 spike protein mRNA gc (1-1273)(E484K_D614G)
aggagaaagcuuaccauguucguguuccugguccuccugccccuggugagcucccagugcgugaaccucaccacccgcacgcagcugccgcccgccuacaccaacagcuucacccggggcgucuacuaccccgacaagguguuccgcuccagcgugcugcacuccacccaggaccucuuccugcccuucuucagcaacgucacgugguuccacgccauccacguguccgggaccaacggcaccaagcgguucgacaacccggugcugcccuucaacgacggggucuacuucgcgagcaccgagaaguccaacaucauccgcggcuggaucuucgggacgacccucgacagcaagacccagucccugcugaucgugaacaacgccaccaacguggucaucaaggugugcgaguuccaguucugcaacgaccccuuccucggcguguacuaccacaagaacaacaagagcuggauggaguccgaguuccgggucuacagcuccgccaacaacugcacguucgaguacgugagccagcccuuccugauggaccuggagggcaagcaggggaacuucaagaaccuccgcgaguucguguucaagaacaucgacggcuacuucaagaucuacuccaagcacaccccgaucaaccugguccgggaccugccccagggguucagcgcccucgagccccugguggaccugcccaucggcaucaacaucacccgcuuccagacccuccuggcccugcaccgguccuaccucacgccgggggacagcagcuccggcuggaccgcgggcgccgccgccuacuacgugggguaccugcagccccgcaccuuccugcucaaguacaacgagaacggcaccaucacggacgcggucgacugcgcccuggacccccugagcgagaccaagugcacccucaaguccuucaccguggagaaggggaucuaccagacgagcaacuuccgggugcagcccaccgaguccaucguccgcuucccgaacaucaccaaccugugccccuucggcgagguguucaacgccacccgguucgccagcgucuacgccuggaaccgcaagcggaucuccaacugcguggcggacuacagcgugcuguacaacuccgccagcuucuccacguucaagugcuacggcgucagccccaccaagcucaacgaccugugcuucaccaacguguacgccgacuccuucgugauccgcggggacgagguccggcagaucgcccccggccagaccgggaagaucgccgacuacaacuacaagcugccggacgacuucacgggcugcgugaucgcguggaacagcaacaaccucgacuccaaggucgggggcaacuacaacuaccuguaccgccuguuccgcaagagcaaccucaagcccuucgagcgggacaucuccaccgagaucuaccaggccggcagcacccccugcaacggggugaagggcuucaacugcuacuucccccugcaguccuacggguuccagccgaccaacggcgugggguaccagcccuaccggguggucgugcugagcuucgagcuccugcacgcccccgccacggugugcggccccaagaaguccaccaaccuggucaagaacaagugcgugaacuucaacuucaacggccucaccgggaccggcgugcugaccgagagcaacaagaaguuccugccguuccagcaguucgggcgcgacaucgccgacacgaccgacgcgguccgcgacccccagacccuggagauccucgacaucacccccugcagcuucggcgggguguccgugaucacgccgggcaccaacaccagcaaccaggucgccgugcuguaccagggcgugaacugcaccgagguccccguggccauccacgccgaccagcugacgcccaccuggcggguguacuccaccgggagcaacgucuuccagacccgcgccggcugccucaucggggcggagcacgugaacaacuccuacgagugcgacauccccaucggcgccggcaucugcgccagcuaccagacgcagaccaacuccccgcggcgcgcccggagcguggcgucccagagcaucaucgccuacaccaugucccugggggccgagaacagcgucgccuacuccaacaacagcaucgccauccccaccaacuucacgaucuccgugaccaccgagauccugcccgugagcaugaccaagacgagcgucgacugcaccauguacaucugcggcgacuccaccgagugcagcaaccuccugcugcaguacggguccuucugcacccagcucaaccgcgcgcugacgggcaucgccguggagcaggacaagaacacccaggagguguucgcccaggucaagcagaucuacaagacgcccccgaucaaggacuucgggggcuucaacuucagccagauccugcccgaccccuccaagcccagcaagcgguccuucaucgaggaccuccuguucaacaaggugacccuggccgacgccggcuucaucaagcaguacggggacugccucggcgacaucgcggcccgcgaccugaucugcgcccagaaguucaacgggcugaccgugcucccgccccugcugaccgacgagaugaucgcccaguacaccagcgcccuccuggcgggcaccaucacguccggguggaccuucggcgccggcgccgcccugcagauccccuucgcgaugcagauggccuaccgguucaacgggaucggcgucacccagaacgugcucuacgagaaccagaagcugaucgccaaccaguucaacagcgccaucgggaagauccaggacucccugagcuccaccgccagcgcgcucggcaagcugcaggacguggucaaccagaacgcccaggcccugaacacgcucgugaagcagcuguccagcaacuucggggccaucuccagcgugcugaacgacauccucucccgccuggacaaggucgaggccgaggugcagaucgaccggcugaucaccggccgccuccagagccugcagaccuacgugacccagcagcugauccgggcggccgagauccgcgccagcgccaaccucgccgcgaccaagauguccgagugcguccugggccagagcaagcggguggacuucugcgggaagggcuaccaccugauguccuucccccagagcgccccgcacgggguggucuuccuccacgugacguacguccccgcccaggagaagaacuucaccaccgcccccgcgaucugccacgacggcaaggcccacuucccccgcgaggggguguucguguccaacggcacccacugguucgucacgcagcggaacuucuacgagccgcagaucaucaccaccgacaacaccuucgugagcggcaacugcgacguggucaucgggaucgugaacaacacgguguacgacccccugcagcccgagcuggacuccuucaaggaggagcucgacaaguacuucaagaaccacaccagccccgacgucgaccugggcgacaucuccgggaucaacgccagcguggugaacauccagaaggagaucgaccgccugaacgaggucgccaagaaccucaacgagucccugaucgaccugcaggagcucggcaaguacgagcaguacaucaaguggccgugguacaucuggcugggcuucaucgccgggcugaucgcgaucgugauggugaccaucaugcucugcugcaugaccagcugcugcuccugccugaagggcugcugcagcugcggguccugcugcaaguucgacgaggacgacagcgagcccguccugaagggcgugaagcuccacuacacgugaggacuaguuauaagacugacuagcccgaugggccucccaacgggcccuccuccccuccuugcaccgagauuaauagaucuaaaaaaaaaaaaaaaaaaaaaaaaaaaaaaaaaaaaaaaaaaaaaaaaaaaaaaaaaaaaaaaaaaaaaaaaaaaaaaaaaaaaaaaaaaaaaaaaaaaa

SEQ ID NO: 25643 - RNA, 4017 nt, Artificial Sequence
  SARS-CoV-2/Wuhan/WIV05/2019__EPI_ISL_402128 spike protein mRNA gc (1-1273)(L18F_T20N_P26S_D138Y_R190S_K417T_E484K_N501Y_D614G_H655Y _T1027I)
aggagaaagcuuaccauguucguguuccugguccuccugccccuggugagcucccagugcgugaacuucaccaaccgcacccagcucccgagcgccuacacgaacuccuucacccggggcgucuacuaccccgacaagguguuccgcagcuccgugcugcacagcacccaggaccuguuccuccccuucuucuccaacgucaccugguuccacgccauccacgugagcgggacgaacggcaccaagcgguucgacaaccccgugcugccguucaacgacggggucuacuucgcguccaccgagaaguccaacaucauccgcggcuggaucuucgggaccacgcuggacuccaagacccagagccuccugaucgugaacaacgccaccaacguggucaucaaggugugcgaguuccaguucugcaacuaccccuuccugggcguguacuaccacaagaacaacaaguccuggauggagagcgaguuccgggucuacuccagcgccaacaacugcaccuucgaguacgugucccagcccuuccucauggaccuggagggcaagcaggggaacuucaagaaccugagcgaguucguguucaagaacaucgacggcuacuucaagaucuacuccaagcacacgcccaucaaccucguccgcgaccugccgcagggguucagcgcccuggagccccucguggaccugcccaucggcaucaacaucacccgguuccagacccugcucgcccugcaccgcagcuaccugacccccggggacuccagcuccggcuggacggcgggcgccgccgccuacuacgugggguaccuccagccgcggaccuuccugcugaaguacaacgagaacggcaccaucaccgacgcggucgacugcgcccucgacccccugagcgagacgaagugcacccugaaguccuucaccguggagaaggggaucuaccagaccagcaacuuccgcgugcagcccacggaguccaucguccgguuccccaacaucaccaaccucugcccguucggcgagguguucaacgccacccgcuucgccagcgucuacgccuggaaccggaagcgcaucuccaacugcguggcggacuacagcgugcuguacaacuccgccagcuucuccaccuucaagugcuacggcgucagccccacgaagcugaacgaccucugcuucaccaacguguacgccgacuccuucgugauccgcggggacgagguccggcagaucgcccccggccagaccgggaccaucgccgacuacaacuacaagcugcccgacgacuucacgggcugcgugaucgcguggaacagcaacaaccuggacuccaaggucgggggcaacuacaacuaccucuaccggcuguuccgcaagagcaaccugaagccguucgagcgggacaucuccaccgagaucuaccaggccggcagcacccccugcaacggggugaagggcuucaacugcuacuucccccuccagagcuacggguuccagcccaccuacggcgugggguaccagccguaccgcguggucgugcuguccuucgagcugcuccacgcccccgccacggugugcggccccaagaaguccaccaaccuggucaagaacaagugcgugaacuucaacuucaacggccugaccgggaccggcgugcucaccgagagcaacaagaaguuccugcccuuccagcaguucgggcgggacaucgccgacacgaccgacgcgguccgcgacccgcagacccuggagauccuggacaucacccccugcagcuucggcgggguguccgugaucacgcccggcaccaacaccagcaaccaggucgccgugcucuaccagggcgugaacugcaccgaggucccgguggccauccacgccgaccagcugacgcccaccuggcgcguguacuccaccgggagcaacgucuuccagacccgggccggcugccugaucggggcggaguacgugaacaacuccuacgagugcgacauccccaucggcgccggcaucugcgccagcuaccagacgcagaccaacagcccccgccgggcccgcagcguggcgucccagagcaucaucgccuacaccaugucccucggggccgagaacagcgucgccuacuccaacaacagcaucgccaucccgaccaacuucacgaucagcgugaccaccgagauccugcccguguccaugaccaagacgagcgucgacugcaccauguacaucugcggcgacuccaccgagugcagcaaccugcuccugcaguacggguccuucugcacccagcugaaccgggcgcucacgggcaucgccguggagcaggacaagaacacccaggagguguucgcccaggucaagcagaucuacaagaccccgcccaucaaggacuucgggggcuucaacuucagccagauccugcccgaccccuccaagcccagcaagcgcuccuucaucgaggaccuccuguucaacaaggugacccuggccgacgccggcuucaucaagcaguacggggacugccugggcgacaucgcggcccgggaccucaucugcgcccagaaguucaacgggcugacggugcugcccccgcuccugaccgacgagaugaucgcccaguacaccagcgcccugcucgcgggcaccaucacguccggguggaccuucggcgccggcgccgcccugcagauccccuucgcgaugcagauggccuaccgcuucaacgggaucggcgucacccagaacgugcuguacgagaaccagaagcucaucgccaaccaguucaacagcgccaucgggaagauccaggacucccugagcuccaccgccagcgcgcugggcaagcuccaggacguggucaaccagaacgcccaggcccugaacacgcuggugaagcagcucuccagcaacuucggggccaucuccagcgugcugaacgacauccugagccggcucgacaaggucgaggccgaggugcagaucgaccgccugaucaccggccggcugcagucccuccagaccuacgugacccagcagcugauccgcgcggccgagauccgggccagcgccaaccuggccgcgaucaagauguccgagugcguccucggccagagcaagcgcguggacuucugcgggaagggcuaccaccugauguccuucccccagagcgcgccccacgggguggucuuccugcacgugaccuacgucccggcccaggagaagaacuucacgaccgcccccgccaucugccacgacggcaaggcccacuucccccgggaggggguguucguguccaacggcacccacugguucgucacccagcgcaacuucuacgagccccagaucaucacgaccgacaacaccuucgugagcggcaacugcgacguggucaucgggaucgugaacaacaccguguacgacccgcuccagcccgagcuggacuccuucaaggaggagcuggacaaguacuucaagaaccacacgagccccgacgucgaccucggcgacaucuccgggaucaacgccagcguggugaacauccagaaggagaucgaccggcugaacgaggucgccaagaaccugaacgagucccucaucgaccugcaggagcugggcaaguacgagcaguacaucaaguggcccugguacaucuggcucggcuucaucgccgggcugaucgcgaucgugauggugaccaucaugcugugcugcaugaccagcugcugcuccugccucaagggcugcugcagcugcggguccugcugcaaguucgacgaggacgacagcgagccgguccugaagggcgugaagcugcacuacaccugaggacuaguuauaagacugacuagcccgaugggccucccaacgggcccuccuccccuccuugcaccgagauuaauagaucuaaaaaaaaaaaaaaaaaaaaaaaaaaaaaaaaaaaaaaaaaaaaaaaaaaaaaaaaaaaaaaaaaaaaaaaaaaaaaaaaaaaaaaaaaaaaaaaaaaaa

SEQ ID NO: 25644 - RNA, 4017 nt, Artificial Sequence
  SARS-CoV-2/Wuhan/WIV05/2019__EPI_ISL_402128 spike protein mRNA gc (1-1273)(S13I_W152C_L452R_D614G)
aggagaaagcuuaccauguucguguuccugguccuccugccccuggugagcauccagugcgugaaccucaccacccgcacgcagcugccgcccgccuacaccaacuccuucacccggggcgucuacuaccccgacaagguguuccgcagcuccgugcugcacagcacccaggaccucuuccugcccuucuucuccaacgucacgugguuccacgccauccacgugagcgggaccaacggcaccaagcgguucgacaacccggugcugcccuucaacgacggggucuacuucgcguccaccgagaaguccaacaucauccgcggcuggaucuucgggacgacccucgacagcaagacccagagccugcugaucgugaacaacgccaccaacguggucaucaaggugugcgaguuccaguucugcaacgaccccuuccucggcguguacuaccacaagaacaacaaguccugcauggagagcgaguuccgggucuacuccagcgccaacaacugcacguucgaguacgugucccagcccuuccugauggaccuggagggcaagcaggggaacuucaagaaccuccgcgaguucguguucaagaacaucgacggcuacuucaagaucuacagcaagcacaccccgaucaaccugguccgggaccugccccagggguucuccgcccucgagccccugguggaccugcccaucggcaucaacaucacccgcuuccagacccuccuggcccugcaccggagcuaccucacgccgggggacuccagcagcggcuggaccgcgggcgccgccgccuacuacgugggguaccugcagccccgcaccuuccugcucaaguacaacgagaacggcaccaucacggacgcggucgacugcgcccuggacccccuguccgagaccaagugcacccucaagagcuucaccguggagaaggggaucuaccagacguccaacuuccgggugcagcccaccgagagcaucguccgcuucccgaacaucaccaaccugugccccuucggcgagguguucaacgccacccgguucgccuccgucuacgccuggaaccgcaagcggaucagcaacugcguggcggacuacuccgugcuguacaacagcgccuccuucagcacguucaagugcuacggcgucucccccaccaagcucaacgaccugugcuucaccaacguguacgccgacagcuucgugauccgcggggacgagguccggcagaucgcccccggccagaccgggaagaucgccgacuacaacuacaagcugccggacgacuucacgggcugcgugaucgcguggaacuccaacaaccucgacagcaaggucgggggcaacuacaacuaccgcuaccggcuguuccgcaaguccaaccugaagcccuucgagcgggacaucagcaccgagaucuaccaggccggcuccacccccugcaacgggguggagggcuucaacugcuacuucccccuccagagcuacggguuccagccgaccaacggcgugggguaccagcccuaccgcguggucgugcuguccuucgagcugcuccacgcccccgccacggugugcggccccaagaaguccaccaaccuggucaagaacaagugcgugaacuucaacuucaacggccugaccgggaccggcgugcucaccgagagcaacaagaaguuccugccguuccagcaguucgggcgcgacaucgccgacacgaccgacgcgguccgggacccccagacccuggagauccuggacaucacccccugcagcuucggcggggugagcgugaucacgccgggcaccaacaccuccaaccaggucgccgugcucuaccagggcgugaacugcaccgagguccccguggccauccacgccgaccagcugacgcccaccuggcgcguguacagcaccggguccaacgucuuccagacccgggccggcugccugaucggggcggagcacgugaacaacagcuacgagugcgacauccccaucggcgccggcaucugcgccuccuaccagacgcagaccaacagcccgcgccgggcccgcuccguggcgagccaguccaucaucgccuacaccaugagccucggggccgagaacuccgucgccuacagcaacaacuccaucgccauccccaccaacuucacgaucagcgugaccaccgagauccugcccguguccaugaccaagacgagcgucgacugcaccauguacaucugcggcgacagcaccgagugcuccaaccugcuccugcaguacgggagcuucugcacccagcugaaccgggcgcucacgggcaucgccguggagcaggacaagaacacccaggagguguucgcccaggucaagcagaucuacaagacgcccccgaucaaggacuucgggggcuucaacuucucccagauccugcccgaccccagcaagcccuccaagcgcagcuucaucgaggaccuccuguucaacaaggugacccuggccgacgccggcuucaucaagcaguacggggacugccugggcgacaucgcggcccgggaccucaucugcgcccagaaguucaacgggcugaccgugcugccgccccuccugaccgacgagaugaucgcccaguacaccuccgcccugcucgcgggcaccaucacgagcggguggaccuucggcgccggcgccgcccugcagauccccuucgcgaugcagauggccuaccgcuucaacgggaucggcgucacccagaacgugcuguacgagaaccagaagcucaucgccaaccaguucaacuccgccaucgggaagauccaggacagccuguccagcaccgccuccgcgcugggcaagcuccaggacguggucaaccagaacgcccaggcccugaacacgcuggugaagcagcucagcuccaacuucggggccaucagcuccgugcugaacgacauccugagccggcucgacaaggucgaggccgaggugcagaucgaccgccugaucaccggccggcugcagucccuccagaccuacgugacccagcagcugauccgcgcggccgagauccgggccagcgccaaccuggccgcgaccaagaugagcgagugcguccucggccaguccaagcgcguggacuucugcgggaagggcuaccaccugaugagcuucccccaguccgccccgcacgggguggucuuccugcacgugacguacguccccgcccaggagaagaacuucaccaccgcccccgcgaucugccacgacggcaaggcccacuucccccgggaggggguguucgugagcaacggcacccacugguucgucacgcagcgcaacuucuacgagccgcagaucaucaccaccgacaacaccuucguguccggcaacugcgacguggucaucgggaucgugaacaacacgguguacgacccccuccagcccgagcuggacagcuucaaggaggagcuggacaaguacuucaagaaccacaccucccccgacgucgaccucggcgacaucagcgggaucaacgccuccguggugaacauccagaaggagaucgaccggcugaacgaggucgccaagaaccugaacgagagccucaucgaccugcaggagcugggcaaguacgagcaguacaucaaguggccgugguacaucuggcucggcuucaucgccgggcugaucgcgaucgugauggugaccaucaugcugugcugcaugaccuccugcugcagcugccucaagggcugcugcuccugcgggagcugcugcaaguucgacgaggacgacuccgagcccguccugaagggcgugaagcugcacuacacgugaggacuaguuauaagacugacuagcccgaugggccucccaacgggcccuccuccccuccuugcaccgagauuaauagaucuaaaaaaaaaaaaaaaaaaaaaaaaaaaaaaaaaaaaaaaaaaaaaaaaaaaaaaaaaaaaaaaaaaaaaaaaaaaaaaaaaaaaaaaaaaaaaaaaaaaa

SEQ ID NO: 25645 - RNA, 4017 nt, Artificial Sequence
  SARS-CoV-2/Wuhan/WIV05/2019__EPI_ISL_402128 spike protein mRNA gc (1-1273)
aggagaaagcuuaccauguucguguuccuggugcugcugccccuggugagcagccagugcgugaaccugaccacccggacccagcugccaccagccuacaccaacagcuucacccggggcgucuacuaccccgacaagguguuccggagcagcguccugcacagcacccaggaccuguuccugcccuucuucagcaacgugaccugguuccacgccauccacgugagcggcaccaacggcaccaagcgguucgacaaccccgugcugcccuucaacgacggcguguacuucgccagcaccgagaagagcaacaucauccggggcuggaucuucggcaccacccuggacagcaagacccagagccugcugaucgugaauaacgccaccaacguggugaucaaggugugcgaguuccaguucugcaacgaccccuuccugggcguguacuaccacaagaacaacaagagcuggauggagagcgaguuccggguguacagcagcgccaacaacugcaccuucgaguacgugagccagcccuuccugauggaccuggagggcaagcagggcaacuucaagaaccugcgggaguucguguucaagaacaucgacggcuacuucaagaucuacagcaagcacaccccaaucaaccuggugcgggaucugccccagggcuucucagcccuggagccccugguggaccugcccaucggcaucaacaucacccgguuccagacccugcuggcccugcaccggagcuaccugaccccaggcgacagcagcagcggguggacagcaggcgcggcugcuuacuacgugggcuaccugcagccccggaccuuccugcugaaguacaacgagaacggcaccaucaccgacgccguggacugcgcccuggacccucugagcgagaccaagugcacccugaagagcuucaccguggagaagggcaucuaccagaccagcaacuuccgggugcagcccaccgagagcaucgugcgguuccccaacaucaccaaccugugccccuucggcgagguguucaacgccacccgguucgccagcguguacgccuggaaccggaagcggaucagcaacugcguggccgacuacagcgugcuguacaacagcgccagcuucagcaccuucaagugcuacggcgugagccccaccaagcugaacgaccugugcuucaccaacguguacgccgacagcuucgugauccguggcgacgaggugcggcagaucgcacccggccagacaggcaagaucgccgacuacaacuacaagcugcccgacgacuucaccggcugcgugaucgccuggaacagcaacaaccucgacagcaaggugggcggcaacuacaacuaccuguaccggcuguuccggaagagcaaccugaagcccuucgagcgggacaucagcaccgagaucuaccaagccggcuccaccccuugcaacggcguggagggcuucaacugcuacuucccucugcagagcuacggcuuccagcccaccaacggcgugggcuaccagcccuaccgggugguggugcugagcuucgagcugcugcacgccccagccaccguguguggccccaagaagagcaccaaccuggugaagaacaagugcgugaacuucaacuucaacggccuuaccggcaccggcgugcugaccgagagcaacaagaaauuccugcccuuucagcaguucggccgggacaucgccgacaccaccgacgcugugcgggauccccagacccuggagauccuggacaucaccccuugcagcuucggcggcgugagcgugaucaccccaggcaccaacaccagcaaccagguggccgugcuguaccaggacgugaacugcaccgaggugcccguggccauccacgccgaccagcugacacccaccuggcgggucuacagcaccggcagcaacguguuccagacccgggccgguugccugaucggcgccgagcacgugaacaacagcuacgagugcgacauccccaucggcgccggcaucugugccagcuaccagacccagaccaauucaccccggagggcaaggagcguggccagccagagcaucaucgccuacaccaugagccugggcgccgagaacagcguggccuacagcaacaacagcaucgccauccccaccaacuucaccaucagcgugaccaccgagauucugcccgugagcaugaccaagaccagcguggacugcaccauguacaucugcggcgacagcaccgagugcagcaaccugcugcugcaguacggcagcuucugcacccagcugaaccgggcccugaccggcaucgccguggagcaggacaagaacacccaggagguguucgcccaggugaagcagaucuacaagaccccucccaucaaggacuucggcggcuucaacuucagccagauccugcccgaccccagcaagcccagcaagcggagcuucaucgaggaccugcuguucaacaaggugacccuagccgacgccggcuucaucaagcaguacggcgacugccucggcgacauagccgcccgggaccugaucugcgcccagaaguucaacggccugaccgugcugccuccccugcugaccgacgagaugaucgcccaguacaccagcgcccuguuagccggaaccaucaccagcggcuggacuuucggcgcuggagccgcucugcagauccccuucgccaugcagauggccuaccgguucaacggcaucggcgugacccagaacgugcuguacgagaaccagaagcugaucgccaaccaguucaacagcgccaucggcaagauccaggacagccugagcagcaccgcuagcgcccugggcaagcugcaggacguggugaaccagaacgcccaggcccugaacacccuggugaagcagcugagcagcaacuucggcgccaucagcagcgugcugaacgacauccugagccggcuggacaaggucgaggccgaggugcagaucgaccggcugaucacuggccggcugcagagccugcagaccuacgugacccagcagcugauccgggccgccgagauucgggccagcgccaaccuggccgccaccaagaugagcgagugcgugcugggccagagcaagcggguggacuucugcggcaagggcuaccaccugaugagcuuuccccagagcgcaccccacggagugguguuccugcacgugaccuacgugcccgcccaggagaagaacuucaccaccgccccagccaucugccacgacggcaaggcccacuuuccccgggagggcguguucgugagcaacggcacccacugguucgugacccagcggaacuucuacgagccccagaucaucaccaccgacaacaccuucgugagcggcaacugcgacguggugaucggcaucgugaacaacaccguguacgauccccugcagcccgagcuggacagcuucaaggaggagcuggacaaguacuucaagaaucacaccagccccgacguggaccugggcgacaucagcggcaucaacgccagcguggugaacauccagaaggagaucgaucggcugaacgagguggccaagaaccugaacgagagccugaucgaccugcaggagcugggcaaguacgagcaguacaucaaguggcccugguacaucuggcugggcuucaucgccggccugaucgccaucgugauggugaccaucaugcugugcugcaugaccagcugcugcagcugccugaagggcuguugcagcugcggcagcugcugcaaguucgacgaggacgacagcgagcccgugcugaagggcgugaagcugcacuacaccugaggacuaguuauaagacugacuagcccgaugggccucccaacgggcccuccuccccuccuugcaccgagauuaauagaucuaaaaaaaaaaaaaaaaaaaaaaaaaaaaaaaaaaaaaaaaaaaaaaaaaaaaaaaaaaaaaaaaaaaaaaaaaaaaaaaaaaaaaaaaaaaaaaaaaaaa

SEQ ID NO: 25646 - RNA, 4017 nt, Artificial Sequence
  SARS-CoV-2/Wuhan/WIV05/2019__EPI_ISL_402128 spike protein mRNA gc (1-1273)(D614G)
aggagaaagcuuaccauguucguguuccuggugcugcugccccuggugagcagccagugcgugaaccugaccacccggacccagcugccaccagccuacaccaacagcuucacccggggcgucuacuaccccgacaagguguuccggagcagcguccugcacagcacccaggaccuguuccugcccuucuucagcaacgugaccugguuccacgccauccacgugagcggcaccaacggcaccaagcgguucgacaaccccgugcugcccuucaacgacggcguguacuucgccagcaccgagaagagcaacaucauccggggcuggaucuucggcaccacccuggacagcaagacccagagccugcugaucgugaauaacgccaccaacguggugaucaaggugugcgaguuccaguucugcaacgaccccuuccugggcguguacuaccacaagaacaacaagagcuggauggagagcgaguuccggguguacagcagcgccaacaacugcaccuucgaguacgugagccagcccuuccugauggaccuggagggcaagcagggcaacuucaagaaccugcgggaguucguguucaagaacaucgacggcuacuucaagaucuacagcaagcacaccccaaucaaccuggugcgggaucugccccagggcuucucagcccuggagccccugguggaccugcccaucggcaucaacaucacccgguuccagacccugcuggcccugcaccggagcuaccugaccccaggcgacagcagcagcggguggacagcaggcgcggcugcuuacuacgugggcuaccugcagccccggaccuuccugcugaaguacaacgagaacggcaccaucaccgacgccguggacugcgcccuggacccucugagcgagaccaagugcacccugaagagcuucaccguggagaagggcaucuaccagaccagcaacuuccgggugcagcccaccgagagcaucgugcgguuccccaacaucaccaaccugugccccuucggcgagguguucaacgccacccgguucgccagcguguacgccuggaaccggaagcggaucagcaacugcguggccgacuacagcgugcuguacaacagcgccagcuucagcaccuucaagugcuacggcgugagccccaccaagcugaacgaccugugcuucaccaacguguacgccgacagcuucgugauccguggcgacgaggugcggcagaucgcacccggccagacaggcaagaucgccgacuacaacuacaagcugcccgacgacuucaccggcugcgugaucgccuggaacagcaacaaccucgacagcaaggugggcggcaacuacaacuaccuguaccggcuguuccggaagagcaaccugaagcccuucgagcgggacaucagcaccgagaucuaccaagccggcuccaccccuugcaacggcguggagggcuucaacugcuacuucccucugcagagcuacggcuuccagcccaccaacggcgugggcuaccagcccuaccgggugguggugcugagcuucgagcugcugcacgccccagccaccguguguggccccaagaagagcaccaaccuggugaagaacaagugcgugaacuucaacuucaacggccuuaccggcaccggcgugcugaccgagagcaacaagaaauuccugcccuuucagcaguucggccgggacaucgccgacaccaccgacgcugugcgggauccccagacccuggagauccuggacaucaccccuugcagcuucggcggcgugagcgugaucaccccaggcaccaacaccagcaaccagguggccgugcuguaccagggcgugaacugcaccgaggugcccguggccauccacgccgaccagcugacacccaccuggcgggucuacagcaccggcagcaacguguuccagacccgggccgguugccugaucggcgccgagcacgugaacaacagcuacgagugcgacauccccaucggcgccggcaucugugccagcuaccagacccagaccaauucaccccggagggcaaggagcguggccagccagagcaucaucgccuacaccaugagccugggcgccgagaacagcguggccuacagcaacaacagcaucgccauccccaccaacuucaccaucagcgugaccaccgagauucugcccgugagcaugaccaagaccagcguggacugcaccauguacaucugcggcgacagcaccgagugcagcaaccugcugcugcaguacggcagcuucugcacccagcugaaccgggcccugaccggcaucgccguggagcaggacaagaacacccaggagguguucgcccaggugaagcagaucuacaagaccccucccaucaaggacuucggcggcuucaacuucagccagauccugcccgaccccagcaagcccagcaagcggagcuucaucgaggaccugcuguucaacaaggugacccuagccgacgccggcuucaucaagcaguacggcgacugccucggcgacauagccgcccgggaccugaucugcgcccagaaguucaacggccugaccgugcugccuccccugcugaccgacgagaugaucgcccaguacaccagcgcccuguuagccggaaccaucaccagcggcuggacuuucggcgcuggagccgcucugcagauccccuucgccaugcagauggccuaccgguucaacggcaucggcgugacccagaacgugcuguacgagaaccagaagcugaucgccaaccaguucaacagcgccaucggcaagauccaggacagccugagcagcaccgcuagcgcccugggcaagcugcaggacguggugaaccagaacgcccaggcccugaacacccuggugaagcagcugagcagcaacuucggcgccaucagcagcgugcugaacgacauccugagccggcuggacaaggucgaggccgaggugcagaucgaccggcugaucacuggccggcugcagagccugcagaccuacgugacccagcagcugauccgggccgccgagauucgggccagcgccaaccuggccgccaccaagaugagcgagugcgugcugggccagagcaagcggguggacuucugcggcaagggcuaccaccugaugagcuuuccccagagcgcaccccacggagugguguuccugcacgugaccuacgugcccgcccaggagaagaacuucaccaccgccccagccaucugccacgacggcaaggcccacuuuccccgggagggcguguucgugagcaacggcacccacugguucgugacccagcggaacuucuacgagccccagaucaucaccaccgacaacaccuucgugagcggcaacugcgacguggugaucggcaucgugaacaacaccguguacgauccccugcagcccgagcuggacagcuucaaggaggagcuggacaaguacuucaagaaucacaccagccccgacguggaccugggcgacaucagcggcaucaacgccagcguggugaacauccagaaggagaucgaucggcugaacgagguggccaagaaccugaacgagagccugaucgaccugcaggagcugggcaaguacgagcaguacaucaaguggcccugguacaucuggcugggcuucaucgccggccugaucgccaucgugauggugaccaucaugcugugcugcaugaccagcugcugcagcugccugaagggcuguugcagcugcggcagcugcugcaaguucgacgaggacgacagcgagcccgugcugaagggcgugaagcugcacuacaccugaggacuaguuauaagacugacuagcccgaugggccucccaacgggcccuccuccccuccuugcaccgagauuaauagaucuaaaaaaaaaaaaaaaaaaaaaaaaaaaaaaaaaaaaaaaaaaaaaaaaaaaaaaaaaaaaaaaaaaaaaaaaaaaaaaaaaaaaaaaaaaaaaaaaaaaa

SEQ ID NO: 25647 - RNA, 4017 nt, Artificial Sequence
  SARS-CoV-2/Wuhan/WIV05/2019__EPI_ISL_402128 spike protein mRNA gc (1-1273)(A222V_D614G)
aggagaaagcuuaccauguucguguuccuggugcugcugccccuggugagcagccagugcgugaaccugaccacccggacccagcugccaccagccuacaccaacagcuucacccggggcgucuacuaccccgacaagguguuccggagcagcguccugcacagcacccaggaccuguuccugcccuucuucagcaacgugaccugguuccacgccauccacgugagcggcaccaacggcaccaagcgguucgacaaccccgugcugcccuucaacgacggcguguacuucgccagcaccgagaagagcaacaucauccggggcuggaucuucggcaccacccuggacagcaagacccagagccugcugaucgugaauaacgccaccaacguggugaucaaggugugcgaguuccaguucugcaacgaccccuuccugggcguguacuaccacaagaacaacaagagcuggauggagagcgaguuccggguguacagcagcgccaacaacugcaccuucgaguacgugagccagcccuuccugauggaccuggagggcaagcagggcaacuucaagaaccugcgggaguucguguucaagaacaucgacggcuacuucaagaucuacagcaagcacaccccaaucaaccuggugcgggaucugccccagggcuucucagugcuggagccccugguggaccugcccaucggcaucaacaucacccgguuccagacccugcuggcccugcaccggagcuaccugaccccaggcgacagcagcagcggguggacagcaggcgcggcugcuuacuacgugggcuaccugcagccccggaccuuccugcugaaguacaacgagaacggcaccaucaccgacgccguggacugcgcccuggacccucugagcgagaccaagugcacccugaagagcuucaccguggagaagggcaucuaccagaccagcaacuuccgggugcagcccaccgagagcaucgugcgguuccccaacaucaccaaccugugccccuucggcgagguguucaacgccacccgguucgccagcguguacgccuggaaccggaagcggaucagcaacugcguggccgacuacagcgugcuguacaacagcgccagcuucagcaccuucaagugcuacggcgugagccccaccaagcugaacgaccugugcuucaccaacguguacgccgacagcuucgugauccguggcgacgaggugcggcagaucgcacccggccagacaggcaagaucgccgacuacaacuacaagcugcccgacgacuucaccggcugcgugaucgccuggaacagcaacaaccucgacagcaaggugggcggcaacuacaacuaccuguaccggcuguuccggaagagcaaccugaagcccuucgagcgggacaucagcaccgagaucuaccaagccggcuccaccccuugcaacggcguggagggcuucaacugcuacuucccucugcagagcuacggcuuccagcccaccaacggcgugggcuaccagcccuaccgggugguggugcugagcuucgagcugcugcacgccccagccaccguguguggccccaagaagagcaccaaccuggugaagaacaagugcgugaacuucaacuucaacggccuuaccggcaccggcgugcugaccgagagcaacaagaaauuccugcccuuucagcaguucggccgggacaucgccgacaccaccgacgcugugcgggauccccagacccuggagauccuggacaucaccccuugcagcuucggcggcgugagcgugaucaccccaggcaccaacaccagcaaccagguggccgugcuguaccagggcgugaacugcaccgaggugcccguggccauccacgccgaccagcugacacccaccuggcgggucuacagcaccggcagcaacguguuccagacccgggccgguugccugaucggcgccgagcacgugaacaacagcuacgagugcgacauccccaucggcgccggcaucugugccagcuaccagacccagaccaauucaccccggagggcaaggagcguggccagccagagcaucaucgccuacaccaugagccugggcgccgagaacagcguggccuacagcaacaacagcaucgccauccccaccaacuucaccaucagcgugaccaccgagauucugcccgugagcaugaccaagaccagcguggacugcaccauguacaucugcggcgacagcaccgagugcagcaaccugcugcugcaguacggcagcuucugcacccagcugaaccgggcccugaccggcaucgccguggagcaggacaagaacacccaggagguguucgcccaggugaagcagaucuacaagaccccucccaucaaggacuucggcggcuucaacuucagccagauccugcccgaccccagcaagcccagcaagcggagcuucaucgaggaccugcuguucaacaaggugacccuagccgacgccggcuucaucaagcaguacggcgacugccucggcgacauagccgcccgggaccugaucugcgcccagaaguucaacggccugaccgugcugccuccccugcugaccgacgagaugaucgcccaguacaccagcgcccuguuagccggaaccaucaccagcggcuggacuuucggcgcuggagccgcucugcagauccccuucgccaugcagauggccuaccgguucaacggcaucggcgugacccagaacgugcuguacgagaaccagaagcugaucgccaaccaguucaacagcgccaucggcaagauccaggacagccugagcagcaccgcuagcgcccugggcaagcugcaggacguggugaaccagaacgcccaggcccugaacacccuggugaagcagcugagcagcaacuucggcgccaucagcagcgugcugaacgacauccugagccggcuggacaaggucgaggccgaggugcagaucgaccggcugaucacuggccggcugcagagccugcagaccuacgugacccagcagcugauccgggccgccgagauucgggccagcgccaaccuggccgccaccaagaugagcgagugcgugcugggccagagcaagcggguggacuucugcggcaagggcuaccaccugaugagcuuuccccagagcgcaccccacggagugguguuccugcacgugaccuacgugcccgcccaggagaagaacuucaccaccgccccagccaucugccacgacggcaaggcccacuuuccccgggagggcguguucgugagcaacggcacccacugguucgugacccagcggaacuucuacgagccccagaucaucaccaccgacaacaccuucgugagcggcaacugcgacguggugaucggcaucgugaacaacaccguguacgauccccugcagcccgagcuggacagcuucaaggaggagcuggacaaguacuucaagaaucacaccagccccgacguggaccugggcgacaucagcggcaucaacgccagcguggugaacauccagaaggagaucgaucggcugaacgagguggccaagaaccugaacgagagccugaucgaccugcaggagcugggcaaguacgagcaguacaucaaguggcccugguacaucuggcugggcuucaucgccggccugaucgccaucgugauggugaccaucaugcugugcugcaugaccagcugcugcagcugccugaagggcuguugcagcugcggcagcugcugcaaguucgacgaggacgacagcgagcccgugcugaagggcgugaagcugcacuacaccugaggacuaguuauaagacugacuagcccgaugggccucccaacgggcccuccuccccuccuugcaccgagauuaauagaucuaaaaaaaaaaaaaaaaaaaaaaaaaaaaaaaaaaaaaaaaaaaaaaaaaaaaaaaaaaaaaaaaaaaaaaaaaaaaaaaaaaaaaaaaaaaaaaaaaaaa

SEQ ID NO: 25648 - RNA, 4017 nt, Artificial Sequence
  SARS-CoV-2/Wuhan/WIV05/2019__EPI_ISL_402128 spike protein mRNA gc (1-1273)(N439K_D614G)
aggagaaagcuuaccauguucguguuccuggugcugcugccccuggugagcagccagugcgugaaccugaccacccggacccagcugccaccagccuacaccaacagcuucacccggggcgucuacuaccccgacaagguguuccggagcagcguccugcacagcacccaggaccuguuccugcccuucuucagcaacgugaccugguuccacgccauccacgugagcggcaccaacggcaccaagcgguucgacaaccccgugcugcccuucaacgacggcguguacuucgccagcaccgagaagagcaacaucauccggggcuggaucuucggcaccacccuggacagcaagacccagagccugcugaucgugaauaacgccaccaacguggugaucaaggugugcgaguuccaguucugcaacgaccccuuccugggcguguacuaccacaagaacaacaagagcuggauggagagcgaguuccggguguacagcagcgccaacaacugcaccuucgaguacgugagccagcccuuccugauggaccuggagggcaagcagggcaacuucaagaaccugcgggaguucguguucaagaacaucgacggcuacuucaagaucuacagcaagcacaccccaaucaaccuggugcgggaucugccccagggcuucucagcccuggagccccugguggaccugcccaucggcaucaacaucacccgguuccagacccugcuggcccugcaccggagcuaccugaccccaggcgacagcagcagcggguggacagcaggcgcggcugcuuacuacgugggcuaccugcagccccggaccuuccugcugaaguacaacgagaacggcaccaucaccgacgccguggacugcgcccuggacccucugagcgagaccaagugcacccugaagagcuucaccguggagaagggcaucuaccagaccagcaacuuccgggugcagcccaccgagagcaucgugcgguuccccaacaucaccaaccugugccccuucggcgagguguucaacgccacccgguucgccagcguguacgccuggaaccggaagcggaucagcaacugcguggccgacuacagcgugcuguacaacagcgccagcuucagcaccuucaagugcuacggcgugagccccaccaagcugaacgaccugugcuucaccaacguguacgccgacagcuucgugauccguggcgacgaggugcggcagaucgcacccggccagacaggcaagaucgccgacuacaacuacaagcugcccgacgacuucaccggcugcgugaucgccuggaacagcaagaaccucgacagcaaggugggcggcaacuacaacuaccuguaccggcuguuccggaagagcaaccugaagcccuucgagcgggacaucagcaccgagaucuaccaagccggcuccaccccuugcaacggcguggagggcuucaacugcuacuucccucugcagagcuacggcuuccagcccaccaacggcgugggcuaccagcccuaccgggugguggugcugagcuucgagcugcugcacgccccagccaccguguguggccccaagaagagcaccaaccuggugaagaacaagugcgugaacuucaacuucaacggccuuaccggcaccggcgugcugaccgagagcaacaagaaauuccugcccuuucagcaguucggccgggacaucgccgacaccaccgacgcugugcgggauccccagacccuggagauccuggacaucaccccuugcagcuucggcggcgugagcgugaucaccccaggcaccaacaccagcaaccagguggccgugcuguaccagggcgugaacugcaccgaggugcccguggccauccacgccgaccagcugacacccaccuggcgggucuacagcaccggcagcaacguguuccagacccgggccgguugccugaucggcgccgagcacgugaacaacagcuacgagugcgacauccccaucggcgccggcaucugugccagcuaccagacccagaccaauucaccccggagggcaaggagcguggccagccagagcaucaucgccuacaccaugagccugggcgccgagaacagcguggccuacagcaacaacagcaucgccauccccaccaacuucaccaucagcgugaccaccgagauucugcccgugagcaugaccaagaccagcguggacugcaccauguacaucugcggcgacagcaccgagugcagcaaccugcugcugcaguacggcagcuucugcacccagcugaaccgggcccugaccggcaucgccguggagcaggacaagaacacccaggagguguucgcccaggugaagcagaucuacaagaccccucccaucaaggacuucggcggcuucaacuucagccagauccugcccgaccccagcaagcccagcaagcggagcuucaucgaggaccugcuguucaacaaggugacccuagccgacgccggcuucaucaagcaguacggcgacugccucggcgacauagccgcccgggaccugaucugcgcccagaaguucaacggccugaccgugcugccuccccugcugaccgacgagaugaucgcccaguacaccagcgcccuguuagccggaaccaucaccagcggcuggacuuucggcgcuggagccgcucugcagauccccuucgccaugcagauggccuaccgguucaacggcaucggcgugacccagaacgugcuguacgagaaccagaagcugaucgccaaccaguucaacagcgccaucggcaagauccaggacagccugagcagcaccgcuagcgcccugggcaagcugcaggacguggugaaccagaacgcccaggcccugaacacccuggugaagcagcugagcagcaacuucggcgccaucagcagcgugcugaacgacauccugagccggcuggacaaggucgaggccgaggugcagaucgaccggcugaucacuggccggcugcagagccugcagaccuacgugacccagcagcugauccgggccgccgagauucgggccagcgccaaccuggccgccaccaagaugagcgagugcgugcugggccagagcaagcggguggacuucugcggcaagggcuaccaccugaugagcuuuccccagagcgcaccccacggagugguguuccugcacgugaccuacgugcccgcccaggagaagaacuucaccaccgccccagccaucugccacgacggcaaggcccacuuuccccgggagggcguguucgugagcaacggcacccacugguucgugacccagcggaacuucuacgagccccagaucaucaccaccgacaacaccuucgugagcggcaacugcgacguggugaucggcaucgugaacaacaccguguacgauccccugcagcccgagcuggacagcuucaaggaggagcuggacaaguacuucaagaaucacaccagccccgacguggaccugggcgacaucagcggcaucaacgccagcguggugaacauccagaaggagaucgaucggcugaacgagguggccaagaaccugaacgagagccugaucgaccugcaggagcugggcaaguacgagcaguacaucaaguggcccugguacaucuggcugggcuucaucgccggccugaucgccaucgugauggugaccaucaugcugugcugcaugaccagcugcugcagcugccugaagggcuguugcagcugcggcagcugcugcaaguucgacgaggacgacagcgagcccgugcugaagggcgugaagcugcacuacaccugaggacuaguuauaagacugacuagcccgaugggccucccaacgggcccuccuccccuccuugcaccgagauuaauagaucuaaaaaaaaaaaaaaaaaaaaaaaaaaaaaaaaaaaaaaaaaaaaaaaaaaaaaaaaaaaaaaaaaaaaaaaaaaaaaaaaaaaaaaaaaaaaaaaaaaaa

SEQ ID NO: 25649 - RNA, 4017 nt, Artificial Sequence
  SARS-CoV-2/Wuhan/WIV05/2019__EPI_ISL_402128 spike protein mRNA gc (1-1273)(S477N_D614G)
aggagaaagcuuaccauguucguguuccuggugcugcugccccuggugagcagccagugcgugaaccugaccacccggacccagcugccaccagccuacaccaacagcuucacccggggcgucuacuaccccgacaagguguuccggagcagcguccugcacagcacccaggaccuguuccugcccuucuucagcaacgugaccugguuccacgccauccacgugagcggcaccaacggcaccaagcgguucgacaaccccgugcugcccuucaacgacggcguguacuucgccagcaccgagaagagcaacaucauccggggcuggaucuucggcaccacccuggacagcaagacccagagccugcugaucgugaauaacgccaccaacguggugaucaaggugugcgaguuccaguucugcaacgaccccuuccugggcguguacuaccacaagaacaacaagagcuggauggagagcgaguuccggguguacagcagcgccaacaacugcaccuucgaguacgugagccagcccuuccugauggaccuggagggcaagcagggcaacuucaagaaccugcgggaguucguguucaagaacaucgacggcuacuucaagaucuacagcaagcacaccccaaucaaccuggugcgggaucugccccagggcuucucagcccuggagccccugguggaccugcccaucggcaucaacaucacccgguuccagacccugcuggcccugcaccggagcuaccugaccccaggcgacagcagcagcggguggacagcaggcgcggcugcuuacuacgugggcuaccugcagccccggaccuuccugcugaaguacaacgagaacggcaccaucaccgacgccguggacugcgcccuggacccucugagcgagaccaagugcacccugaagagcuucaccguggagaagggcaucuaccagaccagcaacuuccgggugcagcccaccgagagcaucgugcgguuccccaacaucaccaaccugugccccuucggcgagguguucaacgccacccgguucgccagcguguacgccuggaaccggaagcggaucagcaacugcguggccgacuacagcgugcuguacaacagcgccagcuucagcaccuucaagugcuacggcgugagccccaccaagcugaacgaccugugcuucaccaacguguacgccgacagcuucgugauccguggcgacgaggugcggcagaucgcacccggccagacaggcaagaucgccgacuacaacuacaagcugcccgacgacuucaccggcugcgugaucgccuggaacagcaacaaccucgacagcaaggugggcggcaacuacaacuaccuguaccggcuguuccggaagagcaaccugaagcccuucgagcgggacaucagcaccgagaucuaccaagccggcaacaccccuugcaacggcguggagggcuucaacugcuacuucccucugcagagcuacggcuuccagcccaccaacggcgugggcuaccagcccuaccgggugguggugcugagcuucgagcugcugcacgccccagccaccguguguggccccaagaagagcaccaaccuggugaagaacaagugcgugaacuucaacuucaacggccuuaccggcaccggcgugcugaccgagagcaacaagaaauuccugcccuuucagcaguucggccgggacaucgccgacaccaccgacgcugugcgggauccccagacccuggagauccuggacaucaccccuugcagcuucggcggcgugagcgugaucaccccaggcaccaacaccagcaaccagguggccgugcuguaccagggcgugaacugcaccgaggugcccguggccauccacgccgaccagcugacacccaccuggcgggucuacagcaccggcagcaacguguuccagacccgggccgguugccugaucggcgccgagcacgugaacaacagcuacgagugcgacauccccaucggcgccggcaucugugccagcuaccagacccagaccaauucaccccggagggcaaggagcguggccagccagagcaucaucgccuacaccaugagccugggcgccgagaacagcguggccuacagcaacaacagcaucgccauccccaccaacuucaccaucagcgugaccaccgagauucugcccgugagcaugaccaagaccagcguggacugcaccauguacaucugcggcgacagcaccgagugcagcaaccugcugcugcaguacggcagcuucugcacccagcugaaccgggcccugaccggcaucgccguggagcaggacaagaacacccaggagguguucgcccaggugaagcagaucuacaagaccccucccaucaaggacuucggcggcuucaacuucagccagauccugcccgaccccagcaagcccagcaagcggagcuucaucgaggaccugcuguucaacaaggugacccuagccgacgccggcuucaucaagcaguacggcgacugccucggcgacauagccgcccgggaccugaucugcgcccagaaguucaacggccugaccgugcugccuccccugcugaccgacgagaugaucgcccaguacaccagcgcccuguuagccggaaccaucaccagcggcuggacuuucggcgcuggagccgcucugcagauccccuucgccaugcagauggccuaccgguucaacggcaucggcgugacccagaacgugcuguacgagaaccagaagcugaucgccaaccaguucaacagcgccaucggcaagauccaggacagccugagcagcaccgcuagcgcccugggcaagcugcaggacguggugaaccagaacgcccaggcccugaacacccuggugaagcagcugagcagcaacuucggcgccaucagcagcgugcugaacgacauccugagccggcuggacaaggucgaggccgaggugcagaucgaccggcugaucacuggccggcugcagagccugcagaccuacgugacccagcagcugauccgggccgccgagauucgggccagcgccaaccuggccgccaccaagaugagcgagugcgugcugggccagagcaagcggguggacuucugcggcaagggcuaccaccugaugagcuuuccccagagcgcaccccacggagugguguuccugcacgugaccuacgugcccgcccaggagaagaacuucaccaccgccccagccaucugccacgacggcaaggcccacuuuccccgggagggcguguucgugagcaacggcacccacugguucgugacccagcggaacuucuacgagccccagaucaucaccaccgacaacaccuucgugagcggcaacugcgacguggugaucggcaucgugaacaacaccguguacgauccccugcagcccgagcuggacagcuucaaggaggagcuggacaaguacuucaagaaucacaccagccccgacguggaccugggcgacaucagcggcaucaacgccagcguggugaacauccagaaggagaucgaucggcugaacgagguggccaagaaccugaacgagagccugaucgaccugcaggagcugggcaaguacgagcaguacaucaaguggcccugguacaucuggcugggcuucaucgccggccugaucgccaucgugauggugaccaucaugcugugcugcaugaccagcugcugcagcugccugaagggcuguugcagcugcggcagcugcugcaaguucgacgaggacgacagcgagcccgugcugaagggcgugaagcugcacuacaccugaggacuaguuauaagacugacuagcccgaugggccucccaacgggcccuccuccccuccuugcaccgagauuaauagaucuaaaaaaaaaaaaaaaaaaaaaaaaaaaaaaaaaaaaaaaaaaaaaaaaaaaaaaaaaaaaaaaaaaaaaaaaaaaaaaaaaaaaaaaaaaaaaaaaaaaa

SEQ ID NO: 25650 - RNA, 4017 nt, Artificial Sequence
  SARS-CoV-2/Wuhan/WIV05/2019__EPI_ISL_402128 spike protein mRNA gc (1-1273)(N501Y_D614G)
aggagaaagcuuaccauguucguguuccuggugcugcugccccuggugagcagccagugcgugaaccugaccacccggacccagcugccaccagccuacaccaacagcuucacccggggcgucuacuaccccgacaagguguuccggagcagcguccugcacagcacccaggaccuguuccugcccuucuucagcaacgugaccugguuccacgccauccacgugagcggcaccaacggcaccaagcgguucgacaaccccgugcugcccuucaacgacggcguguacuucgccagcaccgagaagagcaacaucauccggggcuggaucuucggcaccacccuggacagcaagacccagagccugcugaucgugaauaacgccaccaacguggugaucaaggugugcgaguuccaguucugcaacgaccccuuccugggcguguacuaccacaagaacaacaagagcuggauggagagcgaguuccggguguacagcagcgccaacaacugcaccuucgaguacgugagccagcccuuccugauggaccuggagggcaagcagggcaacuucaagaaccugcgggaguucguguucaagaacaucgacggcuacuucaagaucuacagcaagcacaccccaaucaaccuggugcgggaucugccccagggcuucucagcccuggagccccugguggaccugcccaucggcaucaacaucacccgguuccagacccugcuggcccugcaccggagcuaccugaccccaggcgacagcagcagcggguggacagcaggcgcggcugcuuacuacgugggcuaccugcagccccggaccuuccugcugaaguacaacgagaacggcaccaucaccgacgccguggacugcgcccuggacccucugagcgagaccaagugcacccugaagagcuucaccguggagaagggcaucuaccagaccagcaacuuccgggugcagcccaccgagagcaucgugcgguuccccaacaucaccaaccugugccccuucggcgagguguucaacgccacccgguucgccagcguguacgccuggaaccggaagcggaucagcaacugcguggccgacuacagcgugcuguacaacagcgccagcuucagcaccuucaagugcuacggcgugagccccaccaagcugaacgaccugugcuucaccaacguguacgccgacagcuucgugauccguggcgacgaggugcggcagaucgcacccggccagacaggcaagaucgccgacuacaacuacaagcugcccgacgacuucaccggcugcgugaucgccuggaacagcaacaaccucgacagcaaggugggcggcaacuacaacuaccuguaccggcuguuccggaagagcaaccugaagcccuucgagcgggacaucagcaccgagaucuaccaagccggcuccaccccuugcaacggcguggagggcuucaacugcuacuucccucugcagagcuacggcuuccagcccaccuacggcgugggcuaccagcccuaccgggugguggugcugagcuucgagcugcugcacgccccagccaccguguguggccccaagaagagcaccaaccuggugaagaacaagugcgugaacuucaacuucaacggccuuaccggcaccggcgugcugaccgagagcaacaagaaauuccugcccuuucagcaguucggccgggacaucgccgacaccaccgacgcugugcgggauccccagacccuggagauccuggacaucaccccuugcagcuucggcggcgugagcgugaucaccccaggcaccaacaccagcaaccagguggccgugcuguaccagggcgugaacugcaccgaggugcccguggccauccacgccgaccagcugacacccaccuggcgggucuacagcaccggcagcaacguguuccagacccgggccgguugccugaucggcgccgagcacgugaacaacagcuacgagugcgacauccccaucggcgccggcaucugugccagcuaccagacccagaccaauucaccccggagggcaaggagcguggccagccagagcaucaucgccuacaccaugagccugggcgccgagaacagcguggccuacagcaacaacagcaucgccauccccaccaacuucaccaucagcgugaccaccgagauucugcccgugagcaugaccaagaccagcguggacugcaccauguacaucugcggcgacagcaccgagugcagcaaccugcugcugcaguacggcagcuucugcacccagcugaaccgggcccugaccggcaucgccguggagcaggacaagaacacccaggagguguucgcccaggugaagcagaucuacaagaccccucccaucaaggacuucggcggcuucaacuucagccagauccugcccgaccccagcaagcccagcaagcggagcuucaucgaggaccugcuguucaacaaggugacccuagccgacgccggcuucaucaagcaguacggcgacugccucggcgacauagccgcccgggaccugaucugcgcccagaaguucaacggccugaccgugcugccuccccugcugaccgacgagaugaucgcccaguacaccagcgcccuguuagccggaaccaucaccagcggcuggacuuucggcgcuggagccgcucugcagauccccuucgccaugcagauggccuaccgguucaacggcaucggcgugacccagaacgugcuguacgagaaccagaagcugaucgccaaccaguucaacagcgccaucggcaagauccaggacagccugagcagcaccgcuagcgcccugggcaagcugcaggacguggugaaccagaacgcccaggcccugaacacccuggugaagcagcugagcagcaacuucggcgccaucagcagcgugcugaacgacauccugagccggcuggacaaggucgaggccgaggugcagaucgaccggcugaucacuggccggcugcagagccugcagaccuacgugacccagcagcugauccgggccgccgagauucgggccagcgccaaccuggccgccaccaagaugagcgagugcgugcugggccagagcaagcggguggacuucugcggcaagggcuaccaccugaugagcuuuccccagagcgcaccccacggagugguguuccugcacgugaccuacgugcccgcccaggagaagaacuucaccaccgccccagccaucugccacgacggcaaggcccacuuuccccgggagggcguguucgugagcaacggcacccacugguucgugacccagcggaacuucuacgagccccagaucaucaccaccgacaacaccuucgugagcggcaacugcgacguggugaucggcaucgugaacaacaccguguacgauccccugcagcccgagcuggacagcuucaaggaggagcuggacaaguacuucaagaaucacaccagccccgacguggaccugggcgacaucagcggcaucaacgccagcguggugaacauccagaaggagaucgaucggcugaacgagguggccaagaaccugaacgagagccugaucgaccugcaggagcugggcaaguacgagcaguacaucaaguggcccugguacaucuggcugggcuucaucgccggccugaucgccaucgugauggugaccaucaugcugugcugcaugaccagcugcugcagcugccugaagggcuguugcagcugcggcagcugcugcaaguucgacgaggacgacagcgagcccgugcugaagggcgugaagcugcacuacaccugaggacuaguuauaagacugacuagcccgaugggccucccaacgggcccuccuccccuccuugcaccgagauuaauagaucuaaaaaaaaaaaaaaaaaaaaaaaaaaaaaaaaaaaaaaaaaaaaaaaaaaaaaaaaaaaaaaaaaaaaaaaaaaaaaaaaaaaaaaaaaaaaaaaaaaaa

SEQ ID NO: 25651 - RNA, 4011 nt, Artificial Sequence
  SARS-CoV-2/Wuhan/WIV05/2019__EPI_ISL_402128 spike protein mRNA gc (1-1273)(H69del_V70del_D614G)
aggagaaagcuuaccauguucguguuccuggugcugcugccccuggugagcagccagugcgugaaccugaccacccggacccagcugccaccagccuacaccaacagcuucacccggggcgucuacuaccccgacaagguguuccggagcagcguccugcacagcacccaggaccuguuccugcccuucuucagcaacgugaccugguuccacgccaucagcggcaccaacggcaccaagcgguucgacaaccccgugcugcccuucaacgacggcguguacuucgccagcaccgagaagagcaacaucauccggggcuggaucuucggcaccacccuggacagcaagacccagagccugcugaucgugaauaacgccaccaacguggugaucaaggugugcgaguuccaguucugcaacgaccccuuccugggcguguacuaccacaagaacaacaagagcuggauggagagcgaguuccggguguacagcagcgccaacaacugcaccuucgaguacgugagccagcccuuccugauggaccuggagggcaagcagggcaacuucaagaaccugcgggaguucguguucaagaacaucgacggcuacuucaagaucuacagcaagcacaccccaaucaaccuggugcgggaucugccccagggcuucucagcccuggagccccugguggaccugcccaucggcaucaacaucacccgguuccagacccugcuggcccugcaccggagcuaccugaccccaggcgacagcagcagcggguggacagcaggcgcggcugcuuacuacgugggcuaccugcagccccggaccuuccugcugaaguacaacgagaacggcaccaucaccgacgccguggacugcgcccuggacccucugagcgagaccaagugcacccugaagagcuucaccguggagaagggcaucuaccagaccagcaacuuccgggugcagcccaccgagagcaucgugcgguuccccaacaucaccaaccugugccccuucggcgagguguucaacgccacccgguucgccagcguguacgccuggaaccggaagcggaucagcaacugcguggccgacuacagcgugcuguacaacagcgccagcuucagcaccuucaagugcuacggcgugagccccaccaagcugaacgaccugugcuucaccaacguguacgccgacagcuucgugauccguggcgacgaggugcggcagaucgcacccggccagacaggcaagaucgccgacuacaacuacaagcugcccgacgacuucaccggcugcgugaucgccuggaacagcaacaaccucgacagcaaggugggcggcaacuacaacuaccuguaccggcuguuccggaagagcaaccugaagcccuucgagcgggacaucagcaccgagaucuaccaagccggcuccaccccuugcaacggcguggagggcuucaacugcuacuucccucugcagagcuacggcuuccagcccaccaacggcgugggcuaccagcccuaccgggugguggugcugagcuucgagcugcugcacgccccagccaccguguguggccccaagaagagcaccaaccuggugaagaacaagugcgugaacuucaacuucaacggccuuaccggcaccggcgugcugaccgagagcaacaagaaauuccugcccuuucagcaguucggccgggacaucgccgacaccaccgacgcugugcgggauccccagacccuggagauccuggacaucaccccuugcagcuucggcggcgugagcgugaucaccccaggcaccaacaccagcaaccagguggccgugcuguaccagggcgugaacugcaccgaggugcccguggccauccacgccgaccagcugacacccaccuggcgggucuacagcaccggcagcaacguguuccagacccgggccgguugccugaucggcgccgagcacgugaacaacagcuacgagugcgacauccccaucggcgccggcaucugugccagcuaccagacccagaccaauucaccccggagggcaaggagcguggccagccagagcaucaucgccuacaccaugagccugggcgccgagaacagcguggccuacagcaacaacagcaucgccauccccaccaacuucaccaucagcgugaccaccgagauucugcccgugagcaugaccaagaccagcguggacugcaccauguacaucugcggcgacagcaccgagugcagcaaccugcugcugcaguacggcagcuucugcacccagcugaaccgggcccugaccggcaucgccguggagcaggacaagaacacccaggagguguucgcccaggugaagcagaucuacaagaccccucccaucaaggacuucggcggcuucaacuucagccagauccugcccgaccccagcaagcccagcaagcggagcuucaucgaggaccugcuguucaacaaggugacccuagccgacgccggcuucaucaagcaguacggcgacugccucggcgacauagccgcccgggaccugaucugcgcccagaaguucaacggccugaccgugcugccuccccugcugaccgacgagaugaucgcccaguacaccagcgcccuguuagccggaaccaucaccagcggcuggacuuucggcgcuggagccgcucugcagauccccuucgccaugcagauggccuaccgguucaacggcaucggcgugacccagaacgugcuguacgagaaccagaagcugaucgccaaccaguucaacagcgccaucggcaagauccaggacagccugagcagcaccgcuagcgcccugggcaagcugcaggacguggugaaccagaacgcccaggcccugaacacccuggugaagcagcugagcagcaacuucggcgccaucagcagcgugcugaacgacauccugagccggcuggacaaggucgaggccgaggugcagaucgaccggcugaucacuggccggcugcagagccugcagaccuacgugacccagcagcugauccgggccgccgagauucgggccagcgccaaccuggccgccaccaagaugagcgagugcgugcugggccagagcaagcggguggacuucugcggcaagggcuaccaccugaugagcuuuccccagagcgcaccccacggagugguguuccugcacgugaccuacgugcccgcccaggagaagaacuucaccaccgccccagccaucugccacgacggcaaggcccacuuuccccgggagggcguguucgugagcaacggcacccacugguucgugacccagcggaacuucuacgagccccagaucaucaccaccgacaacaccuucgugagcggcaacugcgacguggugaucggcaucgugaacaacaccguguacgauccccugcagcccgagcuggacagcuucaaggaggagcuggacaaguacuucaagaaucacaccagccccgacguggaccugggcgacaucagcggcaucaacgccagcguggugaacauccagaaggagaucgaucggcugaacgagguggccaagaaccugaacgagagccugaucgaccugcaggagcugggcaaguacgagcaguacaucaaguggcccugguacaucuggcugggcuucaucgccggccugaucgccaucgugauggugaccaucaugcugugcugcaugaccagcugcugcagcugccugaagggcuguugcagcugcggcagcugcugcaaguucgacgaggacgacagcgagcccgugcugaagggcgugaagcugcacuacaccugaggacuaguuauaagacugacuagcccgaugggccucccaacgggcccuccuccccuccuugcaccgagauuaauagaucuaaaaaaaaaaaaaaaaaaaaaaaaaaaaaaaaaaaaaaaaaaaaaaaaaaaaaaaaaaaaaaaaaaaaaaaaaaaaaaaaaaaaaaaaaaaaaaaaaaaa

SEQ ID NO: 25652 - RNA, 4017 nt, Artificial Sequence
  SARS-CoV-2/Wuhan/WIV05/2019__EPI_ISL_402128 spike protein mRNA gc (1-1273)(Y453F_D614G)
aggagaaagcuuaccauguucguguuccuggugcugcugccccuggugagcagccagugcgugaaccugaccacccggacccagcugccaccagccuacaccaacagcuucacccggggcgucuacuaccccgacaagguguuccggagcagcguccugcacagcacccaggaccuguuccugcccuucuucagcaacgugaccugguuccacgccauccacgugagcggcaccaacggcaccaagcgguucgacaaccccgugcugcccuucaacgacggcguguacuucgccagcaccgagaagagcaacaucauccggggcuggaucuucggcaccacccuggacagcaagacccagagccugcugaucgugaauaacgccaccaacguggugaucaaggugugcgaguuccaguucugcaacgaccccuuccugggcguguacuaccacaagaacaacaagagcuggauggagagcgaguuccggguguacagcagcgccaacaacugcaccuucgaguacgugagccagcccuuccugauggaccuggagggcaagcagggcaacuucaagaaccugcgggaguucguguucaagaacaucgacggcuacuucaagaucuacagcaagcacaccccaaucaaccuggugcgggaucugccccagggcuucucagcccuggagccccugguggaccugcccaucggcaucaacaucacccgguuccagacccugcuggcccugcaccggagcuaccugaccccaggcgacagcagcagcggguggacagcaggcgcggcugcuuacuacgugggcuaccugcagccccggaccuuccugcugaaguacaacgagaacggcaccaucaccgacgccguggacugcgcccuggacccucugagcgagaccaagugcacccugaagagcuucaccguggagaagggcaucuaccagaccagcaacuuccgggugcagcccaccgagagcaucgugcgguuccccaacaucaccaaccugugccccuucggcgagguguucaacgccacccgguucgccagcguguacgccuggaaccggaagcggaucagcaacugcguggccgacuacagcgugcuguacaacagcgccagcuucagcaccuucaagugcuacggcgugagccccaccaagcugaacgaccugugcuucaccaacguguacgccgacagcuucgugauccguggcgacgaggugcggcagaucgcacccggccagacaggcaagaucgccgacuacaacuacaagcugcccgacgacuucaccggcugcgugaucgccuggaacagcaacaaccucgacagcaaggugggcggcaacuacaacuaccuguuccggcuguuccggaagagcaaccugaagcccuucgagcgggacaucagcaccgagaucuaccaagccggcuccaccccuugcaacggcguggagggcuucaacugcuacuucccucugcagagcuacggcuuccagcccaccaacggcgugggcuaccagcccuaccgggugguggugcugagcuucgagcugcugcacgccccagccaccguguguggccccaagaagagcaccaaccuggugaagaacaagugcgugaacuucaacuucaacggccuuaccggcaccggcgugcugaccgagagcaacaagaaauuccugcccuuucagcaguucggccgggacaucgccgacaccaccgacgcugugcgggauccccagacccuggagauccuggacaucaccccuugcagcuucggcggcgugagcgugaucaccccaggcaccaacaccagcaaccagguggccgugcuguaccagggcgugaacugcaccgaggugcccguggccauccacgccgaccagcugacacccaccuggcgggucuacagcaccggcagcaacguguuccagacccgggccgguugccugaucggcgccgagcacgugaacaacagcuacgagugcgacauccccaucggcgccggcaucugugccagcuaccagacccagaccaauucaccccggagggcaaggagcguggccagccagagcaucaucgccuacaccaugagccugggcgccgagaacagcguggccuacagcaacaacagcaucgccauccccaccaacuucaccaucagcgugaccaccgagauucugcccgugagcaugaccaagaccagcguggacugcaccauguacaucugcggcgacagcaccgagugcagcaaccugcugcugcaguacggcagcuucugcacccagcugaaccgggcccugaccggcaucgccguggagcaggacaagaacacccaggagguguucgcccaggugaagcagaucuacaagaccccucccaucaaggacuucggcggcuucaacuucagccagauccugcccgaccccagcaagcccagcaagcggagcuucaucgaggaccugcuguucaacaaggugacccuagccgacgccggcuucaucaagcaguacggcgacugccucggcgacauagccgcccgggaccugaucugcgcccagaaguucaacggccugaccgugcugccuccccugcugaccgacgagaugaucgcccaguacaccagcgcccuguuagccggaaccaucaccagcggcuggacuuucggcgcuggagccgcucugcagauccccuucgccaugcagauggccuaccgguucaacggcaucggcgugacccagaacgugcuguacgagaaccagaagcugaucgccaaccaguucaacagcgccaucggcaagauccaggacagccugagcagcaccgcuagcgcccugggcaagcugcaggacguggugaaccagaacgcccaggcccugaacacccuggugaagcagcugagcagcaacuucggcgccaucagcagcgugcugaacgacauccugagccggcuggacaaggucgaggccgaggugcagaucgaccggcugaucacuggccggcugcagagccugcagaccuacgugacccagcagcugauccgggccgccgagauucgggccagcgccaaccuggccgccaccaagaugagcgagugcgugcugggccagagcaagcggguggacuucugcggcaagggcuaccaccugaugagcuuuccccagagcgcaccccacggagugguguuccugcacgugaccuacgugcccgcccaggagaagaacuucaccaccgccccagccaucugccacgacggcaaggcccacuuuccccgggagggcguguucgugagcaacggcacccacugguucgugacccagcggaacuucuacgagccccagaucaucaccaccgacaacaccuucgugagcggcaacugcgacguggugaucggcaucgugaacaacaccguguacgauccccugcagcccgagcuggacagcuucaaggaggagcuggacaaguacuucaagaaucacaccagccccgacguggaccugggcgacaucagcggcaucaacgccagcguggugaacauccagaaggagaucgaucggcugaacgagguggccaagaaccugaacgagagccugaucgaccugcaggagcugggcaaguacgagcaguacaucaaguggcccugguacaucuggcugggcuucaucgccggccugaucgccaucgugauggugaccaucaugcugugcugcaugaccagcugcugcagcugccugaagggcuguugcagcugcggcagcugcugcaaguucgacgaggacgacagcgagcccgugcugaagggcgugaagcugcacuacaccugaggacuaguuauaagacugacuagcccgaugggccucccaacgggcccuccuccccuccuugcaccgagauuaauagaucuaaaaaaaaaaaaaaaaaaaaaaaaaaaaaaaaaaaaaaaaaaaaaaaaaaaaaaaaaaaaaaaaaaaaaaaaaaaaaaaaaaaaaaaaaaaaaaaaaaaa

SEQ ID NO: 25653 - RNA, 4017 nt, Artificial Sequence
  SARS-CoV-2/Wuhan/WIV05/2019__EPI_ISL_402128 spike protein mRNA gc (1-1273)(D614G_I692V)
aggagaaagcuuaccauguucguguuccuggugcugcugccccuggugagcagccagugcgugaaccugaccacccggacccagcugccaccagccuacaccaacagcuucacccggggcgucuacuaccccgacaagguguuccggagcagcguccugcacagcacccaggaccuguuccugcccuucuucagcaacgugaccugguuccacgccauccacgugagcggcaccaacggcaccaagcgguucgacaaccccgugcugcccuucaacgacggcguguacuucgccagcaccgagaagagcaacaucauccggggcuggaucuucggcaccacccuggacagcaagacccagagccugcugaucgugaauaacgccaccaacguggugaucaaggugugcgaguuccaguucugcaacgaccccuuccugggcguguacuaccacaagaacaacaagagcuggauggagagcgaguuccggguguacagcagcgccaacaacugcaccuucgaguacgugagccagcccuuccugauggaccuggagggcaagcagggcaacuucaagaaccugcgggaguucguguucaagaacaucgacggcuacuucaagaucuacagcaagcacaccccaaucaaccuggugcgggaucugccccagggcuucucagcccuggagccccugguggaccugcccaucggcaucaacaucacccgguuccagacccugcuggcccugcaccggagcuaccugaccccaggcgacagcagcagcggguggacagcaggcgcggcugcuuacuacgugggcuaccugcagccccggaccuuccugcugaaguacaacgagaacggcaccaucaccgacgccguggacugcgcccuggacccucugagcgagaccaagugcacccugaagagcuucaccguggagaagggcaucuaccagaccagcaacuuccgggugcagcccaccgagagcaucgugcgguuccccaacaucaccaaccugugccccuucggcgagguguucaacgccacccgguucgccagcguguacgccuggaaccggaagcggaucagcaacugcguggccgacuacagcgugcuguacaacagcgccagcuucagcaccuucaagugcuacggcgugagccccaccaagcugaacgaccugugcuucaccaacguguacgccgacagcuucgugauccguggcgacgaggugcggcagaucgcacccggccagacaggcaagaucgccgacuacaacuacaagcugcccgacgacuucaccggcugcgugaucgccuggaacagcaacaaccucgacagcaaggugggcggcaacuacaacuaccuguaccggcuguuccggaagagcaaccugaagcccuucgagcgggacaucagcaccgagaucuaccaagccggcuccaccccuugcaacggcguggagggcuucaacugcuacuucccucugcagagcuacggcuuccagcccaccaacggcgugggcuaccagcccuaccgggugguggugcugagcuucgagcugcugcacgccccagccaccguguguggccccaagaagagcaccaaccuggugaagaacaagugcgugaacuucaacuucaacggccuuaccggcaccggcgugcugaccgagagcaacaagaaauuccugcccuuucagcaguucggccgggacaucgccgacaccaccgacgcugugcgggauccccagacccuggagauccuggacaucaccccuugcagcuucggcggcgugagcgugaucaccccaggcaccaacaccagcaaccagguggccgugcuguaccagggcgugaacugcaccgaggugcccguggccauccacgccgaccagcugacacccaccuggcgggucuacagcaccggcagcaacguguuccagacccgggccgguugccugaucggcgccgagcacgugaacaacagcuacgagugcgacauccccaucggcgccggcaucugugccagcuaccagacccagaccaauucaccccggagggcaaggagcguggccagccagagcgugaucgccuacaccaugagccugggcgccgagaacagcguggccuacagcaacaacagcaucgccauccccaccaacuucaccaucagcgugaccaccgagauucugcccgugagcaugaccaagaccagcguggacugcaccauguacaucugcggcgacagcaccgagugcagcaaccugcugcugcaguacggcagcuucugcacccagcugaaccgggcccugaccggcaucgccguggagcaggacaagaacacccaggagguguucgcccaggugaagcagaucuacaagaccccucccaucaaggacuucggcggcuucaacuucagccagauccugcccgaccccagcaagcccagcaagcggagcuucaucgaggaccugcuguucaacaaggugacccuagccgacgccggcuucaucaagcaguacggcgacugccucggcgacauagccgcccgggaccugaucugcgcccagaaguucaacggccugaccgugcugccuccccugcugaccgacgagaugaucgcccaguacaccagcgcccuguuagccggaaccaucaccagcggcuggacuuucggcgcuggagccgcucugcagauccccuucgccaugcagauggccuaccgguucaacggcaucggcgugacccagaacgugcuguacgagaaccagaagcugaucgccaaccaguucaacagcgccaucggcaagauccaggacagccugagcagcaccgcuagcgcccugggcaagcugcaggacguggugaaccagaacgcccaggcccugaacacccuggugaagcagcugagcagcaacuucggcgccaucagcagcgugcugaacgacauccugagccggcuggacaaggucgaggccgaggugcagaucgaccggcugaucacuggccggcugcagagccugcagaccuacgugacccagcagcugauccgggccgccgagauucgggccagcgccaaccuggccgccaccaagaugagcgagugcgugcugggccagagcaagcggguggacuucugcggcaagggcuaccaccugaugagcuuuccccagagcgcaccccacggagugguguuccugcacgugaccuacgugcccgcccaggagaagaacuucaccaccgccccagccaucugccacgacggcaaggcccacuuuccccgggagggcguguucgugagcaacggcacccacugguucgugacccagcggaacuucuacgagccccagaucaucaccaccgacaacaccuucgugagcggcaacugcgacguggugaucggcaucgugaacaacaccguguacgauccccugcagcccgagcuggacagcuucaaggaggagcuggacaaguacuucaagaaucacaccagccccgacguggaccugggcgacaucagcggcaucaacgccagcguggugaacauccagaaggagaucgaucggcugaacgagguggccaagaaccugaacgagagccugaucgaccugcaggagcugggcaaguacgagcaguacaucaaguggcccugguacaucuggcugggcuucaucgccggccugaucgccaucgugauggugaccaucaugcugugcugcaugaccagcugcugcagcugccugaagggcuguugcagcugcggcagcugcugcaaguucgacgaggacgacagcgagcccgugcugaagggcgugaagcugcacuacaccugaggacuaguuauaagacugacuagcccgaugggccucccaacgggcccuccuccccuccuugcaccgagauuaauagaucuaaaaaaaaaaaaaaaaaaaaaaaaaaaaaaaaaaaaaaaaaaaaaaaaaaaaaaaaaaaaaaaaaaaaaaaaaaaaaaaaaaaaaaaaaaaaaaaaaaaa

SEQ ID NO: 25654 - RNA, 4017 nt, Artificial Sequence
  SARS-CoV-2/Wuhan/WIV05/2019__EPI_ISL_402128 spike protein mRNA gc (1-1273)(D614G_M1229I)
aggagaaagcuuaccauguucguguuccuggugcugcugccccuggugagcagccagugcgugaaccugaccacccggacccagcugccaccagccuacaccaacagcuucacccggggcgucuacuaccccgacaagguguuccggagcagcguccugcacagcacccaggaccuguuccugcccuucuucagcaacgugaccugguuccacgccauccacgugagcggcaccaacggcaccaagcgguucgacaaccccgugcugcccuucaacgacggcguguacuucgccagcaccgagaagagcaacaucauccggggcuggaucuucggcaccacccuggacagcaagacccagagccugcugaucgugaauaacgccaccaacguggugaucaaggugugcgaguuccaguucugcaacgaccccuuccugggcguguacuaccacaagaacaacaagagcuggauggagagcgaguuccggguguacagcagcgccaacaacugcaccuucgaguacgugagccagcccuuccugauggaccuggagggcaagcagggcaacuucaagaaccugcgggaguucguguucaagaacaucgacggcuacuucaagaucuacagcaagcacaccccaaucaaccuggugcgggaucugccccagggcuucucagcccuggagccccugguggaccugcccaucggcaucaacaucacccgguuccagacccugcuggcccugcaccggagcuaccugaccccaggcgacagcagcagcggguggacagcaggcgcggcugcuuacuacgugggcuaccugcagccccggaccuuccugcugaaguacaacgagaacggcaccaucaccgacgccguggacugcgcccuggacccucugagcgagaccaagugcacccugaagagcuucaccguggagaagggcaucuaccagaccagcaacuuccgggugcagcccaccgagagcaucgugcgguuccccaacaucaccaaccugugccccuucggcgagguguucaacgccacccgguucgccagcguguacgccuggaaccggaagcggaucagcaacugcguggccgacuacagcgugcuguacaacagcgccagcuucagcaccuucaagugcuacggcgugagccccaccaagcugaacgaccugugcuucaccaacguguacgccgacagcuucgugauccguggcgacgaggugcggcagaucgcacccggccagacaggcaagaucgccgacuacaacuacaagcugcccgacgacuucaccggcugcgugaucgccuggaacagcaacaaccucgacagcaaggugggcggcaacuacaacuaccuguaccggcuguuccggaagagcaaccugaagcccuucgagcgggacaucagcaccgagaucuaccaagccggcuccaccccuugcaacggcguggagggcuucaacugcuacuucccucugcagagcuacggcuuccagcccaccaacggcgugggcuaccagcccuaccgggugguggugcugagcuucgagcugcugcacgccccagccaccguguguggccccaagaagagcaccaaccuggugaagaacaagugcgugaacuucaacuucaacggccuuaccggcaccggcgugcugaccgagagcaacaagaaauuccugcccuuucagcaguucggccgggacaucgccgacaccaccgacgcugugcgggauccccagacccuggagauccuggacaucaccccuugcagcuucggcggcgugagcgugaucaccccaggcaccaacaccagcaaccagguggccgugcuguaccagggcgugaacugcaccgaggugcccguggccauccacgccgaccagcugacacccaccuggcgggucuacagcaccggcagcaacguguuccagacccgggccgguugccugaucggcgccgagcacgugaacaacagcuacgagugcgacauccccaucggcgccggcaucugugccagcuaccagacccagaccaauucaccccggagggcaaggagcguggccagccagagcaucaucgccuacaccaugagccugggcgccgagaacagcguggccuacagcaacaacagcaucgccauccccaccaacuucaccaucagcgugaccaccgagauucugcccgugagcaugaccaagaccagcguggacugcaccauguacaucugcggcgacagcaccgagugcagcaaccugcugcugcaguacggcagcuucugcacccagcugaaccgggcccugaccggcaucgccguggagcaggacaagaacacccaggagguguucgcccaggugaagcagaucuacaagaccccucccaucaaggacuucggcggcuucaacuucagccagauccugcccgaccccagcaagcccagcaagcggagcuucaucgaggaccugcuguucaacaaggugacccuagccgacgccggcuucaucaagcaguacggcgacugccucggcgacauagccgcccgggaccugaucugcgcccagaaguucaacggccugaccgugcugccuccccugcugaccgacgagaugaucgcccaguacaccagcgcccuguuagccggaaccaucaccagcggcuggacuuucggcgcuggagccgcucugcagauccccuucgccaugcagauggccuaccgguucaacggcaucggcgugacccagaacgugcuguacgagaaccagaagcugaucgccaaccaguucaacagcgccaucggcaagauccaggacagccugagcagcaccgcuagcgcccugggcaagcugcaggacguggugaaccagaacgcccaggcccugaacacccuggugaagcagcugagcagcaacuucggcgccaucagcagcgugcugaacgacauccugagccggcuggacaaggucgaggccgaggugcagaucgaccggcugaucacuggccggcugcagagccugcagaccuacgugacccagcagcugauccgggccgccgagauucgggccagcgccaaccuggccgccaccaagaugagcgagugcgugcugggccagagcaagcggguggacuucugcggcaagggcuaccaccugaugagcuuuccccagagcgcaccccacggagugguguuccugcacgugaccuacgugcccgcccaggagaagaacuucaccaccgccccagccaucugccacgacggcaaggcccacuuuccccgggagggcguguucgugagcaacggcacccacugguucgugacccagcggaacuucuacgagccccagaucaucaccaccgacaacaccuucgugagcggcaacugcgacguggugaucggcaucgugaacaacaccguguacgauccccugcagcccgagcuggacagcuucaaggaggagcuggacaaguacuucaagaaucacaccagccccgacguggaccugggcgacaucagcggcaucaacgccagcguggugaacauccagaaggagaucgaucggcugaacgagguggccaagaaccugaacgagagccugaucgaccugcaggagcugggcaaguacgagcaguacaucaaguggcccugguacaucuggcugggcuucaucgccggccugaucgccaucgugaucgugaccaucaugcugugcugcaugaccagcugcugcagcugccugaagggcuguugcagcugcggcagcugcugcaaguucgacgaggacgacagcgagcccgugcugaagggcgugaagcugcacuacaccugaggacuaguuauaagacugacuagcccgaugggccucccaacgggcccuccuccccuccuugcaccgagauuaauagaucuaaaaaaaaaaaaaaaaaaaaaaaaaaaaaaaaaaaaaaaaaaaaaaaaaaaaaaaaaaaaaaaaaaaaaaaaaaaaaaaaaaaaaaaaaaaaaaaaaaaa

SEQ ID NO: 25655 - RNA, 4011 nt, Artificial Sequence
  SARS-CoV-2/Wuhan/WIV05/2019__EPI_ISL_402128 spike protein mRNA gc (1-1273)(H69del_V70del_A222V_Y453F_S477N_D614G_I692V)
aggagaaagcuuaccauguucguguuccuggugcugcugccccuggugagcagccagugcgugaaccugaccacccggacccagcugccaccagccuacaccaacagcuucacccggggcgucuacuaccccgacaagguguuccggagcagcguccugcacagcacccaggaccuguuccugcccuucuucagcaacgugaccugguuccacgccaucagcggcaccaacggcaccaagcgguucgacaaccccgugcugcccuucaacgacggcguguacuucgccagcaccgagaagagcaacaucauccggggcuggaucuucggcaccacccuggacagcaagacccagagccugcugaucgugaauaacgccaccaacguggugaucaaggugugcgaguuccaguucugcaacgaccccuuccugggcguguacuaccacaagaacaacaagagcuggauggagagcgaguuccggguguacagcagcgccaacaacugcaccuucgaguacgugagccagcccuuccugauggaccuggagggcaagcagggcaacuucaagaaccugcgggaguucguguucaagaacaucgacggcuacuucaagaucuacagcaagcacaccccaaucaaccuggugcgggaucugccccagggcuucucagugcuggagccccugguggaccugcccaucggcaucaacaucacccgguuccagacccugcuggcccugcaccggagcuaccugaccccaggcgacagcagcagcggguggacagcaggcgcggcugcuuacuacgugggcuaccugcagccccggaccuuccugcugaaguacaacgagaacggcaccaucaccgacgccguggacugcgcccuggacccucugagcgagaccaagugcacccugaagagcuucaccguggagaagggcaucuaccagaccagcaacuuccgggugcagcccaccgagagcaucgugcgguuccccaacaucaccaaccugugccccuucggcgagguguucaacgccacccgguucgccagcguguacgccuggaaccggaagcggaucagcaacugcguggccgacuacagcgugcuguacaacagcgccagcuucagcaccuucaagugcuacggcgugagccccaccaagcugaacgaccugugcuucaccaacguguacgccgacagcuucgugauccguggcgacgaggugcggcagaucgcacccggccagacaggcaagaucgccgacuacaacuacaagcugcccgacgacuucaccggcugcgugaucgccuggaacagcaacaaccucgacagcaaggugggcggcaacuacaacuaccuguuccggcuguuccggaagagcaaccugaagcccuucgagcgggacaucagcaccgagaucuaccaagccggcaacaccccuugcaacggcguggagggcuucaacugcuacuucccucugcagagcuacggcuuccagcccaccaacggcgugggcuaccagcccuaccgggugguggugcugagcuucgagcugcugcacgccccagccaccguguguggccccaagaagagcaccaaccuggugaagaacaagugcgugaacuucaacuucaacggccuuaccggcaccggcgugcugaccgagagcaacaagaaauuccugcccuuucagcaguucggccgggacaucgccgacaccaccgacgcugugcgggauccccagacccuggagauccuggacaucaccccuugcagcuucggcggcgugagcgugaucaccccaggcaccaacaccagcaaccagguggccgugcuguaccagggcgugaacugcaccgaggugcccguggccauccacgccgaccagcugacacccaccuggcgggucuacagcaccggcagcaacguguuccagacccgggccgguugccugaucggcgccgagcacgugaacaacagcuacgagugcgacauccccaucggcgccggcaucugugccagcuaccagacccagaccaauucaccccggagggcaaggagcguggccagccagagcgugaucgccuacaccaugagccugggcgccgagaacagcguggccuacagcaacaacagcaucgccauccccaccaacuucaccaucagcgugaccaccgagauucugcccgugagcaugaccaagaccagcguggacugcaccauguacaucugcggcgacagcaccgagugcagcaaccugcugcugcaguacggcagcuucugcacccagcugaaccgggcccugaccggcaucgccguggagcaggacaagaacacccaggagguguucgcccaggugaagcagaucuacaagaccccucccaucaaggacuucggcggcuucaacuucagccagauccugcccgaccccagcaagcccagcaagcggagcuucaucgaggaccugcuguucaacaaggugacccuagccgacgccggcuucaucaagcaguacggcgacugccucggcgacauagccgcccgggaccugaucugcgcccagaaguucaacggccugaccgugcugccuccccugcugaccgacgagaugaucgcccaguacaccagcgcccuguuagccggaaccaucaccagcggcuggacuuucggcgcuggagccgcucugcagauccccuucgccaugcagauggccuaccgguucaacggcaucggcgugacccagaacgugcuguacgagaaccagaagcugaucgccaaccaguucaacagcgccaucggcaagauccaggacagccugagcagcaccgcuagcgcccugggcaagcugcaggacguggugaaccagaacgcccaggcccugaacacccuggugaagcagcugagcagcaacuucggcgccaucagcagcgugcugaacgacauccugagccggcuggacaaggucgaggccgaggugcagaucgaccggcugaucacuggccggcugcagagccugcagaccuacgugacccagcagcugauccgggccgccgagauucgggccagcgccaaccuggccgccaccaagaugagcgagugcgugcugggccagagcaagcggguggacuucugcggcaagggcuaccaccugaugagcuuuccccagagcgcaccccacggagugguguuccugcacgugaccuacgugcccgcccaggagaagaacuucaccaccgccccagccaucugccacgacggcaaggcccacuuuccccgggagggcguguucgugagcaacggcacccacugguucgugacccagcggaacuucuacgagccccagaucaucaccaccgacaacaccuucgugagcggcaacugcgacguggugaucggcaucgugaacaacaccguguacgauccccugcagcccgagcuggacagcuucaaggaggagcuggacaaguacuucaagaaucacaccagccccgacguggaccugggcgacaucagcggcaucaacgccagcguggugaacauccagaaggagaucgaucggcugaacgagguggccaagaaccugaacgagagccugaucgaccugcaggagcugggcaaguacgagcaguacaucaaguggcccugguacaucuggcugggcuucaucgccggccugaucgccaucgugauggugaccaucaugcugugcugcaugaccagcugcugcagcugccugaagggcuguugcagcugcggcagcugcugcaaguucgacgaggacgacagcgagcccgugcugaagggcgugaagcugcacuacaccugaggacuaguuauaagacugacuagcccgaugggccucccaacgggcccuccuccccuccuugcaccgagauuaauagaucuaaaaaaaaaaaaaaaaaaaaaaaaaaaaaaaaaaaaaaaaaaaaaaaaaaaaaaaaaaaaaaaaaaaaaaaaaaaaaaaaaaaaaaaaaaaaaaaaaaaa

SEQ ID NO: 25656 - RNA, 4011 nt, Artificial Sequence
  SARS-CoV-2/Wuhan/WIV05/2019__EPI_ISL_402128 spike protein mRNA gc (1-1273)(H69del_V70del_Y453F_D614G_I692V_M1229I)
aggagaaagcuuaccauguucguguuccuggugcugcugccccuggugagcagccagugcgugaaccugaccacccggacccagcugccaccagccuacaccaacagcuucacccggggcgucuacuaccccgacaagguguuccggagcagcguccugcacagcacccaggaccuguuccugcccuucuucagcaacgugaccugguuccacgccaucagcggcaccaacggcaccaagcgguucgacaaccccgugcugcccuucaacgacggcguguacuucgccagcaccgagaagagcaacaucauccggggcuggaucuucggcaccacccuggacagcaagacccagagccugcugaucgugaauaacgccaccaacguggugaucaaggugugcgaguuccaguucugcaacgaccccuuccugggcguguacuaccacaagaacaacaagagcuggauggagagcgaguuccggguguacagcagcgccaacaacugcaccuucgaguacgugagccagcccuuccugauggaccuggagggcaagcagggcaacuucaagaaccugcgggaguucguguucaagaacaucgacggcuacuucaagaucuacagcaagcacaccccaaucaaccuggugcgggaucugccccagggcuucucagcccuggagccccugguggaccugcccaucggcaucaacaucacccgguuccagacccugcuggcccugcaccggagcuaccugaccccaggcgacagcagcagcggguggacagcaggcgcggcugcuuacuacgugggcuaccugcagccccggaccuuccugcugaaguacaacgagaacggcaccaucaccgacgccguggacugcgcccuggacccucugagcgagaccaagugcacccugaagagcuucaccguggagaagggcaucuaccagaccagcaacuuccgggugcagcccaccgagagcaucgugcgguuccccaacaucaccaaccugugccccuucggcgagguguucaacgccacccgguucgccagcguguacgccuggaaccggaagcggaucagcaacugcguggccgacuacagcgugcuguacaacagcgccagcuucagcaccuucaagugcuacggcgugagccccaccaagcugaacgaccugugcuucaccaacguguacgccgacagcuucgugauccguggcgacgaggugcggcagaucgcacccggccagacaggcaagaucgccgacuacaacuacaagcugcccgacgacuucaccggcugcgugaucgccuggaacagcaacaaccucgacagcaaggugggcggcaacuacaacuaccuguuccggcuguuccggaagagcaaccugaagcccuucgagcgggacaucagcaccgagaucuaccaagccggcuccaccccuugcaacggcguggagggcuucaacugcuacuucccucugcagagcuacggcuuccagcccaccaacggcgugggcuaccagcccuaccgggugguggugcugagcuucgagcugcugcacgccccagccaccguguguggccccaagaagagcaccaaccuggugaagaacaagugcgugaacuucaacuucaacggccuuaccggcaccggcgugcugaccgagagcaacaagaaauuccugcccuuucagcaguucggccgggacaucgccgacaccaccgacgcugugcgggauccccagacccuggagauccuggacaucaccccuugcagcuucggcggcgugagcgugaucaccccaggcaccaacaccagcaaccagguggccgugcuguaccagggcgugaacugcaccgaggugcccguggccauccacgccgaccagcugacacccaccuggcgggucuacagcaccggcagcaacguguuccagacccgggccgguugccugaucggcgccgagcacgugaacaacagcuacgagugcgacauccccaucggcgccggcaucugugccagcuaccagacccagaccaauucaccccggagggcaaggagcguggccagccagagcgugaucgccuacaccaugagccugggcgccgagaacagcguggccuacagcaacaacagcaucgccauccccaccaacuucaccaucagcgugaccaccgagauucugcccgugagcaugaccaagaccagcguggacugcaccauguacaucugcggcgacagcaccgagugcagcaaccugcugcugcaguacggcagcuucugcacccagcugaaccgggcccugaccggcaucgccguggagcaggacaagaacacccaggagguguucgcccaggugaagcagaucuacaagaccccucccaucaaggacuucggcggcuucaacuucagccagauccugcccgaccccagcaagcccagcaagcggagcuucaucgaggaccugcuguucaacaaggugacccuagccgacgccggcuucaucaagcaguacggcgacugccucggcgacauagccgcccgggaccugaucugcgcccagaaguucaacggccugaccgugcugccuccccugcugaccgacgagaugaucgcccaguacaccagcgcccuguuagccggaaccaucaccagcggcuggacuuucggcgcuggagccgcucugcagauccccuucgccaugcagauggccuaccgguucaacggcaucggcgugacccagaacgugcuguacgagaaccagaagcugaucgccaaccaguucaacagcgccaucggcaagauccaggacagccugagcagcaccgcuagcgcccugggcaagcugcaggacguggugaaccagaacgcccaggcccugaacacccuggugaagcagcugagcagcaacuucggcgccaucagcagcgugcugaacgacauccugagccggcuggacaaggucgaggccgaggugcagaucgaccggcugaucacuggccggcugcagagccugcagaccuacgugacccagcagcugauccgggccgccgagauucgggccagcgccaaccuggccgccaccaagaugagcgagugcgugcugggccagagcaagcggguggacuucugcggcaagggcuaccaccugaugagcuuuccccagagcgcaccccacggagugguguuccugcacgugaccuacgugcccgcccaggagaagaacuucaccaccgccccagccaucugccacgacggcaaggcccacuuuccccgggagggcguguucgugagcaacggcacccacugguucgugacccagcggaacuucuacgagccccagaucaucaccaccgacaacaccuucgugagcggcaacugcgacguggugaucggcaucgugaacaacaccguguacgauccccugcagcccgagcuggacagcuucaaggaggagcuggacaaguacuucaagaaucacaccagccccgacguggaccugggcgacaucagcggcaucaacgccagcguggugaacauccagaaggagaucgaucggcugaacgagguggccaagaaccugaacgagagccugaucgaccugcaggagcugggcaaguacgagcaguacaucaaguggcccugguacaucuggcugggcuucaucgccggccugaucgccaucgugaucgugaccaucaugcugugcugcaugaccagcugcugcagcugccugaagggcuguugcagcugcggcagcugcugcaaguucgacgaggacgacagcgagcccgugcugaagggcgugaagcugcacuacaccugaggacuaguuauaagacugacuagcccgaugggccucccaacgggcccuccuccccuccuugcaccgagauuaauagaucuaaaaaaaaaaaaaaaaaaaaaaaaaaaaaaaaaaaaaaaaaaaaaaaaaaaaaaaaaaaaaaaaaaaaaaaaaaaaaaaaaaaaaaaaaaaaaaaaaaaa

SEQ ID NO: 25657 - RNA, 4008 nt, Artificial Sequence
  SARS-CoV-2/Wuhan/WIV05/2019__EPI_ISL_402128 spike protein mRNA gc (1-1273)(H69del_V70del_Y144del_N501Y_A570D_D614G_P681H_T716I_S982 A_D1118H)
aggagaaagcuuaccauguucguguuccuggugcugcugccccuggugagcagccagugcgugaaccugaccacccggacccagcugccaccagccuacaccaacagcuucacccggggcgucuacuaccccgacaagguguuccggagcagcguccugcacagcacccaggaccuguuccugcccuucuucagcaacgugaccugguuccacgccaucagcggcaccaacggcaccaagcgguucgacaaccccgugcugcccuucaacgacggcguguacuucgccagcaccgagaagagcaacaucauccggggcuggaucuucggcaccacccuggacagcaagacccagagccugcugaucgugaauaacgccaccaacguggugaucaaggugugcgaguuccaguucugcaacgaccccuuccugggcguguaccacaagaacaacaagagcuggauggagagcgaguuccggguguacagcagcgccaacaacugcaccuucgaguacgugagccagcccuuccugauggaccuggagggcaagcagggcaacuucaagaaccugcgggaguucguguucaagaacaucgacggcuacuucaagaucuacagcaagcacaccccaaucaaccuggugcgggaucugccccagggcuucucagcccuggagccccugguggaccugcccaucggcaucaacaucacccgguuccagacccugcuggcccugcaccggagcuaccugaccccaggcgacagcagcagcggguggacagcaggcgcggcugcuuacuacgugggcuaccugcagccccggaccuuccugcugaaguacaacgagaacggcaccaucaccgacgccguggacugcgcccuggacccucugagcgagaccaagugcacccugaagagcuucaccguggagaagggcaucuaccagaccagcaacuuccgggugcagcccaccgagagcaucgugcgguuccccaacaucaccaaccugugccccuucggcgagguguucaacgccacccgguucgccagcguguacgccuggaaccggaagcggaucagcaacugcguggccgacuacagcgugcuguacaacagcgccagcuucagcaccuucaagugcuacggcgugagccccaccaagcugaacgaccugugcuucaccaacguguacgccgacagcuucgugauccguggcgacgaggugcggcagaucgcacccggccagacaggcaagaucgccgacuacaacuacaagcugcccgacgacuucaccggcugcgugaucgccuggaacagcaacaaccucgacagcaaggugggcggcaacuacaacuaccuguaccggcuguuccggaagagcaaccugaagcccuucgagcgggacaucagcaccgagaucuaccaagccggcuccaccccuugcaacggcguggagggcuucaacugcuacuucccucugcagagcuacggcuuccagcccaccuacggcgugggcuaccagcccuaccgggugguggugcugagcuucgagcugcugcacgccccagccaccguguguggccccaagaagagcaccaaccuggugaagaacaagugcgugaacuucaacuucaacggccuuaccggcaccggcgugcugaccgagagcaacaagaaauuccugcccuuucagcaguucggccgggacaucgacgacaccaccgacgcugugcgggauccccagacccuggagauccuggacaucaccccuugcagcuucggcggcgugagcgugaucaccccaggcaccaacaccagcaaccagguggccgugcuguaccagggcgugaacugcaccgaggugcccguggccauccacgccgaccagcugacacccaccuggcgggucuacagcaccggcagcaacguguuccagacccgggccgguugccugaucggcgccgagcacgugaacaacagcuacgagugcgacauccccaucggcgccggcaucugugccagcuaccagacccagaccaauucacaccggagggcaaggagcguggccagccagagcaucaucgccuacaccaugagccugggcgccgagaacagcguggccuacagcaacaacagcaucgccauccccaucaacuucaccaucagcgugaccaccgagauucugcccgugagcaugaccaagaccagcguggacugcaccauguacaucugcggcgacagcaccgagugcagcaaccugcugcugcaguacggcagcuucugcacccagcugaaccgggcccugaccggcaucgccguggagcaggacaagaacacccaggagguguucgcccaggugaagcagaucuacaagaccccucccaucaaggacuucggcggcuucaacuucagccagauccugcccgaccccagcaagcccagcaagcggagcuucaucgaggaccugcuguucaacaaggugacccuagccgacgccggcuucaucaagcaguacggcgacugccucggcgacauagccgcccgggaccugaucugcgcccagaaguucaacggccugaccgugcugccuccccugcugaccgacgagaugaucgcccaguacaccagcgcccuguuagccggaaccaucaccagcggcuggacuuucggcgcuggagccgcucugcagauccccuucgccaugcagauggccuaccgguucaacggcaucggcgugacccagaacgugcuguacgagaaccagaagcugaucgccaaccaguucaacagcgccaucggcaagauccaggacagccugagcagcaccgcuagcgcccugggcaagcugcaggacguggugaaccagaacgcccaggcccugaacacccuggugaagcagcugagcagcaacuucggcgccaucagcagcgugcugaacgacauccuggcccggcuggacaaggucgaggccgaggugcagaucgaccggcugaucacuggccggcugcagagccugcagaccuacgugacccagcagcugauccgggccgccgagauucgggccagcgccaaccuggccgccaccaagaugagcgagugcgugcugggccagagcaagcggguggacuucugcggcaagggcuaccaccugaugagcuuuccccagagcgcaccccacggagugguguuccugcacgugaccuacgugcccgcccaggagaagaacuucaccaccgccccagccaucugccacgacggcaaggcccacuuuccccgggagggcguguucgugagcaacggcacccacugguucgugacccagcggaacuucuacgagccccagaucaucaccacccacaacaccuucgugagcggcaacugcgacguggugaucggcaucgugaacaacaccguguacgauccccugcagcccgagcuggacagcuucaaggaggagcuggacaaguacuucaagaaucacaccagccccgacguggaccugggcgacaucagcggcaucaacgccagcguggugaacauccagaaggagaucgaucggcugaacgagguggccaagaaccugaacgagagccugaucgaccugcaggagcugggcaaguacgagcaguacaucaaguggcccugguacaucuggcugggcuucaucgccggccugaucgccaucgugauggugaccaucaugcugugcugcaugaccagcugcugcagcugccugaagggcuguugcagcugcggcagcugcugcaaguucgacgaggacgacagcgagcccgugcugaagggcgugaagcugcacuacaccugaggacuaguuauaagacugacuagcccgaugggccucccaacgggcccuccuccccuccuugcaccgagauuaauagaucuaaaaaaaaaaaaaaaaaaaaaaaaaaaaaaaaaaaaaaaaaaaaaaaaaaaaaaaaaaaaaaaaaaaaaaaaaaaaaaaaaaaaaaaaaaaaaaaaaaaa

SEQ ID NO: 25658 - RNA, 4017 nt, Artificial Sequence
  SARS-CoV-2/Wuhan/WIV05/2019__EPI_ISL_402128 spike protein mRNA gc (1-1273)(K417N_E484K_N501Y_D614G)
aggagaaagcuuaccauguucguguuccuggugcugcugccccuggugagcagccagugcgugaaccugaccacccggacccagcugccaccagccuacaccaacagcuucacccggggcgucuacuaccccgacaagguguuccggagcagcguccugcacagcacccaggaccuguuccugcccuucuucagcaacgugaccugguuccacgccauccacgugagcggcaccaacggcaccaagcgguucgacaaccccgugcugcccuucaacgacggcguguacuucgccagcaccgagaagagcaacaucauccggggcuggaucuucggcaccacccuggacagcaagacccagagccugcugaucgugaauaacgccaccaacguggugaucaaggugugcgaguuccaguucugcaacgaccccuuccugggcguguacuaccacaagaacaacaagagcuggauggagagcgaguuccggguguacagcagcgccaacaacugcaccuucgaguacgugagccagcccuuccugauggaccuggagggcaagcagggcaacuucaagaaccugcgggaguucguguucaagaacaucgacggcuacuucaagaucuacagcaagcacaccccaaucaaccuggugcgggaucugccccagggcuucucagcccuggagccccugguggaccugcccaucggcaucaacaucacccgguuccagacccugcuggcccugcaccggagcuaccugaccccaggcgacagcagcagcggguggacagcaggcgcggcugcuuacuacgugggcuaccugcagccccggaccuuccugcugaaguacaacgagaacggcaccaucaccgacgccguggacugcgcccuggacccucugagcgagaccaagugcacccugaagagcuucaccguggagaagggcaucuaccagaccagcaacuuccgggugcagcccaccgagagcaucgugcgguuccccaacaucaccaaccugugccccuucggcgagguguucaacgccacccgguucgccagcguguacgccuggaaccggaagcggaucagcaacugcguggccgacuacagcgugcuguacaacagcgccagcuucagcaccuucaagugcuacggcgugagccccaccaagcugaacgaccugugcuucaccaacguguacgccgacagcuucgugauccguggcgacgaggugcggcagaucgcacccggccagacaggcaacaucgccgacuacaacuacaagcugcccgacgacuucaccggcugcgugaucgccuggaacagcaacaaccucgacagcaaggugggcggcaacuacaacuaccuguaccggcuguuccggaagagcaaccugaagcccuucgagcgggacaucagcaccgagaucuaccaagccggcuccaccccuugcaacggcgugaagggcuucaacugcuacuucccucugcagagcuacggcuuccagcccaccuacggcgugggcuaccagcccuaccgggugguggugcugagcuucgagcugcugcacgccccagccaccguguguggccccaagaagagcaccaaccuggugaagaacaagugcgugaacuucaacuucaacggccuuaccggcaccggcgugcugaccgagagcaacaagaaauuccugcccuuucagcaguucggccgggacaucgccgacaccaccgacgcugugcgggauccccagacccuggagauccuggacaucaccccuugcagcuucggcggcgugagcgugaucaccccaggcaccaacaccagcaaccagguggccgugcuguaccagggcgugaacugcaccgaggugcccguggccauccacgccgaccagcugacacccaccuggcgggucuacagcaccggcagcaacguguuccagacccgggccgguugccugaucggcgccgagcacgugaacaacagcuacgagugcgacauccccaucggcgccggcaucugugccagcuaccagacccagaccaauucaccccggagggcaaggagcguggccagccagagcaucaucgccuacaccaugagccugggcgccgagaacagcguggccuacagcaacaacagcaucgccauccccaccaacuucaccaucagcgugaccaccgagauucugcccgugagcaugaccaagaccagcguggacugcaccauguacaucugcggcgacagcaccgagugcagcaaccugcugcugcaguacggcagcuucugcacccagcugaaccgggcccugaccggcaucgccguggagcaggacaagaacacccaggagguguucgcccaggugaagcagaucuacaagaccccucccaucaaggacuucggcggcuucaacuucagccagauccugcccgaccccagcaagcccagcaagcggagcuucaucgaggaccugcuguucaacaaggugacccuagccgacgccggcuucaucaagcaguacggcgacugccucggcgacauagccgcccgggaccugaucugcgcccagaaguucaacggccugaccgugcugccuccccugcugaccgacgagaugaucgcccaguacaccagcgcccuguuagccggaaccaucaccagcggcuggacuuucggcgcuggagccgcucugcagauccccuucgccaugcagauggccuaccgguucaacggcaucggcgugacccagaacgugcuguacgagaaccagaagcugaucgccaaccaguucaacagcgccaucggcaagauccaggacagccugagcagcaccgcuagcgcccugggcaagcugcaggacguggugaaccagaacgcccaggcccugaacacccuggugaagcagcugagcagcaacuucggcgccaucagcagcgugcugaacgacauccugagccggcuggacaaggucgaggccgaggugcagaucgaccggcugaucacuggccggcugcagagccugcagaccuacgugacccagcagcugauccgggccgccgagauucgggccagcgccaaccuggccgccaccaagaugagcgagugcgugcugggccagagcaagcggguggacuucugcggcaagggcuaccaccugaugagcuuuccccagagcgcaccccacggagugguguuccugcacgugaccuacgugcccgcccaggagaagaacuucaccaccgccccagccaucugccacgacggcaaggcccacuuuccccgggagggcguguucgugagcaacggcacccacugguucgugacccagcggaacuucuacgagccccagaucaucaccaccgacaacaccuucgugagcggcaacugcgacguggugaucggcaucgugaacaacaccguguacgauccccugcagcccgagcuggacagcuucaaggaggagcuggacaaguacuucaagaaucacaccagccccgacguggaccugggcgacaucagcggcaucaacgccagcguggugaacauccagaaggagaucgaucggcugaacgagguggccaagaaccugaacgagagccugaucgaccugcaggagcugggcaaguacgagcaguacaucaaguggcccugguacaucuggcugggcuucaucgccggccugaucgccaucgugauggugaccaucaugcugugcugcaugaccagcugcugcagcugccugaagggcuguugcagcugcggcagcugcugcaaguucgacgaggacgacagcgagcccgugcugaagggcgugaagcugcacuacaccugaggacuaguuauaagacugacuagcccgaugggccucccaacgggcccuccuccccuccuugcaccgagauuaauagaucuaaaaaaaaaaaaaaaaaaaaaaaaaaaaaaaaaaaaaaaaaaaaaaaaaaaaaaaaaaaaaaaaaaaaaaaaaaaaaaaaaaaaaaaaaaaaaaaaaaaa

SEQ ID NO: 25659 - RNA, 4008 nt, Artificial Sequence
  SARS-CoV-2/Wuhan/WIV05/2019__EPI_ISL_402128 spike protein mRNA gc (1-1273)(L18F_D80A_D215G_L242del_A243del_L244del_R246I_K417N_E484 K_N501Y_D614G_A701V)
aggagaaagcuuaccauguucguguuccuggugcugcugccccuggugagcagccagugcgugaacuucaccacccggacccagcugccaccagccuacaccaacagcuucacccggggcgucuacuaccccgacaagguguuccggagcagcguccugcacagcacccaggaccuguuccugcccuucuucagcaacgugaccugguuccacgccauccacgugagcggcaccaacggcaccaagcgguucgccaaccccgugcugcccuucaacgacggcguguacuucgccagcaccgagaagagcaacaucauccggggcuggaucuucggcaccacccuggacagcaagacccagagccugcugaucgugaauaacgccaccaacguggugaucaaggugugcgaguuccaguucugcaacgaccccuuccugggcguguacuaccacaagaacaacaagagcuggauggagagcgaguuccggguguacagcagcgccaacaacugcaccuucgaguacgugagccagcccuuccugauggaccuggagggcaagcagggcaacuucaagaaccugcgggaguucguguucaagaacaucgacggcuacuucaagaucuacagcaagcacaccccaaucaaccuggugcggggccugccccagggcuucucagcccuggagccccugguggaccugcccaucggcaucaacaucacccgguuccagacccugcacaucagcuaccugaccccaggcgacagcagcagcggguggacagcaggcgcggcugcuuacuacgugggcuaccugcagccccggaccuuccugcugaaguacaacgagaacggcaccaucaccgacgccguggacugcgcccuggacccucugagcgagaccaagugcacccugaagagcuucaccguggagaagggcaucuaccagaccagcaacuuccgggugcagcccaccgagagcaucgugcgguuccccaacaucaccaaccugugccccuucggcgagguguucaacgccacccgguucgccagcguguacgccuggaaccggaagcggaucagcaacugcguggccgacuacagcgugcuguacaacagcgccagcuucagcaccuucaagugcuacggcgugagccccaccaagcugaacgaccugugcuucaccaacguguacgccgacagcuucgugauccguggcgacgaggugcggcagaucgcacccggccagacaggcaacaucgccgacuacaacuacaagcugcccgacgacuucaccggcugcgugaucgccuggaacagcaacaaccucgacagcaaggugggcggcaacuacaacuaccuguaccggcuguuccggaagagcaaccugaagcccuucgagcgggacaucagcaccgagaucuaccaagccggcuccaccccuugcaacggcgugaagggcuucaacugcuacuucccucugcagagcuacggcuuccagcccaccuacggcgugggcuaccagcccuaccgggugguggugcugagcuucgagcugcugcacgccccagccaccguguguggccccaagaagagcaccaaccuggugaagaacaagugcgugaacuucaacuucaacggccuuaccggcaccggcgugcugaccgagagcaacaagaaauuccugcccuuucagcaguucggccgggacaucgccgacaccaccgacgcugugcgggauccccagacccuggagauccuggacaucaccccuugcagcuucggcggcgugagcgugaucaccccaggcaccaacaccagcaaccagguggccgugcuguaccagggcgugaacugcaccgaggugcccguggccauccacgccgaccagcugacacccaccuggcgggucuacagcaccggcagcaacguguuccagacccgggccgguugccugaucggcgccgagcacgugaacaacagcuacgagugcgacauccccaucggcgccggcaucugugccagcuaccagacccagaccaauucaccccggagggcaaggagcguggccagccagagcaucaucgccuacaccaugagccugggcguggagaacagcguggccuacagcaacaacagcaucgccauccccaccaacuucaccaucagcgugaccaccgagauucugcccgugagcaugaccaagaccagcguggacugcaccauguacaucugcggcgacagcaccgagugcagcaaccugcugcugcaguacggcagcuucugcacccagcugaaccgggcccugaccggcaucgccguggagcaggacaagaacacccaggagguguucgcccaggugaagcagaucuacaagaccccucccaucaaggacuucggcggcuucaacuucagccagauccugcccgaccccagcaagcccagcaagcggagcuucaucgaggaccugcuguucaacaaggugacccuagccgacgccggcuucaucaagcaguacggcgacugccucggcgacauagccgcccgggaccugaucugcgcccagaaguucaacggccugaccgugcugccuccccugcugaccgacgagaugaucgcccaguacaccagcgcccuguuagccggaaccaucaccagcggcuggacuuucggcgcuggagccgcucugcagauccccuucgccaugcagauggccuaccgguucaacggcaucggcgugacccagaacgugcuguacgagaaccagaagcugaucgccaaccaguucaacagcgccaucggcaagauccaggacagccugagcagcaccgcuagcgcccugggcaagcugcaggacguggugaaccagaacgcccaggcccugaacacccuggugaagcagcugagcagcaacuucggcgccaucagcagcgugcugaacgacauccugagccggcuggacaaggucgaggccgaggugcagaucgaccggcugaucacuggccggcugcagagccugcagaccuacgugacccagcagcugauccgggccgccgagauucgggccagcgccaaccuggccgccaccaagaugagcgagugcgugcugggccagagcaagcggguggacuucugcggcaagggcuaccaccugaugagcuuuccccagagcgcaccccacggagugguguuccugcacgugaccuacgugcccgcccaggagaagaacuucaccaccgccccagccaucugccacgacggcaaggcccacuuuccccgggagggcguguucgugagcaacggcacccacugguucgugacccagcggaacuucuacgagccccagaucaucaccaccgacaacaccuucgugagcggcaacugcgacguggugaucggcaucgugaacaacaccguguacgauccccugcagcccgagcuggacagcuucaaggaggagcuggacaaguacuucaagaaucacaccagccccgacguggaccugggcgacaucagcggcaucaacgccagcguggugaacauccagaaggagaucgaucggcugaacgagguggccaagaaccugaacgagagccugaucgaccugcaggagcugggcaaguacgagcaguacaucaaguggcccugguacaucuggcugggcuucaucgccggccugaucgccaucgugauggugaccaucaugcugugcugcaugaccagcugcugcagcugccugaagggcuguugcagcugcggcagcugcugcaaguucgacgaggacgacagcgagcccgugcugaagggcgugaagcugcacuacaccugaggacuaguuauaagacugacuagcccgaugggccucccaacgggcccuccuccccuccuugcaccgagauuaauagaucuaaaaaaaaaaaaaaaaaaaaaaaaaaaaaaaaaaaaaaaaaaaaaaaaaaaaaaaaaaaaaaaaaaaaaaaaaaaaaaaaaaaaaaaaaaaaaaaaaaaa

SEQ ID NO: 25660 - RNA, 4017 nt, Artificial Sequence
  SARS-CoV-2/Wuhan/WIV05/2019__EPI_ISL_402128 spike protein mRNA gc (1-1273)(E484K_D614G)
aggagaaagcuuaccauguucguguuccuggugcugcugccccuggugagcagccagugcgugaaccugaccacccggacccagcugccaccagccuacaccaacagcuucacccggggcgucuacuaccccgacaagguguuccggagcagcguccugcacagcacccaggaccuguuccugcccuucuucagcaacgugaccugguuccacgccauccacgugagcggcaccaacggcaccaagcgguucgacaaccccgugcugcccuucaacgacggcguguacuucgccagcaccgagaagagcaacaucauccggggcuggaucuucggcaccacccuggacagcaagacccagagccugcugaucgugaauaacgccaccaacguggugaucaaggugugcgaguuccaguucugcaacgaccccuuccugggcguguacuaccacaagaacaacaagagcuggauggagagcgaguuccggguguacagcagcgccaacaacugcaccuucgaguacgugagccagcccuuccugauggaccuggagggcaagcagggcaacuucaagaaccugcgggaguucguguucaagaacaucgacggcuacuucaagaucuacagcaagcacaccccaaucaaccuggugcgggaucugccccagggcuucucagcccuggagccccugguggaccugcccaucggcaucaacaucacccgguuccagacccugcuggcccugcaccggagcuaccugaccccaggcgacagcagcagcggguggacagcaggcgcggcugcuuacuacgugggcuaccugcagccccggaccuuccugcugaaguacaacgagaacggcaccaucaccgacgccguggacugcgcccuggacccucugagcgagaccaagugcacccugaagagcuucaccguggagaagggcaucuaccagaccagcaacuuccgggugcagcccaccgagagcaucgugcgguuccccaacaucaccaaccugugccccuucggcgagguguucaacgccacccgguucgccagcguguacgccuggaaccggaagcggaucagcaacugcguggccgacuacagcgugcuguacaacagcgccagcuucagcaccuucaagugcuacggcgugagccccaccaagcugaacgaccugugcuucaccaacguguacgccgacagcuucgugauccguggcgacgaggugcggcagaucgcacccggccagacaggcaagaucgccgacuacaacuacaagcugcccgacgacuucaccggcugcgugaucgccuggaacagcaacaaccucgacagcaaggugggcggcaacuacaacuaccuguaccggcuguuccggaagagcaaccugaagcccuucgagcgggacaucagcaccgagaucuaccaagccggcuccaccccuugcaacggcgugaagggcuucaacugcuacuucccucugcagagcuacggcuuccagcccaccaacggcgugggcuaccagcccuaccgggugguggugcugagcuucgagcugcugcacgccccagccaccguguguggccccaagaagagcaccaaccuggugaagaacaagugcgugaacuucaacuucaacggccuuaccggcaccggcgugcugaccgagagcaacaagaaauuccugcccuuucagcaguucggccgggacaucgccgacaccaccgacgcugugcgggauccccagacccuggagauccuggacaucaccccuugcagcuucggcggcgugagcgugaucaccccaggcaccaacaccagcaaccagguggccgugcuguaccagggcgugaacugcaccgaggugcccguggccauccacgccgaccagcugacacccaccuggcgggucuacagcaccggcagcaacguguuccagacccgggccgguugccugaucggcgccgagcacgugaacaacagcuacgagugcgacauccccaucggcgccggcaucugugccagcuaccagacccagaccaauucaccccggagggcaaggagcguggccagccagagcaucaucgccuacaccaugagccugggcgccgagaacagcguggccuacagcaacaacagcaucgccauccccaccaacuucaccaucagcgugaccaccgagauucugcccgugagcaugaccaagaccagcguggacugcaccauguacaucugcggcgacagcaccgagugcagcaaccugcugcugcaguacggcagcuucugcacccagcugaaccgggcccugaccggcaucgccguggagcaggacaagaacacccaggagguguucgcccaggugaagcagaucuacaagaccccucccaucaaggacuucggcggcuucaacuucagccagauccugcccgaccccagcaagcccagcaagcggagcuucaucgaggaccugcuguucaacaaggugacccuagccgacgccggcuucaucaagcaguacggcgacugccucggcgacauagccgcccgggaccugaucugcgcccagaaguucaacggccugaccgugcugccuccccugcugaccgacgagaugaucgcccaguacaccagcgcccuguuagccggaaccaucaccagcggcuggacuuucggcgcuggagccgcucugcagauccccuucgccaugcagauggccuaccgguucaacggcaucggcgugacccagaacgugcuguacgagaaccagaagcugaucgccaaccaguucaacagcgccaucggcaagauccaggacagccugagcagcaccgcuagcgcccugggcaagcugcaggacguggugaaccagaacgcccaggcccugaacacccuggugaagcagcugagcagcaacuucggcgccaucagcagcgugcugaacgacauccugagccggcuggacaaggucgaggccgaggugcagaucgaccggcugaucacuggccggcugcagagccugcagaccuacgugacccagcagcugauccgggccgccgagauucgggccagcgccaaccuggccgccaccaagaugagcgagugcgugcugggccagagcaagcggguggacuucugcggcaagggcuaccaccugaugagcuuuccccagagcgcaccccacggagugguguuccugcacgugaccuacgugcccgcccaggagaagaacuucaccaccgccccagccaucugccacgacggcaaggcccacuuuccccgggagggcguguucgugagcaacggcacccacugguucgugacccagcggaacuucuacgagccccagaucaucaccaccgacaacaccuucgugagcggcaacugcgacguggugaucggcaucgugaacaacaccguguacgauccccugcagcccgagcuggacagcuucaaggaggagcuggacaaguacuucaagaaucacaccagccccgacguggaccugggcgacaucagcggcaucaacgccagcguggugaacauccagaaggagaucgaucggcugaacgagguggccaagaaccugaacgagagccugaucgaccugcaggagcugggcaaguacgagcaguacaucaaguggcccugguacaucuggcugggcuucaucgccggccugaucgccaucgugauggugaccaucaugcugugcugcaugaccagcugcugcagcugccugaagggcuguugcagcugcggcagcugcugcaaguucgacgaggacgacagcgagcccgugcugaagggcgugaagcugcacuacaccugaggacuaguuauaagacugacuagcccgaugggccucccaacgggcccuccuccccuccuugcaccgagauuaauagaucuaaaaaaaaaaaaaaaaaaaaaaaaaaaaaaaaaaaaaaaaaaaaaaaaaaaaaaaaaaaaaaaaaaaaaaaaaaaaaaaaaaaaaaaaaaaaaaaaaaaa

SEQ ID NO: 25661 - RNA, 4017 nt, Artificial Sequence
  SARS-CoV-2/Wuhan/WIV05/2019__EPI_ISL_402128 spike protein mRNA gc (1-1273)(L18F_T20N_P26S_D138Y_R190S_K417T_E484K_N501Y_D614G_H655Y _T1027I)
aggagaaagcuuaccauguucguguuccuggugcugcugccccuggugagcagccagugcgugaacuucaccaaccggacccagcugccaagcgccuacaccaacagcuucacccggggcgucuacuaccccgacaagguguuccggagcagcguccugcacagcacccaggaccuguuccugcccuucuucagcaacgugaccugguuccacgccauccacgugagcggcaccaacggcaccaagcgguucgacaaccccgugcugcccuucaacgacggcguguacuucgccagcaccgagaagagcaacaucauccggggcuggaucuucggcaccacccuggacagcaagacccagagccugcugaucgugaauaacgccaccaacguggugaucaaggugugcgaguuccaguucugcaacuaccccuuccugggcguguacuaccacaagaacaacaagagcuggauggagagcgaguuccggguguacagcagcgccaacaacugcaccuucgaguacgugagccagcccuuccugauggaccuggagggcaagcagggcaacuucaagaaccugagcgaguucguguucaagaacaucgacggcuacuucaagaucuacagcaagcacaccccaaucaaccuggugcgggaucugccccagggcuucucagcccuggagccccugguggaccugcccaucggcaucaacaucacccgguuccagacccugcuggcccugcaccggagcuaccugaccccaggcgacagcagcagcggguggacagcaggcgcggcugcuuacuacgugggcuaccugcagccccggaccuuccugcugaaguacaacgagaacggcaccaucaccgacgccguggacugcgcccuggacccucugagcgagaccaagugcacccugaagagcuucaccguggagaagggcaucuaccagaccagcaacuuccgggugcagcccaccgagagcaucgugcgguuccccaacaucaccaaccugugccccuucggcgagguguucaacgccacccgguucgccagcguguacgccuggaaccggaagcggaucagcaacugcguggccgacuacagcgugcuguacaacagcgccagcuucagcaccuucaagugcuacggcgugagccccaccaagcugaacgaccugugcuucaccaacguguacgccgacagcuucgugauccguggcgacgaggugcggcagaucgcacccggccagacaggcaccaucgccgacuacaacuacaagcugcccgacgacuucaccggcugcgugaucgccuggaacagcaacaaccucgacagcaaggugggcggcaacuacaacuaccuguaccggcuguuccggaagagcaaccugaagcccuucgagcgggacaucagcaccgagaucuaccaagccggcuccaccccuugcaacggcgugaagggcuucaacugcuacuucccucugcagagcuacggcuuccagcccaccuacggcgugggcuaccagcccuaccgggugguggugcugagcuucgagcugcugcacgccccagccaccguguguggccccaagaagagcaccaaccuggugaagaacaagugcgugaacuucaacuucaacggccuuaccggcaccggcgugcugaccgagagcaacaagaaauuccugcccuuucagcaguucggccgggacaucgccgacaccaccgacgcugugcgggauccccagacccuggagauccuggacaucaccccuugcagcuucggcggcgugagcgugaucaccccaggcaccaacaccagcaaccagguggccgugcuguaccagggcgugaacugcaccgaggugcccguggccauccacgccgaccagcugacacccaccuggcgggucuacagcaccggcagcaacguguuccagacccgggccgguugccugaucggcgccgaguacgugaacaacagcuacgagugcgacauccccaucggcgccggcaucugugccagcuaccagacccagaccaauucaccccggagggcaaggagcguggccagccagagcaucaucgccuacaccaugagccugggcgccgagaacagcguggccuacagcaacaacagcaucgccauccccaccaacuucaccaucagcgugaccaccgagauucugcccgugagcaugaccaagaccagcguggacugcaccauguacaucugcggcgacagcaccgagugcagcaaccugcugcugcaguacggcagcuucugcacccagcugaaccgggcccugaccggcaucgccguggagcaggacaagaacacccaggagguguucgcccaggugaagcagaucuacaagaccccucccaucaaggacuucggcggcuucaacuucagccagauccugcccgaccccagcaagcccagcaagcggagcuucaucgaggaccugcuguucaacaaggugacccuagccgacgccggcuucaucaagcaguacggcgacugccucggcgacauagccgcccgggaccugaucugcgcccagaaguucaacggccugaccgugcugccuccccugcugaccgacgagaugaucgcccaguacaccagcgcccuguuagccggaaccaucaccagcggcuggacuuucggcgcuggagccgcucugcagauccccuucgccaugcagauggccuaccgguucaacggcaucggcgugacccagaacgugcuguacgagaaccagaagcugaucgccaaccaguucaacagcgccaucggcaagauccaggacagccugagcagcaccgcuagcgcccugggcaagcugcaggacguggugaaccagaacgcccaggcccugaacacccuggugaagcagcugagcagcaacuucggcgccaucagcagcgugcugaacgacauccugagccggcuggacaaggucgaggccgaggugcagaucgaccggcugaucacuggccggcugcagagccugcagaccuacgugacccagcagcugauccgggccgccgagauucgggccagcgccaaccuggccgccaucaagaugagcgagugcgugcugggccagagcaagcggguggacuucugcggcaagggcuaccaccugaugagcuuuccccagagcgcaccccacggagugguguuccugcacgugaccuacgugcccgcccaggagaagaacuucaccaccgccccagccaucugccacgacggcaaggcccacuuuccccgggagggcguguucgugagcaacggcacccacugguucgugacccagcggaacuucuacgagccccagaucaucaccaccgacaacaccuucgugagcggcaacugcgacguggugaucggcaucgugaacaacaccguguacgauccccugcagcccgagcuggacagcuucaaggaggagcuggacaaguacuucaagaaucacaccagccccgacguggaccugggcgacaucagcggcaucaacgccagcguggugaacauccagaaggagaucgaucggcugaacgagguggccaagaaccugaacgagagccugaucgaccugcaggagcugggcaaguacgagcaguacaucaaguggcccugguacaucuggcugggcuucaucgccggccugaucgccaucgugauggugaccaucaugcugugcugcaugaccagcugcugcagcugccugaagggcuguugcagcugcggcagcugcugcaaguucgacgaggacgacagcgagcccgugcugaagggcgugaagcugcacuacaccugaggacuaguuauaagacugacuagcccgaugggccucccaacgggcccuccuccccuccuugcaccgagauuaauagaucuaaaaaaaaaaaaaaaaaaaaaaaaaaaaaaaaaaaaaaaaaaaaaaaaaaaaaaaaaaaaaaaaaaaaaaaaaaaaaaaaaaaaaaaaaaaaaaaaaaaa

SEQ ID NO: 25662 - RNA, 4017 nt, Artificial Sequence
  SARS-CoV-2/Wuhan/WIV05/2019__EPI_ISL_402128 spike protein mRNA gc (1-1273)(S13I_W152C_L452R_D614G)
aggagaaagcuuaccauguucguguuccuggugcugcugccccuggugagcauccagugcgugaaccugaccacccggacccagcugccaccagccuacaccaacagcuucacccggggcgucuacuaccccgacaagguguuccggagcagcguccugcacagcacccaggaccuguuccugcccuucuucagcaacgugaccugguuccacgccauccacgugagcggcaccaacggcaccaagcgguucgacaaccccgugcugcccuucaacgacggcguguacuucgccagcaccgagaagagcaacaucauccggggcuggaucuucggcaccacccuggacagcaagacccagagccugcugaucgugaauaacgccaccaacguggugaucaaggugugcgaguuccaguucugcaacgaccccuuccugggcguguacuaccacaagaacaacaagagcugcauggagagcgaguuccggguguacagcagcgccaacaacugcaccuucgaguacgugagccagcccuuccugauggaccuggagggcaagcagggcaacuucaagaaccugcgggaguucguguucaagaacaucgacggcuacuucaagaucuacagcaagcacaccccaaucaaccuggugcgggaucugccccagggcuucucagcccuggagccccugguggaccugcccaucggcaucaacaucacccgguuccagacccugcuggcccugcaccggagcuaccugaccccaggcgacagcagcagcggguggacagcaggcgcggcugcuuacuacgugggcuaccugcagccccggaccuuccugcugaaguacaacgagaacggcaccaucaccgacgccguggacugcgcccuggacccucugagcgagaccaagugcacccugaagagcuucaccguggagaagggcaucuaccagaccagcaacuuccgggugcagcccaccgagagcaucgugcgguuccccaacaucaccaaccugugccccuucggcgagguguucaacgccacccgguucgccagcguguacgccuggaaccggaagcggaucagcaacugcguggccgacuacagcgugcuguacaacagcgccagcuucagcaccuucaagugcuacggcgugagccccaccaagcugaacgaccugugcuucaccaacguguacgccgacagcuucgugauccguggcgacgaggugcggcagaucgcacccggccagacaggcaagaucgccgacuacaacuacaagcugcccgacgacuucaccggcugcgugaucgccuggaacagcaacaaccucgacagcaaggugggcggcaacuacaacuaccgcuaccggcuguuccggaagagcaaccugaagcccuucgagcgggacaucagcaccgagaucuaccaagccggcuccaccccuugcaacggcguggagggcuucaacugcuacuucccucugcagagcuacggcuuccagcccaccaacggcgugggcuaccagcccuaccgggugguggugcugagcuucgagcugcugcacgccccagccaccguguguggccccaagaagagcaccaaccuggugaagaacaagugcgugaacuucaacuucaacggccuuaccggcaccggcgugcugaccgagagcaacaagaaauuccugcccuuucagcaguucggccgggacaucgccgacaccaccgacgcugugcgggauccccagacccuggagauccuggacaucaccccuugcagcuucggcggcgugagcgugaucaccccaggcaccaacaccagcaaccagguggccgugcuguaccagggcgugaacugcaccgaggugcccguggccauccacgccgaccagcugacacccaccuggcgggucuacagcaccggcagcaacguguuccagacccgggccgguugccugaucggcgccgagcacgugaacaacagcuacgagugcgacauccccaucggcgccggcaucugugccagcuaccagacccagaccaauucaccccggagggcaaggagcguggccagccagagcaucaucgccuacaccaugagccugggcgccgagaacagcguggccuacagcaacaacagcaucgccauccccaccaacuucaccaucagcgugaccaccgagauucugcccgugagcaugaccaagaccagcguggacugcaccauguacaucugcggcgacagcaccgagugcagcaaccugcugcugcaguacggcagcuucugcacccagcugaaccgggcccugaccggcaucgccguggagcaggacaagaacacccaggagguguucgcccaggugaagcagaucuacaagaccccucccaucaaggacuucggcggcuucaacuucagccagauccugcccgaccccagcaagcccagcaagcggagcuucaucgaggaccugcuguucaacaaggugacccuagccgacgccggcuucaucaagcaguacggcgacugccucggcgacauagccgcccgggaccugaucugcgcccagaaguucaacggccugaccgugcugccuccccugcugaccgacgagaugaucgcccaguacaccagcgcccuguuagccggaaccaucaccagcggcuggacuuucggcgcuggagccgcucugcagauccccuucgccaugcagauggccuaccgguucaacggcaucggcgugacccagaacgugcuguacgagaaccagaagcugaucgccaaccaguucaacagcgccaucggcaagauccaggacagccugagcagcaccgcuagcgcccugggcaagcugcaggacguggugaaccagaacgcccaggcccugaacacccuggugaagcagcugagcagcaacuucggcgccaucagcagcgugcugaacgacauccugagccggcuggacaaggucgaggccgaggugcagaucgaccggcugaucacuggccggcugcagagccugcagaccuacgugacccagcagcugauccgggccgccgagauucgggccagcgccaaccuggccgccaccaagaugagcgagugcgugcugggccagagcaagcggguggacuucugcggcaagggcuaccaccugaugagcuuuccccagagcgcaccccacggagugguguuccugcacgugaccuacgugcccgcccaggagaagaacuucaccaccgccccagccaucugccacgacggcaaggcccacuuuccccgggagggcguguucgugagcaacggcacccacugguucgugacccagcggaacuucuacgagccccagaucaucaccaccgacaacaccuucgugagcggcaacugcgacguggugaucggcaucgugaacaacaccguguacgauccccugcagcccgagcuggacagcuucaaggaggagcuggacaaguacuucaagaaucacaccagccccgacguggaccugggcgacaucagcggcaucaacgccagcguggugaacauccagaaggagaucgaucggcugaacgagguggccaagaaccugaacgagagccugaucgaccugcaggagcugggcaaguacgagcaguacaucaaguggcccugguacaucuggcugggcuucaucgccggccugaucgccaucgugauggugaccaucaugcugugcugcaugaccagcugcugcagcugccugaagggcuguugcagcugcggcagcugcugcaaguucgacgaggacgacagcgagcccgugcugaagggcgugaagcugcacuacaccugaggacuaguuauaagacugacuagcccgaugggccucccaacgggcccuccuccccuccuugcaccgagauuaauagaucuaaaaaaaaaaaaaaaaaaaaaaaaaaaaaaaaaaaaaaaaaaaaaaaaaaaaaaaaaaaaaaaaaaaaaaaaaaaaaaaaaaaaaaaaaaaaaaaaaaaa

SEQ ID NO: 25663 - RNA, 4017 nt, Artificial Sequence
  SARS-CoV-2/Wuhan/WIV05/2019__EPI_ISL_402128 spike protein mRNA gc (1-1273)
aggagaaagcuuaccauguucguguuccuggugcugcugccccuggugagcagccagugcgugaaccugaccacccggacccagcugcccccugccuacaccaacagcuucacccggggcguguacuaccccgacaagguguuccggagcagcgugcugcacagcacccaggaccuguuccugcccuucuucagcaacgugaccugguuccacgccauccacgugagcggcaccaacggcaccaagcgguucgacaacccagugcugcccuucaacgacggcguguacuucgccagcaccgagaagucaaacaucauccggggcuggaucuucggcaccacccuggacagcaagacacagagccugcugaucgugaacaacgccaccaacguggugaucaaggugugcgaguuucaguucugcaacgaccccuuccugggcguguacuaccacaagaacaacaagagcuggauggagagcgaguuccgggucuacagcagcgcuaacaauugcaccuucgaguacgugagccagcccuuccugauggaccucgagggcaagcagggcaacuucaagaaccugcgggaguucguguucaagaacaucgauggcuacuucaagaucuacagcaagcacacccccaucaaccuggugcgggaccugccccagggauucagcgcccuggagccucugguggaccugcccaucggcaucaacaucaccagguuccagacccugcuggcccugcaccggagcuaccugacccccggcgacagcagcagcggcuggaccgccggcgccgccgcauacuacgugggcuaccugcagccacggaccuuccugcugaaguacaacgagaacggcaccaucaccgacgccguggacugcgcccuggacccccugagcgagaccaagugcacccuaaagagcuucaccguggagaagggcaucuaccagaccagcaacuuccgggugcagcccacugagagcaucgugcgguuccccaacauuaccaaccugugucccuucggcgagguguucaacgccacccgguucgccagcguguacgccuggaaccggaagcggaucagcaacugcguggccgacuacagcgugcuguacaacagcgccagcuucagcaccuucaagugcuacggcgugagcccuaccaagcugaacgaccugugcuucaccaacguguacgcugacagcuucgugauccggggcgacgaggugcggcagaucgcccccggccagaccggcaagaucgccgacuacaacuacaagcugcccgacgacuucaccggcugcgugaucgccuggaacagcaacaaccuggacagcaaggugggcggcaacuacaacuaccuguaccggcuguuccguaagagcaaccugaagccauucgagcgggacaucagcaccgagaucuaccaggccggcagcacccccugcaacgguguggagggcuuuaacugcuacuucccccugcagagcuacggcuuccagcccaccaacggcgugggcuaccagcccuaccgggugguggugcugagcuucgagcugcugcacgcccccgccaccgugugcggcccuaaaaagagcaccaaccuggugaagaacaagugcgugaacuucaauuucaacggccugaccggcaccggcgugcugaccgagagcaacaagaaguuccugcccuuccagcaguucggccgggauaucgccgacaccaccgacgcagugcgggacccccagacccuggagauccuggacaucaccccaugcagcuucggcggcgugagcgucaucacccccggcacaaacaccagcaaccagguggccgugcuguaccaggacgugaacugcaccgaggugcccguggccauccacgccgaccagcugacccccaccuggcggguguacagcaccggaagcaacguguuccagacccgggccggcugccugaucggcgccgagcacgugaacaacuccuacgagugcgacauccccaucggcgcuggcaucugcgccagcuaccagacccagaccaacagcccccggcgggcccggagcguggccagccagagcaucaucgccuacaccaugagcuuaggcgccgagaacagcguggccuacagcaacaacagcaucgcgaucccuaccaacuucaccaucagcgugaccaccgagauacugcccgugagcaugaccaagaccagcguggacuguaccauguacaucugcggcgacagcaccgagugcagcaaccugcugcugcaguacggcagcuucugcacccagcugaaccgggcccugaccggcaucgccguggagcaggacaagaacacccaagagguguucgcccaggugaagcagaucuacaagacucccccaaucaaggacuucggcggcuucaacuucagccagauccugcccgaccccagcaagcccagcaagcggagcuucaucgaggaccugcuguucaacaaggugacccuggccgacgccggcuucaucaagcaguacggcgauugccugggcgacaucgccgcucgggaccugaucugcgcccagaaguucaacgggcugaccgugcugcccccucugcugaccgacgagaugaucgcccaguacaccagcgcccugcuugccggcaccaucaccagcggcuggaccuucggcgccggcgcagcccugcagauccccuucgccaugcagauggccuaccgguucaacggcaucggcgugacccagaacgugcuguacgagaaccagaagcugaucgccaaccaguucaacagcgccaucggcaagauccaggacagccugagcagcaccgccagcgcccugggcaagcugcaggacguggugaaccagaacgcucaggcccugaacacccuggugaagcagcugagcagcaacuucggcgccaucagcucagugcugaaugacauccugagcaggcuggacaagguggaggccgaggugcagaucgaccggcugaucaccggccggcugcagagccugcagaccuacgugacccagcagcugauccgggccgccgagauccgggccagcgccaaccuggcagccaccaagaugagcgagugcgugcugggccagagcaagcggguggacuuuugcggcaagggcuaccaccugaugagcuucccccagagcgccccacacggcgugguguuccuccacgucacauacgugcccgcccaggagaagaacuucaccaccgcccccgccauuugccacgacggcaaggcucacuucccccgggagggcguguucgugagcaacggaacccacugguucgugacccagcggaacuucuacgagccccagaucaucaccaccgacaacaccuucgugagcggcaacugcgacguggugaucggcaucgugaacaacaccguguacgacccccugcagccugagcuggacagcuucaaggaggagcuggacaaguacuucaagaaccacaccagccccgauguggaccugggcgacaucagcggcaucaacgccagcguggugaacauccagaaggagaucgaccggcugaacgagguggccaagaaccugaacgagagccugaucgaccugcaggagcugggcaaguacgagcaguacaucaaguggcccugguacaucuggcugggcuucaucgccggccugaucgccaucgugauggugaccaucaugcugugcugcaugaccagcugcuguagcugccugaagggcugcugcagcugcggcagcugcugcaaguucgacgaggacgacagcgagccagugcugaagggcgugaagcugcacuacaccugaggacuaguuauaagacugacuagcccgaugggccucccaacgggcccuccuccccuccuugcaccgagauuaauagaucuaaaaaaaaaaaaaaaaaaaaaaaaaaaaaaaaaaaaaaaaaaaaaaaaaaaaaaaaaaaaaaaaaaaaaaaaaaaaaaaaaaaaaaaaaaaaaaaaaaaa

SEQ ID NO: 25664 - RNA, 4017 nt, Artificial Sequence
  SARS-CoV-2/Wuhan/WIV05/2019__EPI_ISL_402128 spike protein mRNA gc (1-1273)(D614G)
aggagaaagcuuaccauguucguguuccuggugcugcugccccuggugagcagccagugcgugaaccugaccacccggacccagcugcccccugccuacaccaacagcuucacccggggcguguacuaccccgacaagguguuccggagcagcgugcugcacagcacccaggaccuguuccugcccuucuucagcaacgugaccugguuccacgccauccacgugagcggcaccaacggcaccaagcgguucgacaacccagugcugcccuucaacgacggcguguacuucgccagcaccgagaagucaaacaucauccggggcuggaucuucggcaccacccuggacagcaagacacagagccugcugaucgugaacaacgccaccaacguggugaucaaggugugcgaguuucaguucugcaacgaccccuuccugggcguguacuaccacaagaacaacaagagcuggauggagagcgaguuccgggucuacagcagcgcuaacaauugcaccuucgaguacgugagccagcccuuccugauggaccucgagggcaagcagggcaacuucaagaaccugcgggaguucguguucaagaacaucgauggcuacuucaagaucuacagcaagcacacccccaucaaccuggugcgggaccugccccagggauucagcgcccuggagccucugguggaccugcccaucggcaucaacaucaccagguuccagacccugcuggcccugcaccggagcuaccugacccccggcgacagcagcagcggcuggaccgccggcgccgccgcauacuacgugggcuaccugcagccacggaccuuccugcugaaguacaacgagaacggcaccaucaccgacgccguggacugcgcccuggacccccugagcgagaccaagugcacccuaaagagcuucaccguggagaagggcaucuaccagaccagcaacuuccgggugcagcccacugagagcaucgugcgguuccccaacauuaccaaccugugucccuucggcgagguguucaacgccacccgguucgccagcguguacgccuggaaccggaagcggaucagcaacugcguggccgacuacagcgugcuguacaacagcgccagcuucagcaccuucaagugcuacggcgugagcccuaccaagcugaacgaccugugcuucaccaacguguacgcugacagcuucgugauccggggcgacgaggugcggcagaucgcccccggccagaccggcaagaucgccgacuacaacuacaagcugcccgacgacuucaccggcugcgugaucgccuggaacagcaacaaccuggacagcaaggugggcggcaacuacaacuaccuguaccggcuguuccguaagagcaaccugaagccauucgagcgggacaucagcaccgagaucuaccaggccggcagcacccccugcaacgguguggagggcuuuaacugcuacuucccccugcagagcuacggcuuccagcccaccaacggcgugggcuaccagcccuaccgggugguggugcugagcuucgagcugcugcacgcccccgccaccgugugcggcccuaaaaagagcaccaaccuggugaagaacaagugcgugaacuucaauuucaacggccugaccggcaccggcgugcugaccgagagcaacaagaaguuccugcccuuccagcaguucggccgggauaucgccgacaccaccgacgcagugcgggacccccagacccuggagauccuggacaucaccccaugcagcuucggcggcgugagcgucaucacccccggcacaaacaccagcaaccagguggccgugcuguaccagggagugaacugcaccgaggugcccguggccauccacgccgaccagcugacccccaccuggcggguguacagcaccggcagcaacguguuccagacccgggccggcugccugaucggcgccgagcacgugaacaacuccuacgagugcgacauccccaucggcgcuggcaucugcgccagcuaccagacccagaccaacagcccccggcgggcccggagcguggccagccagagcaucaucgccuacaccaugagcuuaggcgccgagaacagcguggccuacagcaacaacagcaucgcgaucccuaccaacuucaccaucagcgugaccaccgagauacugcccgugagcaugaccaagaccagcguggacuguaccauguacaucugcggcgacagcaccgagugcagcaaccugcugcugcaguacggcagcuucugcacccagcugaaccgggcccugaccggcaucgccguggagcaggacaagaacacccaagagguguucgcccaggugaagcagaucuacaagacucccccaaucaaggacuucggcggcuucaacuucagccagauccugcccgaccccagcaagcccagcaagcggagcuucaucgaggaccugcuguucaacaaggugacccuggccgacgccggcuucaucaagcaguacggcgacugccugggggauaucgccgcucgggaccugaucugcgcccagaaguucaacggccugaccgugcugcccccucugcugaccgacgagaugaucgcccaguacaccagcgcccugcuugccggcaccaucaccagcggcuggaccuucggcgccggcgcagcccugcagauccccuucgccaugcagauggccuaccgguucaacggcaucggcgugacccagaacgugcuguacgagaaccagaagcugaucgccaaccaguucaacagcgccaucggcaagauccaggacagccugagcagcaccgccagcgcccugggcaagcugcaggacguggugaaccagaacgcucaggcccugaacacccuggugaagcagcugagcagcaacuucggcgccaucagcucagugcugaaugacauccugagcaggcuggacaagguggaggccgaggugcagaucgaccggcugaucaccggccggcugcagagccugcagaccuacgugacccagcagcugauccgggccgccgagauccgggccagcgccaaccuggcagccaccaagaugagcgagugcgugcugggccagagcaagcggguggacuuuugcggcaagggcuaccaccugaugagcuucccccagagcgccccacacggcgugguguuccuccacgucacauacgugcccgcccaggagaagaacuucaccaccgcccccgccauuugccacgacggcaaggcucacuucccccgggagggaguguucgugagcaacggcacccacugguucgugacccagcggaacuucuacgagccccagaucaucaccaccgacaacaccuucgugagcggcaacugcgacguggugaucggcaucgugaacaacaccguguacgacccccugcagccugagcuggacagcuucaaggaggagcuggacaaguacuucaagaaccacaccagccccgacguggaucugggcgacaucagcggcaucaacgccagcguggugaacauccagaaggagaucgaccggcugaacgagguggccaagaaccugaacgagagccugaucgaccugcaggagcugggcaaguacgagcaguacaucaaguggcccugguacaucuggcugggcuucaucgccggccugaucgccaucgugauggugaccaucaugcugugcugcaugaccagcugcuguagcugccugaagggcugcugcagcugcggcagcugcugcaaguucgacgaggacgacagcgagccagugcugaagggcgugaagcugcacuacaccugaggacuaguuauaagacugacuagcccgaugggccucccaacgggcccuccuccccuccuugcaccgagauuaauagaucuaaaaaaaaaaaaaaaaaaaaaaaaaaaaaaaaaaaaaaaaaaaaaaaaaaaaaaaaaaaaaaaaaaaaaaaaaaaaaaaaaaaaaaaaaaaaaaaaaaaa

SEQ ID NO: 25665 - RNA, 4017 nt, Artificial Sequence
  SARS-CoV-2/Wuhan/WIV05/2019__EPI_ISL_402128 spike protein mRNA gc (1-1273)(A222V_D614G)
aggagaaagcuuaccauguucguguuccuggugcugcugccccuggugagcagccagugcgugaaccugaccacccggacccagcugcccccugccuacaccaacagcuucacccggggcguguacuaccccgacaagguguuccggagcagcgugcugcacagcacccaggaccuguuccugcccuucuucagcaacgugaccugguuccacgccauccacgugagcggcaccaacggcaccaagcgguucgacaacccagugcugcccuucaacgacggcguguacuucgccagcaccgagaagucaaacaucauccggggcuggaucuucggcaccacccuggacagcaagacacagagccugcugaucgugaacaacgccaccaacguggugaucaaggugugcgaguuucaguucugcaacgaccccuuccugggcguguacuaccacaagaacaacaagagcuggauggagagcgaguuccgggucuacagcagcgcuaacaauugcaccuucgaguacgugagccagcccuuccugauggaccucgagggcaagcagggcaacuucaagaaccugcgggaguucguguucaagaacaucgauggcuacuucaagaucuacagcaagcacacccccaucaaccuggugcgggaccugccccagggauucagcgugcuggagccucugguggaccugcccaucggcaucaacaucaccagguuccagacccugcuggcccugcaccggagcuaccugacccccggcgacagcagcagcggcuggaccgccggcgccgccgccuacuacgugggcuaccugcagccacggaccuuccugcugaaguacaacgagaacggcaccaucaccgacgcaguggacugcgcccuggacccccugagcgagaccaagugcacccuaaagagcuucaccguggagaagggcaucuaccagaccagcaacuuccgggugcagcccacugagagcaucgugcgguuccccaacauuaccaaccugugucccuucggcgagguguucaacgccacccgguucgccagcguguacgccuggaaccggaagcggaucagcaacugcguggccgacuacagcgugcuguacaacagcgccagcuucagcaccuucaagugcuacggcgugagcccuaccaagcugaacgaccugugcuucaccaacguguacgccgacagcuucgugauccggggcgacgaggugcggcagaucgcucccggccagaccggcaagaucgccgacuacaacuacaagcugcccgacgacuucaccggcugcgugaucgccuggaacagcaacaaccuggacagcaaggugggcggcaacuacaacuaccuguaccggcuguuccguaagagcaaccugaagccauucgagcgggacaucagcaccgagaucuaccaggccggcagcacccccugcaacgguguggagggcuuuaacugcuacuucccccugcagagcuacggcuuccagcccaccaacggcgugggcuaccagcccuaccgggugguggugcugagcuucgagcugcugcacgcccccgccaccgugugcggcccuaaaaagagcaccaaccuggugaagaacaagugcgugaacuucaauuucaacggccugaccggcaccggcgugcugaccgagagcaacaagaaguuccugcccuuccagcaguucggccgggauaucgccgacaccaccgacgccgugcgggacccccagacccuggagauccuggacaucaccccaugcagcuucggcggcgucagcgugaucacccccggcacaaacaccagcaaccagguggcagugcuguaccagggagugaacugcaccgaggugcccguggccauccacgccgaccagcugacccccaccuggcggguguacagcaccggcagcaacguguuccagacccgggccggcugccugaucggcgccgagcacgugaacaacuccuacgagugcgacauccccaucggcgccggcaucugcgcuagcuaccagacccagaccaacagcccccggcgggcccggagcguggccagccagagcaucaucgccuacaccaugagcuuaggcgccgagaacagcguggccuacagcaacaacagcaucgccaucccuaccaacuucaccaucagcgugaccaccgagauacugcccgugagcaugaccaagaccagcguggacuguaccauguacaucugcggcgacagcaccgagugcagcaaccugcugcugcaguacggcagcuucugcacccagcugaaccgggcgcugaccggcaucgccguggagcaggacaagaacacccaagagguguucgcccaggugaagcagaucuacaagacucccccaaucaaggacuucggcggcuucaacuucagccagauccugcccgaccccagcaagcccagcaagcggagcuucaucgaggaccugcuguucaacaaggugacccuggccgacgccggcuucaucaagcaguacggcgacugccugggggauaucgccgcccgggaccugaucugcgcucagaaguucaacggccugaccgugcugcccccucugcugaccgacgagaugaucgcccaguacaccagcgcccugcuugccggcaccaucaccagcggcuggaccuucggcgccggcgccgcacugcagauccccuucgccaugcagauggccuaccgguucaacggcaucggcgugacccagaacgugcuguacgagaaccagaagcugaucgccaaccaguucaacagcgccaucggcaagauccaggacagccugagcagcaccgccagcgcccugggcaagcugcaggacguggugaaccagaacgcccaggcucugaacacccuggugaagcagcugagcagcaacuucggcgccaucagcucagugcugaaugacauccugagcaggcuggacaagguggaggccgaggugcagaucgaccggcugaucaccggccggcugcagagccugcagaccuacgugacccagcagcugauccgggccgccgagauccgggccagcgccaaccuggccgcaaccaagaugagcgagugcgugcugggccagagcaagcggguggacuuuugcggcaagggcuaccaccugaugagcuucccccagagcgccccacacggcguggucuuccuccacgugacauacgugcccgcccaggagaagaacuucaccaccgcccccgccauuugccacgacggcaaggcccacuucccccgggagggaguguucgugagcaacggcacccacugguucgugacccagcggaacuucuacgagccccagaucaucaccaccgacaacaccuucgugagcggcaacugcgacguggugaucggcaucgugaacaacaccguguacgacccccugcagccugagcuggacagcuucaaggaggagcuggacaaguacuucaagaaccacaccagccccgacguggaucugggcgacaucagcggcaucaacgcuagcguggugaacauccagaaggagaucgaccggcugaacgagguggccaagaaccugaacgagagccugaucgaccugcaggagcugggcaaguacgagcaguacaucaaguggcccugguacaucuggcugggcuucaucgccggccugaucgccaucgugauggugaccaucaugcugugcugcaugaccagcugcuguagcugccugaagggcugcugcagcugcggcagcugcugcaaguucgacgaggacgacagcgagccagugcugaagggcgugaagcugcacuacaccugaggacuaguuauaagacugacuagcccgaugggccucccaacgggcccuccuccccuccuugcaccgagauuaauagaucuaaaaaaaaaaaaaaaaaaaaaaaaaaaaaaaaaaaaaaaaaaaaaaaaaaaaaaaaaaaaaaaaaaaaaaaaaaaaaaaaaaaaaaaaaaaaaaaaaaaa

SEQ ID NO: 25666 - RNA, 4017 nt, Artificial Sequence
  SARS-CoV-2/Wuhan/WIV05/2019__EPI_ISL_402128 spike protein mRNA gc (1-1273)(N439K_D614G)
aggagaaagcuuaccauguucguguuccuggugcugcugccccuggugagcagccagugcgugaaccugaccacccggacccagcugcccccugccuacaccaacagcuucacccggggcguguacuaccccgacaagguguuccggagcagcgugcugcacagcacccaggaccuguuccugcccuucuucagcaacgugaccugguuccacgccauccacgugagcggcaccaacggcaccaagcgguucgacaacccagugcugcccuucaacgacggcguguacuucgccagcaccgagaagucaaacaucauccggggcuggaucuucggcaccacccuggacagcaagacacagagccugcugaucgugaacaacgccaccaacguggugaucaaggugugcgaguuucaguucugcaacgaccccuuccugggcguguacuaccacaagaacaacaagagcuggauggagagcgaguuccgggucuacagcagcgcuaacaauugcaccuucgaguacgugagccagcccuuccugauggaccucgagggcaagcagggcaacuucaagaaccugcgggaguucguguucaagaacaucgauggcuacuucaagaucuacagcaagcacacccccaucaaccuggugcgggaccugccccagggauucagcgcccuggagccucugguggaccugcccaucggcaucaacaucaccagguuccagacccugcuggcccugcaccggagcuaccugacccccggcgacagcagcagcggcuggaccgccggcgccgccgcauacuacgugggcuaccugcagccacggaccuuccugcugaaguacaacgagaacggcaccaucaccgacgccguggacugcgcccuggacccccugagcgagaccaagugcacccuaaagagcuucaccguggagaagggcaucuaccagaccagcaacuuccgggugcagcccacugagagcaucgugcgguuccccaacauuaccaaccugugucccuucggcgagguguucaacgccacccgguucgccagcguguacgccuggaaccggaagcggaucagcaacugcguggccgacuacagcgugcuguacaacagcgccagcuucagcaccuucaagugcuacggcgugagcccuaccaagcugaacgaccugugcuucaccaacguguacgcugacagcuucgugauccggggcgacgaggugcggcagaucgcccccggccagaccggcaagaucgccgacuacaacuacaagcugcccgacgacuucaccggcugcgugaucgccuggaacagcaagaaccuggacagcaaggugggcggcaacuacaacuaccuguaccggcuguuccguaagagcaaccugaagccauucgagcgggacaucagcaccgagaucuaccaggccggcagcacccccugcaacgguguggagggcuuuaacugcuacuucccccugcagagcuacggcuuccagcccaccaacggcgugggcuaccagcccuaccgggugguggugcugagcuucgagcugcugcacgcccccgccaccgugugcggcccuaaaaagagcaccaaccuggugaagaacaagugcgugaacuucaacuucaauggccugaccggcaccggcgugcugaccgagagcaacaagaaguuccugcccuuccagcaguucggccgggauaucgccgacaccaccgacgcagugcgggacccccagacccuggagauccuggacaucaccccaugcagcuucggcggcgugagcgucaucacccccggcacaaacaccagcaaccagguggccgugcuguaccagggagugaacugcaccgaggugcccguggccauccacgccgaccagcugacccccaccuggcggguguacagcaccggcagcaacguguuccagacccgggccggcugccugaucggcgccgagcacgugaacaacuccuacgagugcgacauccccaucggcgcuggcaucugcgccagcuaccagacccagaccaacagcccccggcgggcccggagcguggccagccagagcaucaucgccuacaccaugagcuuaggcgccgagaacagcguggccuacagcaacaacagcaucgcgaucccuaccaacuucaccaucagcgugaccaccgagauacugcccgugagcaugaccaagaccagcguggacuguaccauguacaucugcggcgacagcaccgagugcagcaaccugcugcugcaguacggcagcuucugcacccagcugaaccgggcccugaccggcaucgccguggagcaggacaagaacacccaagagguguucgcccaggugaagcagaucuacaagacucccccaaucaaggacuucggcggcuucaacuucagccagauccugcccgaccccagcaagcccagcaagcggagcuucaucgaggaccugcuguucaacaaggugacccuggccgacgccggcuucaucaagcaguacggcgacugccugggggauaucgccgcucgggaccugaucugcgcccagaaguucaacggccugaccgugcugcccccucugcugaccgacgagaugaucgcccaguacaccagcgcccugcuugccggcaccaucaccagcggcuggaccuucggcgccggcgcagcccugcagauccccuucgccaugcagauggccuaccgguucaacggcaucggcgugacccagaacgugcuguacgagaaccagaagcugaucgccaaccaguucaacagcgccaucggcaagauccaggacagccugagcagcaccgccagcgcccugggcaagcugcaggacguggugaaccagaacgcucaggcccugaacacccuggugaagcagcugagcagcaacuucggcgccaucagcucagugcugaacgacauccugagcaggcuggacaagguggaggccgaggugcagaucgaccggcugaucaccggccggcugcagagccugcagaccuacgugacccagcagcugauccgggccgccgagauccgggccagcgccaaucuggcagccaccaagaugagcgagugcgugcugggccagagcaagcggguggacuuuugcggcaagggcuaccaccugaugagcuucccccagagcgccccacacggcgugguguuccuccacgucacauacgugcccgcccaggagaagaacuucaccaccgcccccgccauuugccacgacggcaaggcucacuucccccgggagggaguguucgugagcaacggcacccacugguucgugacccagcggaacuucuacgagccccagaucaucaccaccgacaacaccuucgugagcggcaacugcgacguggugaucggcaucgugaacaacaccguguacgacccccugcagccugagcuggacagcuucaaggaggagcuggacaaguacuucaagaaccacaccagccccgacguggaucugggcgacaucagcggcaucaacgccagcguggugaacauccagaaggagaucgaccggcugaacgagguggccaagaaccugaacgagagccugaucgaccugcaggagcugggcaaguacgagcaguacaucaaguggcccugguacaucuggcugggcuucaucgccggccugaucgccaucgugauggugaccaucaugcugugcugcaugaccagcugcuguagcugccugaagggcugcugcagcugcggcagcugcugcaaguucgacgaggacgacagcgagccagugcugaagggcgugaagcugcacuacaccugaggacuaguuauaagacugacuagcccgaugggccucccaacgggcccuccuccccuccuugcaccgagauuaauagaucuaaaaaaaaaaaaaaaaaaaaaaaaaaaaaaaaaaaaaaaaaaaaaaaaaaaaaaaaaaaaaaaaaaaaaaaaaaaaaaaaaaaaaaaaaaaaaaaaaaaa

SEQ ID NO: 25667 - RNA, 4017 nt, Artificial Sequence
  SARS-CoV-2/Wuhan/WIV05/2019__EPI_ISL_402128 spike protein mRNA gc (1-1273)(S477N_D614G)
aggagaaagcuuaccauguucguguuccuggugcugcugccccuggugagcagccagugcgugaaccugaccacccggacccagcugcccccugccuacaccaacagcuucacccggggcguguacuaccccgacaagguguuccggagcagcgugcugcacagcacccaggaccuguuccugcccuucuucagcaacgugaccugguuccacgccauccacgugagcggcaccaacggcaccaagcgguucgacaacccagugcugcccuucaacgacggcguguacuucgccagcaccgagaagucaaacaucauccggggcuggaucuucggcaccacccuggacagcaagacacagagccugcugaucgugaacaacgccaccaacguggugaucaaggugugcgaguuucaguucugcaacgaccccuuccugggcguguacuaccacaagaacaacaagagcuggauggagagcgaguuccgggucuacagcagcgcuaacaauugcaccuucgaguacgugagccagcccuuccugauggaccucgagggcaagcagggcaacuucaagaaccugcgggaguucguguucaagaacaucgauggcuacuucaagaucuacagcaagcacacccccaucaaccuggugcgggaccugccccagggauucagcgcccuggagccucugguggaccugcccaucggcaucaacaucaccagguuccagacccugcuggcccugcaccggagcuaccugacccccggcgacagcagcagcggcuggaccgccggcgccgccgcauacuacgugggcuaccugcagccacggaccuuccugcugaaguacaacgagaacggcaccaucaccgacgccguggacugcgcccuggacccccugagcgagaccaagugcacccuaaagagcuucaccguggagaagggcaucuaccagaccagcaacuuccgggugcagcccacugagagcaucgugcgguuccccaacauuaccaaccugugucccuucggcgagguguucaacgccacccgguucgccagcguguacgccuggaaccggaagcggaucagcaacugcguggccgacuacagcgugcuguacaacagcgccagcuucagcaccuucaagugcuacggcgugagcccuaccaagcugaacgaccugugcuucaccaacguguacgcugacagcuucgugauccggggcgacgaggugcggcagaucgcccccggccagaccggcaagaucgccgacuacaacuacaagcugcccgacgacuucaccggcugcgugaucgccuggaacagcaacaaccuggacagcaaggugggcggcaacuacaacuaccuguaccggcuguuccguaagagcaaccugaagccauucgagcgggacaucagcaccgagaucuaccaggccggcaacacccccugcaacgguguggagggcuuuaacugcuacuucccccugcagagcuacggcuuccagcccaccaacggcgugggcuaccagcccuaccgggugguggugcugagcuucgagcugcugcacgcccccgccaccgugugcggcccuaaaaagagcaccaaccuggugaagaacaagugcgugaauuucaacuucaacggccugaccggcaccggcgugcugaccgagagcaacaagaaguuccugcccuuccagcaguucggccgggauaucgccgacaccaccgacgcagugcgggacccccagacccuggagauccuggacaucaccccaugcagcuucggcggcgugagcgucaucacccccggcacaaacaccagcaaccagguggccgugcuguaccagggagugaacugcaccgaggugcccguggccauccacgccgaccagcugacccccaccuggcggguguacagcaccggcagcaacguguuccagacccgggccggcugccugaucggcgccgagcacgugaacaacagcuacgagugcgacauccccaucggcgcuggcaucugcgccuccuaccagacccagaccaacagcccccggcgggcccggagcguggccagccagagcaucaucgccuacaccaugagcuuaggcgccgagaacagcguggccuacagcaacaacagcaucgcgaucccuaccaacuucaccaucagcgugaccaccgagauacugcccgugagcaugaccaagaccagcguggacuguaccauguacaucugcggcgacagcaccgagugcagcaaccugcugcugcaguacggcagcuucugcacccagcugaaccgggcccugaccggcaucgccguggagcaggacaagaacacccaagagguguucgcccaggugaagcagaucuacaagacucccccaaucaaggacuucggcggcuucaacuucagccagauccugcccgaccccagcaagcccagcaagcggagcuucaucgaggaccugcuguucaacaaggugacccuggccgacgccggcuucaucaagcaguacggcgacugccugggggauaucgccgcucgggaccugaucugcgcccagaaguucaacggccugaccgugcugcccccucugcugaccgacgagaugaucgcccaguacaccagcgcccugcuugccggcaccaucaccagcggcuggaccuucggcgccggcgcagcccugcagauccccuucgccaugcagauggccuaccgguucaacggcaucggcgugacccagaacgugcuguacgagaaccagaagcugaucgccaaccaguucaacagcgccaucggcaagauccaggacagccugagcagcaccgccagcgcccugggcaagcugcaggacguggugaaccagaacgcucaggcccugaacacccuggugaagcagcugagcagcaauuucggcgccaucagcagcgugcugaacgacauccugucaaggcuggacaagguggaggccgaggugcagaucgaccggcugaucaccggccggcugcagagccugcagaccuacgugacccagcagcugauccgggccgccgagauccgggccagcgccaaccuggcagccaccaagaugagcgagugcgugcugggccagagcaagcggguggacuuuugcggcaagggcuaccaccugaugagcuucccccagagcgccccacacggcgugguguuccuccacgucacauacgugcccgcccaggagaagaacuucaccaccgcccccgccauuugccacgacggcaaggcucacuucccccgggagggaguguucgugagcaacggcacccacugguucgugacccagcggaacuucuacgagccccagaucaucaccaccgacaacaccuucgugagcggcaacugcgacguggugaucggcaucgugaacaacaccguguacgacccccugcagccugagcuggacagcuucaaggaggagcuggacaaguacuucaagaaccacaccagccccgacguggaucugggcgacaucagcggcaucaacgccagcguggugaacauccagaaggagaucgaccggcugaacgagguggccaagaaccugaacgagagccugaucgaccugcaggagcugggcaaguacgagcaguacaucaaguggcccugguacaucuggcugggcuucaucgccggccugaucgccaucgugauggugaccaucaugcugugcugcaugaccagcugcuguagcugccugaagggcugcugcagcugcggcagcugcugcaaguucgacgaggacgacagcgagccagugcugaagggcgugaagcugcacuacaccugaggacuaguuauaagacugacuagcccgaugggccucccaacgggcccuccuccccuccuugcaccgagauuaauagaucuaaaaaaaaaaaaaaaaaaaaaaaaaaaaaaaaaaaaaaaaaaaaaaaaaaaaaaaaaaaaaaaaaaaaaaaaaaaaaaaaaaaaaaaaaaaaaaaaaaaa

SEQ ID NO: 25668 - RNA, 4017 nt, Artificial Sequence
  SARS-CoV-2/Wuhan/WIV05/2019__EPI_ISL_402128 spike protein mRNA gc (1-1273)(N501Y_D614G)
aggagaaagcuuaccauguucguguuccuggugcugcugccccuggugagcagccagugcgugaaccugaccacccggacccagcugcccccugccuacaccaacagcuucacccggggcguguacuaccccgacaagguguuccggagcagcgugcugcacagcacccaggaccuguuccugcccuucuucagcaacgugaccugguuccacgccauccacgugagcggcaccaacggcaccaagcgguucgacaacccagugcugcccuucaacgacggcguguacuucgccagcaccgagaagucaaacaucauccggggcuggaucuucggcaccacccuggacagcaagacacagagccugcugaucgugaacaacgccaccaacguggugaucaaggugugcgaguuucaguucugcaacgaccccuuccugggcguguacuaccacaagaacaacaagagcuggauggagagcgaguuccgggucuacagcagcgcuaacaauugcaccuucgaguacgugagccagcccuuccugauggaccucgagggcaagcagggcaacuucaagaaccugcgggaguucguguucaagaacaucgauggcuacuucaagaucuacagcaagcacacccccaucaaccuggugcgggaccugccccagggauucagcgcccuggagccucugguggaccugcccaucggcaucaacaucaccagguuccagacccugcuggcccugcaccggagcuaccugacccccggcgacagcagcagcggcuggaccgccggcgccgccgcauacuacgugggcuaccugcagccacggaccuuccugcugaaguacaacgagaacggcaccaucaccgacgccguggacugcgcccuggacccccugagcgagaccaagugcacccuaaagagcuucaccguggagaagggcaucuaccagaccagcaacuuccgggugcagcccacugagagcaucgugcgguuccccaacauuaccaaccugugucccuucggcgagguguucaacgccacccgguucgccagcguguacgccuggaaccggaagcggaucagcaacugcguggccgacuacagcgugcuguacaacagcgccagcuucagcaccuucaagugcuacggcgugagcccuaccaagcugaacgaccugugcuucaccaacguguacgcugacagcuucgugauccggggcgacgaggugcggcagaucgcccccggccagaccggcaagaucgccgacuacaacuacaagcugcccgacgacuucaccggcugcgugaucgccuggaacagcaacaaccuggacagcaaggugggcggcaacuacaacuaccuguaccggcuguuccguaagagcaaccugaagccauucgagcgggacaucagcaccgagaucuaccaggccggcagcacccccugcaacgguguggagggcuuuaacugcuacuucccccugcagagcuacggcuuccagcccaccuacggcgugggcuaccagcccuaccgggugguggugcugagcuucgagcugcugcacgcccccgccaccgugugcggcccuaaaaagagcaccaaccuggugaagaacaagugcgugaacuucaacuucaauggccugaccggcaccggcgugcugaccgagagcaacaagaaguuccugcccuuccagcaguucggccgggauaucgccgacaccaccgacgcagugcgggacccccagacccuggagauccuggacaucaccccaugcagcuucggcggcgugagcgucaucacccccggcacaaacaccagcaaccagguggccgugcuguaccagggagugaacugcaccgaggugcccguggccauccacgccgaccagcugacccccaccuggcggguguacagcaccggcagcaacguguuccagacccgggccggcugccugaucggcgccgagcacgugaacaacuccuacgagugcgacauccccaucggcgcuggcaucugcgccagcuaccagacccagaccaacagcccccggcgggcccggagcguggccagccagagcaucaucgccuacaccaugagcuuaggcgccgagaacagcguggccuacagcaacaacagcaucgcgaucccuaccaacuucaccaucagcgugaccaccgagauacugcccgugagcaugaccaagaccagcguggacuguaccauguacaucugcggcgacagcaccgagugcagcaaccugcugcugcaguacggcagcuucugcacccagcugaaccgggcccugaccggcaucgccguggagcaggacaagaacacccaagagguguucgcccaggugaagcagaucuacaagacucccccaaucaaggacuucggcggcuucaacuucagccagauccugcccgaccccagcaagcccagcaagcggagcuucaucgaggaccugcuguucaacaaggugacccuggccgacgccggcuucaucaagcaguacggcgacugccugggggauaucgccgcucgggaccugaucugcgcccagaaguucaacggccugaccgugcugcccccucugcugaccgacgagaugaucgcccaguacaccagcgcccugcuugccggcaccaucaccagcggcuggaccuucggcgccggcgcagcccugcagauccccuucgccaugcagauggccuaccgguucaacggcaucggcgugacccagaacgugcuguacgagaaccagaagcugaucgccaaccaguucaacagcgccaucggcaagauccaggacagccugagcagcaccgccagcgcccugggcaagcugcaggacguggugaaccagaacgcucaggcccugaacacccuggugaagcagcugagcagcaacuucggcgccaucagcucagugcugaacgacauccugagcaggcuggacaagguggaggccgaggugcagaucgaccggcugaucaccggccggcugcagagccugcagaccuacgugacccagcagcugauccgggccgccgagauccgggccagcgccaaucuggcagccaccaagaugagcgagugcgugcugggccagagcaagcggguggacuuuugcggcaagggcuaccaccugaugagcuucccccagagcgccccacacggcgugguguuccuccacgucacauacgugcccgcccaggagaagaacuucaccaccgcccccgccauuugccacgacggcaaggcucacuucccccgggagggaguguucgugagcaacggcacccacugguucgugacccagcggaacuucuacgagccccagaucaucaccaccgacaacaccuucgugagcggcaacugcgacguggugaucggcaucgugaacaacaccguguacgacccccugcagccugagcuggacagcuucaaggaggagcuggacaaguacuucaagaaccacaccagccccgacguggaucugggcgacaucagcggcaucaacgccagcguggugaacauccagaaggagaucgaccggcugaacgagguggccaagaaccugaacgagagccugaucgaccugcaggagcugggcaaguacgagcaguacaucaaguggcccugguacaucuggcugggcuucaucgccggccugaucgccaucgugauggugaccaucaugcugugcugcaugaccagcugcuguagcugccugaagggcugcugcagcugcggcagcugcugcaaguucgacgaggacgacagcgagccagugcugaagggcgugaagcugcacuacaccugaggacuaguuauaagacugacuagcccgaugggccucccaacgggcccuccuccccuccuugcaccgagauuaauagaucuaaaaaaaaaaaaaaaaaaaaaaaaaaaaaaaaaaaaaaaaaaaaaaaaaaaaaaaaaaaaaaaaaaaaaaaaaaaaaaaaaaaaaaaaaaaaaaaaaaaa

SEQ ID NO: 25669 - RNA, 4011 nt, Artificial Sequence
  SARS-CoV-2/Wuhan/WIV05/2019__EPI_ISL_402128 spike protein mRNA gc (1-1273)(H69del_V70del_D614G)
aggagaaagcuuaccauguucguguuccuggugcugcugccccuggugagcagccagugcgugaaccugaccacccggacccagcugcccccugccuacaccaacagcuucacccggggcguguacuaccccgacaagguguuccggagcagcgugcugcacagcacccaggaccuguuccugcccuucuucagcaacgugaccugguuccacgccaucagcggcaccaacggcaccaagcgguucgacaacccagugcugcccuucaacgacggcguguacuucgccagcaccgagaagucaaacaucauccggggcuggaucuucggcaccacccuggacagcaagacacagagccugcugaucgugaacaacgccaccaacguggugaucaaggugugcgaguuucaguucugcaacgaccccuuccugggcguguacuaccacaagaacaacaagagcuggauggagagcgaguuccggguguacagcagcgcuaacaauugcaccuucgaguacgucagccagcccuuccugauggaccucgagggcaagcagggcaacuucaagaaccugcgggaguucguguucaagaacaucgauggcuacuucaagaucuacagcaagcacacccccaucaaccuggugcgggaccugccccagggauucagcgcccuggagccucugguggaccugcccaucggcaucaacaucaccagguuccagacccugcuggcccugcaccggagcuaccugacccccggcgacagcagcagcggcuggaccgccggcgccgccgcauacuacgugggcuaccugcagccacggaccuuccugcugaaguacaacgagaacggcaccaucaccgacgccguggacugcgcccuggacccccugagcgagaccaagugcacccuaaagagcuucaccguggagaagggcaucuaccagaccagcaacuuccgggugcagcccacugagagcaucgugcgguuccccaacauuaccaaccugugucccuucggcgagguguucaacgccacccgguucgccagcguguacgccuggaaccggaagcggaucagcaacugcguggccgacuacagcgugcuguacaacagcgccagcuucagcaccuucaagugcuacggcgugagcccuaccaagcugaacgaccugugcuucaccaacguguacgcugacagcuucgugauccggggcgacgaggugcggcagaucgcccccggccagaccggcaagaucgccgacuacaacuacaagcugcccgacgacuucaccggcugcgugaucgccuggaacagcaacaaccuggacagcaaggugggcggcaacuacaacuaccuguaccggcuguuccguaagagcaaccugaagccauucgagcgggacaucagcaccgagaucuaccaggccggcagcacccccugcaacgguguggagggcuuuaacugcuacuucccccugcagagcuacggcuuccagcccaccaacggcgugggcuaccagcccuaccgggugguggugcugagcuucgagcugcugcacgcccccgccaccgugugcggcccuaaaaagagcaccaaccuggugaagaacaagugcgugaacuucaauuucaacggccugaccggcaccggcgugcugaccgagagcaacaagaaguuccugcccuuccagcaguucggccgggauaucgccgacaccaccgacgcagugcgggacccccagacccuggagauccuggacaucaccccaugcagcuucggcggcgugagcgugaucacccccggcacaaacaccagcaaccaggucgccgugcuguaccagggagugaacugcaccgaggugcccguggccauccacgccgaccagcugacccccaccuggcggguguacagcaccggcagcaacguguuccagacccgggccggcugccugaucggcgccgagcacgugaacaacuccuacgagugcgacauccccaucggcgcuggcaucugcgccagcuaccagacccagaccaacagcccccggcgggcccggagcguggccagccagagcaucaucgccuacaccaugagcuuaggcgccgagaacagcguggccuacagcaacaacagcaucgcgaucccuaccaacuucaccaucagcgugaccaccgagauacugcccgugagcaugaccaagaccagcguggacuguaccauguacaucugcggcgacagcaccgagugcagcaaccugcugcugcaguacggcagcuucugcacccagcugaaccgggcccugaccggcaucgccguggagcaggacaagaacacccaagagguguucgcccaggugaagcagaucuacaagacucccccaaucaaggacuucggcggcuucaacuucagccagauccugcccgaccccagcaagcccagcaagcggagcuucaucgaggaccugcuguucaacaaggugacccuggccgacgccggcuucaucaagcaguacggcgacugccugggggauaucgccgcucgggaccugaucugcgcccagaaguucaacggccugaccgugcugcccccucugcugaccgacgagaugaucgcccaguacaccagcgcccugcuugccggcaccaucaccagcggcuggaccuucggcgccggcgcagcccugcagauccccuucgccaugcagauggccuaccgguucaacggcaucggcgugacccagaacgugcuguacgagaaccagaagcugaucgccaaccaguucaacagcgccaucggcaagauccaggacagccugagcagcaccgccagcgcccugggcaagcugcaggacguggugaaccagaacgcucaggcccugaacacccuggugaagcagcugagcagcaacuucggcgccaucagcucagugcugaaugacauccugagcaggcuggacaagguggaggccgaggugcagaucgaccggcugaucaccggccggcugcagagccugcagaccuacgugacccagcagcugauccgggccgccgagauccgggccagcgccaaccuggcagccaccaagaugagcgagugcgugcugggccagagcaagcggguggacuuuugcggcaagggcuaccaccugaugagcuucccccagagcgccccacacggcgugguguuccuccacgugacauacguccccgcccaggagaagaacuucaccaccgcccccgccauuugccacgacggcaaggcucacuucccccgggagggaguguucgugagcaacggcacccacugguucgugacccagcggaacuucuacgagccccagaucaucaccaccgacaacaccuucgugagcggcaacugcgacguggugaucggcaucgugaacaacaccguguacgacccccugcagccugagcuggacagcuucaaggaggagcuggacaaguacuucaagaaccacaccagccccgacguggaucugggcgacaucagcggcaucaacgccagcguggugaacauccagaaggagaucgaccggcugaacgagguggccaagaaccugaacgagagccugaucgaccugcaggagcugggcaaguacgagcaguacaucaaguggcccugguacaucuggcugggcuucaucgccggccugaucgccaucgugauggugaccaucaugcugugcugcaugaccagcugcuguagcugccugaagggcugcugcagcugcggcagcugcugcaaguucgacgaggacgacagcgagccagugcugaagggcgugaagcugcacuacaccugaggacuaguuauaagacugacuagcccgaugggccucccaacgggcccuccuccccuccuugcaccgagauuaauagaucuaaaaaaaaaaaaaaaaaaaaaaaaaaaaaaaaaaaaaaaaaaaaaaaaaaaaaaaaaaaaaaaaaaaaaaaaaaaaaaaaaaaaaaaaaaaaaaaaaaaa

SEQ ID NO: 25670 - RNA, 4017 nt, Artificial Sequence
  SARS-CoV-2/Wuhan/WIV05/2019__EPI_ISL_402128 spike protein mRNA gc (1-1273)(Y453F_D614G)
aggagaaagcuuaccauguucguguuccuggugcugcugccccuggugagcagccagugcgugaaccugaccacccggacccagcugcccccugccuacaccaacagcuucacccggggcguguacuaccccgacaagguguuccggagcagcgugcugcacagcacccaggaccuguuccugcccuucuucagcaacgugaccugguuccacgccauccacgugagcggcaccaacggcaccaagcgguucgacaacccagugcugcccuucaacgacggcguguacuucgccagcaccgagaagucaaacaucauccggggcuggaucuucggcaccacccuggacagcaagacacagagccugcugaucgugaacaacgccaccaacguggugaucaaggugugcgaguuucaguucugcaacgaccccuuccugggcguguacuaccacaagaacaacaagagcuggauggagagcgaguuccgggucuacagcagcgcuaacaauugcaccuucgaguacgugagccagcccuuccugauggaccucgagggcaagcagggcaacuucaagaaccugcgggaguucguguucaagaacaucgauggcuacuucaagaucuacagcaagcacacccccaucaaccuggugcgggaccugccccagggauucagcgcccuggagccucugguggaccugcccaucggcaucaacaucaccagguuccagacccugcuggcccugcaccggagcuaccugacccccggcgacagcagcagcggcuggaccgccggcgccgccgcauacuacgugggcuaccugcagccacggaccuuccugcugaaguacaacgagaacggcaccaucaccgacgccguggacugcgcccuggacccccugagcgagaccaagugcacccuaaagagcuucaccguggagaagggcaucuaccagaccagcaacuuccgggugcagcccacugagagcaucgugcgguuccccaacauuaccaaccugugucccuucggcgagguguucaacgccacccgguucgccagcguguacgccuggaaccggaagcggaucagcaacugcguggccgacuacagcgugcuguacaacagcgccagcuucagcaccuucaagugcuacggcgugagcccuaccaagcugaacgaccugugcuucaccaacguguacgcugacagcuucgugauccggggcgacgaggugcggcagaucgcccccggccagaccggcaagaucgccgacuacaacuacaagcugcccgacgacuucaccggcugcgugaucgccuggaacagcaacaaccuggacagcaaggugggcggcaacuacaacuaccuguuccggcuguuccguaagagcaaccugaagccauuugagcgggacaucagcaccgagaucuaccaggccggcagcacccccugcaacgguguggagggcuucaacugcuacuucccccugcagagcuacggcuuccagcccaccaacggcgugggcuaccagcccuaccgggugguggugcugagcuucgagcugcugcacgcccccgccaccgugugcggcccuaaaaagagcaccaaccuggugaagaacaagugcgugaacuucaauuucaacggccugaccggcaccggcgugcugaccgagagcaacaagaaguuccugcccuuccagcaguucggccgggauaucgccgacaccaccgacgcagugcgggacccccagacccuggagauccuggacaucaccccaugcagcuucggcggcgugagcgucaucacccccggcacaaacaccagcaaccagguggccgugcuguaccagggagugaacugcaccgaggugcccguggccauccacgccgaccagcugacccccaccuggcggguguacagcaccggcagcaacguguuccagacccgggccggcugccugaucggcgccgagcacgugaacaacuccuacgagugcgacauccccaucggcgcuggcaucugcgccagcuaccagacccagaccaacagcccccggcgggcccggagcguggccagccagagcaucaucgccuacaccaugagcuuaggcgccgagaacagcguggccuacagcaacaacagcaucgcgaucccuaccaacuucaccaucagcgugaccaccgagauacugcccgugagcaugaccaagaccagcguggacuguaccauguacaucugcggcgacagcaccgagugcagcaaccugcugcugcaguacggcagcuucugcacccagcugaaccgggcccugaccggcaucgccguggagcaggacaagaacacccaagagguguucgcccaggugaagcagaucuacaagacucccccaaucaaggacuucggcggcuucaacuucagccagauccugcccgaccccagcaagcccagcaagcggagcuucaucgaggaccugcuguucaacaaggugacccuggccgacgccggcuucaucaagcaguacggcgacugccugggggauaucgccgcucgggaccugaucugcgcccagaaguucaacggccugaccgugcugcccccucugcugaccgacgagaugaucgcccaguacaccagcgcccugcuugccggcaccaucaccagcggcuggaccuucggcgccggcgcagcccugcagauccccuucgccaugcagauggccuaccgguucaacggcaucggcgugacccagaacgugcuguacgagaaccagaagcugaucgccaaccaguucaacagcgccaucggcaagauccaggacagccugagcagcaccgccagcgcccugggcaagcugcaggacguggugaaccagaacgcucaggcccugaacacccuggugaagcagcugagcagcaacuuuggcgccaucagcucagugcugaaugacauccugagcaggcuggacaagguggaggccgaggugcagaucgaccggcugaucaccggccggcugcagagccugcagaccuacgugacccagcagcugauccgggccgccgagauccgggccagcgccaaccuggcagccaccaagaugagcgagugcgugcugggccagagcaagcggguggacuucugcggcaagggcuaccaccugaugagcuucccccagagcgccccacacggcgugguguuccuccacgucacauacgugcccgcccaggagaagaacuucaccaccgcccccgccauuugccacgacggcaaggcucacuucccccgggagggaguguucgugagcaacggcacccacugguucgugacccagcggaacuucuacgagccccagaucaucaccaccgacaacaccuucgugagcggcaacugcgacguggugaucggcaucgugaacaacaccguguacgacccccugcagccugagcuggacagcuucaaggaggagcuggacaaguacuucaagaaccacaccagccccgacguggaucugggcgacaucagcggcaucaacgccagcguggugaacauccagaaggagaucgaccggcugaacgagguggccaagaaccugaacgagagccugaucgaccugcaggagcugggcaaguacgagcaguacaucaaguggcccugguacaucuggcugggcuucaucgccggccugaucgccaucgugauggugaccaucaugcugugcugcaugaccagcugcuguagcugccugaagggcugcugcagcugcggcagcugcugcaaguucgacgaggacgacagcgagccagugcugaagggcgugaagcugcacuacaccugaggacuaguuauaagacugacuagcccgaugggccucccaacgggcccuccuccccuccuugcaccgagauuaauagaucuaaaaaaaaaaaaaaaaaaaaaaaaaaaaaaaaaaaaaaaaaaaaaaaaaaaaaaaaaaaaaaaaaaaaaaaaaaaaaaaaaaaaaaaaaaaaaaaaaaaa

SEQ ID NO: 25671 - RNA, 4017 nt, Artificial Sequence
  SARS-CoV-2/Wuhan/WIV05/2019__EPI_ISL_402128 spike protein mRNA gc (1-1273)(D614G_I692V)
aggagaaagcuuaccauguucguguuccuggugcugcugccccuggugagcagccagugcgugaaccugaccacccggacccagcugcccccugccuacaccaacagcuucacccggggcguguacuaccccgacaagguguuccggagcagcgugcugcacagcacccaggaccuguuccugcccuucuucagcaacgugaccugguuccacgccauccacgugagcggcaccaacggcaccaagcgguucgacaacccagugcugcccuucaacgacggcguguacuucgccagcaccgagaagucaaacaucauccggggcuggaucuucggcaccacccuggacagcaagacacagagccugcugaucgugaacaacgccaccaacguggugaucaaggugugcgaguuucaguucugcaacgaccccuuccugggcguguacuaccacaagaacaacaagagcuggauggagagcgaguuccgggucuacagcagcgcuaacaauugcaccuucgaguacgugagccagcccuuccugauggaccucgagggcaagcagggcaacuucaagaaccugcgggaguucguguucaagaacaucgauggcuacuucaagaucuacagcaagcacacccccaucaaccuggugcgggaccugccccagggauucagcgcccuggagccucugguggaccugcccaucggcaucaacaucaccagguuccagacccugcuggcccugcaccggagcuaccugacccccggcgacagcagcagcggcuggaccgccggcgccgccgcauacuacgugggcuaccugcagccacggaccuuccugcugaaguacaacgagaacggcaccaucaccgacgccguggacugcgcccuggacccccugagcgagaccaagugcacccuaaagagcuucaccguggagaagggcaucuaccagaccagcaacuuccgggugcagcccacugagagcaucgugcgguuccccaacauuaccaaccugugucccuucggcgagguguucaacgccacccgguucgccagcguguacgccuggaaccggaagcggaucagcaacugcguggccgacuacagcgugcuguacaacagcgccagcuucagcaccuucaagugcuacggcgugagcccuaccaagcugaacgaccugugcuucaccaacguguacgcugacagcuucgugauccggggcgacgaggugcggcagaucgcccccggccagaccggcaagaucgccgacuacaacuacaagcugcccgacgacuucaccggcugcgugaucgccuggaacagcaacaaccuggacagcaaggugggcggcaacuacaacuaccuguaccggcuguuccguaagagcaaccugaagccauucgagcgggacaucagcaccgagaucuaccaggccggcagcacccccugcaacgguguggagggcuuuaacugcuacuucccccugcagagcuacggcuuccagcccaccaacggcgugggcuaccagcccuaccgggugguggugcugagcuucgagcugcugcacgcccccgccaccgugugcggcccuaaaaagagcaccaaccuggugaagaacaagugcgugaacuucaauuucaacggccugaccggcaccggcgugcugaccgagagcaacaagaaguuccugcccuuccagcaguucggccgggauaucgccgacaccaccgacgcagugcgggacccccagacccuggagauccuggacaucaccccaugcagcuucggcggcgugagcgucaucacccccggcacaaacaccagcaaccagguggccgugcuguaccagggagugaacugcaccgaggugcccguggccauccacgccgaccagcugacccccaccuggcggguguacagcaccggcagcaacguguuccagacccgggccggcugccugaucggcgccgagcacgugaacaacuccuacgagugcgacauccccaucggcgcuggcaucugcgccagcuaccagacccagaccaacagcccccggcgggcccggagcguggccagccagagcgugaucgccuacaccaugagcuuaggcgccgagaacagcguggccuacagcaacaacagcaucgcgaucccuaccaacuucaccaucagcgugaccaccgagauccugcccgugagcaugaccaagaccagcguggacuguaccauguacauaugcggcgacagcaccgagugcagcaaccugcugcugcaguacggcagcuucugcacccagcugaaccgggcccugaccggcaucgccguggagcaggacaagaacacccaagagguguucgcccaggugaagcagaucuacaagacucccccaaucaaggacuucggcggcuucaacuucagccagauccugcccgaccccagcaagcccagcaagcggagcuucaucgaggaccugcuguucaacaaggugacccuggccgacgccggcuucaucaagcaguacggcgacugccugggggauaucgccgcucgggaccugaucugcgcccagaaguucaacggccugaccgugcugcccccucugcugaccgacgagaugaucgcccaguacaccagcgcccugcuugccggcaccaucaccagcggcuggaccuucggcgccggcgcagcccugcagauccccuucgccaugcagauggccuaccgguucaacggcaucggcgugacccagaacgugcuguacgagaaccagaagcugaucgccaaccaguucaacagcgccaucggcaagauccaggacagccugagcagcaccgccagcgcccugggcaagcugcaggacguggugaaccagaacgcucaggcccugaacacccuggugaagcagcugagcagcaacuucggcgccaucagcucagugcugaaugacauccugagcaggcuggacaagguggaggccgaggugcagaucgaccggcugaucaccggccggcugcagagccugcagaccuacgugacccagcagcugauccgggccgccgagauccgggccagcgccaaccuggcagccaccaagaugagcgagugcgugcugggccagagcaagcggguggacuuuugcggcaagggcuaccaccugaugagcuucccccagagcgccccacacggcguggucuuccuccacgugacauacgugcccgcccaggagaagaacuucaccaccgcccccgccaucugccacgacggcaaggcucacuucccccgggagggaguguucgugagcaacggcacccacugguucgugacccagcggaacuucuacgagccccagauuaucaccaccgacaacaccuucgugagcggcaacugcgacguggugaucggcaucgugaacaacaccguguacgacccccugcagccugagcuggacagcuucaaggaggagcuggacaaguacuucaagaaccacaccagccccgacguggaucugggcgacaucagcggcaucaacgccagcguggugaacauccagaaggagaucgaccggcugaacgagguggccaagaaccugaacgagagccugaucgaccugcaggagcugggcaaguacgagcaguacaucaaguggcccugguacaucuggcugggcuucaucgccggccugaucgccaucgugauggugaccaucaugcugugcugcaugaccagcugcuguagcugccugaagggcugcugcagcugcggcagcugcugcaaguucgacgaggacgacagcgagccagugcugaagggcgugaagcugcacuacaccugaggacuaguuauaagacugacuagcccgaugggccucccaacgggcccuccuccccuccuugcaccgagauuaauagaucuaaaaaaaaaaaaaaaaaaaaaaaaaaaaaaaaaaaaaaaaaaaaaaaaaaaaaaaaaaaaaaaaaaaaaaaaaaaaaaaaaaaaaaaaaaaaaaaaaaaa

SEQ ID NO: 25672 - RNA, 4017 nt, Artificial Sequence
  SARS-CoV-2/Wuhan/WIV05/2019__EPI_ISL_402128 spike protein mRNA gc (1-1273)(D614G_M1229I)
aggagaaagcuuaccauguucguguuccuggugcugcugccccuggugagcagccagugcgugaaccugaccacccggacccagcugcccccugccuacaccaacagcuucacccggggcguguacuaccccgacaagguguuccggagcagcgugcugcacagcacccaggaccuguuccugcccuucuucagcaacgugaccugguuccacgccauccacgugagcggcaccaacggcaccaagcgguucgacaacccagugcugcccuucaacgacggcguguacuucgccagcaccgagaagucaaacaucauccggggcuggaucuucggcaccacccuggacagcaagacacagagccugcugaucgugaacaacgccaccaacguggugaucaaggugugcgaguuucaguucugcaacgaccccuuccugggcguguacuaccacaagaacaacaagagcuggauggagagcgaguuccgggucuacagcagcgcuaacaauugcaccuucgaguacgugagccagcccuuccugauggaccucgagggcaagcagggcaacuucaagaaccugcgggaguucguguucaagaacaucgauggcuacuucaagaucuacagcaagcacacccccaucaaccuggugcgggaccugccccagggauucagcgcccuggagccucugguggaccugcccaucggcaucaacaucaccagguuccagacccugcuggcccugcaccggagcuaccugacccccggcgacagcagcagcggcuggaccgccggcgccgccgcauacuacgugggcuaccugcagccacggaccuuccugcugaaguacaacgagaacggcaccaucaccgacgccguggacugcgcccuggacccccugagcgagaccaagugcacccuaaagagcuucaccguggagaagggcaucuaccagaccagcaacuuccgggugcagcccacugagagcaucgugcgguuccccaacauuaccaaccugugucccuucggcgagguguucaacgccacccgguucgccagcguguacgccuggaaccggaagcggaucagcaacugcguggccgacuacagcgugcuguacaacagcgccagcuucagcaccuucaagugcuacggcgugagcccuaccaagcugaacgaccugugcuucaccaacguguacgcugacagcuucgugauccggggcgacgaggugcggcagaucgcccccggccagaccggcaagaucgccgacuacaacuacaagcugcccgacgacuucaccggcugcgugaucgccuggaacagcaacaaccuggacagcaaggugggcggcaacuacaacuaccuguaccggcuguuccguaagagcaaccugaagccauucgagcgggacaucagcaccgagaucuaccaggccggcagcacccccugcaacgguguggagggcuuuaacugcuacuucccccugcagagcuacggcuuccagcccaccaacggcgugggcuaccagcccuaccgggugguggugcugagcuucgagcugcugcacgcccccgccaccgugugcggcccuaaaaagagcaccaaccuggugaagaacaagugcgugaacuucaauuucaacggccugaccggcaccggcgugcugaccgagagcaacaagaaguuccugcccuuccagcaguucggccgggauaucgccgacaccaccgacgcagugcgggacccccagacccuggagauccuggacaucaccccaugcagcuucggcggcgugagcgucaucacccccggcacaaacaccagcaaccagguggccgugcuguaccagggagugaacugcaccgaggugcccguggccauccacgccgaccagcugacccccaccuggcggguguacagcaccggcagcaacguguuccagacccgggccggcugccugaucggcgccgagcacgugaacaacuccuacgagugcgacauccccaucggcgcuggcaucugcgccagcuaccagacccagaccaacagcccccggcgggcccggagcguggccagccagagcaucaucgccuacaccaugagcuuaggcgccgagaacagcguggccuacagcaacaacagcaucgcgaucccuaccaacuucaccaucagcgugaccaccgagauacugcccgugagcaugaccaagaccagcguggacuguaccauguacaucugcggcgacagcaccgagugcagcaaccugcugcugcaguacggcagcuucugcacccagcugaaccgggcccugaccggcaucgccguggagcaggacaagaacacccaagagguguucgcccaggugaagcagaucuacaagacucccccaaucaaggacuucggcggcuucaacuucagccagauccugcccgaccccagcaagcccagcaagcggagcuucaucgaggaccugcuguucaacaaggugacccuggccgacgccggcuucaucaagcaguacggcgacugccugggggauaucgccgcucgggaccugaucugcgcccagaaguucaacggccugaccgugcugcccccucugcugaccgacgagaugaucgcccaguacaccagcgcccugcuugccggcaccaucaccagcggcuggaccuucggcgccggcgcagcccugcagauccccuucgccaugcagauggccuaccgguucaacggcaucggcgugacccagaacgugcuguacgagaaccagaagcugaucgccaaccaguucaacagcgccaucggcaagauccaggacagccugagcagcaccgccagcgcccugggcaagcugcaggacguggugaaccagaacgcucaggcccugaacacccuggugaagcagcugagcagcaacuucggcgccaucagcucagugcugaaugacauccugagcaggcuggacaagguggaggccgaggugcagaucgaccggcugaucaccggccggcugcagagccugcagaccuacgugacccagcagcugauccgggccgccgagauccgggccagcgccaaccuggcagccaccaagaugagcgagugcgugcugggccagagcaagcggguggacuuuugcggcaagggcuaccaccugaugagcuucccccagagcgccccacacggcgugguguuccuccacgucacauacgugcccgcccaggagaagaacuucaccaccgcccccgccauuugccacgacggcaaggcucacuucccccgggagggaguguucgugagcaacggcacccacugguucgugacccagcggaacuucuacgagccccagaucaucaccaccgacaacaccuucgugagcggcaacugcgacguggugaucggcaucgugaacaacaccguguacgacccccugcagccugagcuggacagcuucaaggaggagcuggacaaguacuucaagaaccacaccagccccgacguggaucugggcgacaucagcggcaucaacgccagcguggugaacauccagaaggagaucgaccggcugaacgagguggccaagaaccugaacgagagccugaucgaccugcaggagcugggcaaguacgagcaguacaucaaguggcccugguacaucuggcugggcuucaucgccggccugaucgccaucgugaucgugaccaucaugcugugcugcaugaccagcugcuguagcugccugaagggcugcugcagcugcggcagcugcugcaaguucgacgaggacgacagcgagccagugcugaagggcgugaagcugcacuacaccugaggacuaguuauaagacugacuagcccgaugggccucccaacgggcccuccuccccuccuugcaccgagauuaauagaucuaaaaaaaaaaaaaaaaaaaaaaaaaaaaaaaaaaaaaaaaaaaaaaaaaaaaaaaaaaaaaaaaaaaaaaaaaaaaaaaaaaaaaaaaaaaaaaaaaaaa

SEQ ID NO: 25673 - RNA, 4011 nt, Artificial Sequence
  SARS-CoV-2/Wuhan/WIV05/2019__EPI_ISL_402128 spike protein mRNA gc (1-1273)(H69del_V70del_A222V_Y453F_S477N_D614G_I692V)
aggagaaagcuuaccauguucguguuccuggugcugcugccccuggugagcagccagugcgugaaccugaccacccggacccagcugcccccugccuacaccaacagcuucacccggggcguguacuaccccgacaagguguuccggagcagcgugcugcacagcacccaggaccuguuccugcccuucuucagcaacgugaccugguuccacgccaucagcggcaccaacggcaccaagcgguucgacaacccagugcugcccuucaacgacggcguguacuucgccagcaccgagaagucaaacaucauccggggcuggaucuucggcaccacccuggacagcaagacacagagccugcugaucgugaacaacgccaccaacguggugaucaaggugugcgaguuucaguucugcaacgaccccuuccugggcguguacuaccacaagaacaacaagagcuggauggagagcgaguuccggguguacagcagcgcuaacaauugcaccuucgaguacgucagccagcccuuccugauggaccucgagggcaagcagggcaacuucaagaaccugcgggaguucguguucaagaacaucgauggcuacuucaagaucuacagcaagcacacccccaucaaccuggugcgggaccugccccagggauucagcgugcuggagccucugguggaccugcccaucggcaucaacaucaccagguuccagacccugcuggcccugcaccggagcuaccugacccccggcgacagcagcagcggcuggaccgccggcgccgccgccuacuacgugggcuaccugcagccacggaccuuccugcugaaguacaacgagaacggcaccaucaccgacgcaguggacugcgcccuggacccccugagcgagaccaagugcacccuaaagagcuucaccguggagaagggcaucuaccagaccagcaacuuccgggugcagcccacugagagcaucgugcgguuccccaacauuaccaaccugugucccuucggcgagguguucaacgccacccgguucgccagcguguacgccuggaaccggaagcggaucagcaacugcguggccgacuacagcgugcuguacaacagcgccagcuucagcaccuucaagugcuacggcgugagcccuaccaagcugaacgaccugugcuucaccaacguguacgccgacagcuucgugauccggggcgacgaggugcggcagaucgcucccggccagaccggcaagaucgccgacuacaacuacaagcugcccgacgacuucaccggcugcgugaucgccuggaacagcaacaaccuggacagcaaggugggcggcaacuacaacuaccuguuccggcuguuccguaagagcaaccugaagccauuugagcgggacaucagcaccgagaucuaccaggccggcaacacccccugcaacgguguggagggcuucaacugcuacuucccccugcagagcuacggcuuccagcccaccaacggcgugggcuaccagcccuaccgggugguggugcugagcuucgagcugcugcacgcccccgccaccgugugcggcccuaaaaagagcaccaaccuggugaagaacaagugcgugaauuucaacuucaacggccugaccggcaccggcgugcugaccgagagcaacaagaaguuccugcccuuccagcaguucggccgggauaucgccgacaccaccgacgccgugcgggacccccagacccuggagauccuggacaucaccccaugcagcuucggcggcgugagcgucaucacccccggcacaaacaccagcaaccagguggcagugcuguaccagggagugaacugcaccgaggugcccguggccauccacgccgaccagcugacccccaccuggcggguguacagcaccggcagcaacguguuccagacccgggccggcugccugaucggcgccgagcacgugaacaacagcuacgagugcgacauccccaucggcgccggcaucugcgcuuccuaccagacccagaccaacagcccccggcgggcccggagcguggccagccagagcgugaucgccuacaccaugagcuuaggcgccgagaacagcguggccuacagcaacaacagcaucgccaucccuaccaacuucaccaucagcgugaccaccgagauccugcccgugagcaugaccaagaccagcguggacuguaccauguacauaugcggcgacagcaccgagugcagcaaccugcugcugcaguacggcagcuucugcacccagcugaaccgggcgcugaccggcaucgccguggagcaggacaagaacacccaagagguguucgcccaggugaagcagaucuacaagacucccccaaucaaggacuucggcggcuucaacuucagccagauccugcccgaccccagcaagcccagcaagcggagcuucaucgaggaccugcuguucaacaaggugacccuggccgacgccggcuucaucaagcaguacggcgacugccugggggauaucgccgcccgggaccugaucugcgcucagaaguucaacggccugaccgugcugcccccucugcugaccgacgagaugaucgcccaguacaccagcgcccugcuugccggcaccaucaccagcggcuggaccuucggcgccggcgccgcacugcagauccccuucgccaugcagauggccuaccgguucaacggcaucggcgugacccagaacgugcuguacgagaaccagaagcugaucgccaaccaguucaacagcgccaucggcaagauccaggacagccugagcagcaccgccagcgcccugggcaagcugcaggacguggugaaccagaacgcccaggcucugaacacccuggugaagcagcugagcagcaauuuuggcgccaucagcagcgugcugaacgacauccugucaaggcuggacaagguggaggccgaggugcagaucgaccggcugaucaccggccggcugcagagccugcagaccuacgugacccagcagcugauccgggccgccgagauccgggccagcgccaaccuggccgcaaccaagaugagcgagugcgugcugggccagagcaagcggguggacuucugcggcaagggcuaccaccugaugagcuucccccagagcgccccacacggcguggucuuccuccacgugacauacgugcccgcccaggagaagaacuucaccaccgcccccgccaucugccacgacggcaaggcccacuucccccgggagggaguguucgugagcaacggcacccacugguucgugacccagcggaacuucuacgagccccagauuaucaccaccgacaacaccuucgugagcggcaacugcgacguggugaucggcaucgugaacaacaccguguacgacccccugcagccugagcuggacagcuucaaggaggagcuggacaaguacuucaagaaccacaccagccccgacguggaucugggcgacaucagcggcaucaacgcuagcguggugaacauccagaaggagaucgaccggcugaacgagguggccaagaaccugaacgagagccugaucgaccugcaggagcugggcaaguacgagcaguacaucaaguggcccugguacaucuggcugggcuucaucgccggccugaucgccaucgugauggugaccaucaugcugugcugcaugaccagcugcuguagcugccugaagggcugcugcagcugcggcagcugcugcaaguucgacgaggacgacagcgagccagugcugaagggcgugaagcugcacuacaccugaggacuaguuauaagacugacuagcccgaugggccucccaacgggcccuccuccccuccuugcaccgagauuaauagaucuaaaaaaaaaaaaaaaaaaaaaaaaaaaaaaaaaaaaaaaaaaaaaaaaaaaaaaaaaaaaaaaaaaaaaaaaaaaaaaaaaaaaaaaaaaaaaaaaaaaa

SEQ ID NO: 25674 - RNA, 4011 nt, Artificial Sequence
  SARS-CoV-2/Wuhan/WIV05/2019__EPI_ISL_402128 spike protein mRNA gc (1-1273)(H69del_V70del_Y453F_D614G_I692V_M1229I)
aggagaaagcuuaccauguucguguuccuggugcugcugccccuggugagcagccagugcgugaaccugaccacccggacccagcugcccccugccuacaccaacagcuucacccggggcguguacuaccccgacaagguguuccggagcagcgugcugcacagcacccaggaccuguuccugcccuucuucagcaacgugaccugguuccacgccaucagcggcaccaacggcaccaagcgguucgacaacccagugcugcccuucaacgacggcguguacuucgccagcaccgagaagucaaacaucauccggggcuggaucuucggcaccacccuggacagcaagacacagagccugcugaucgugaacaacgccaccaacguggugaucaaggugugcgaguuucaguucugcaacgaccccuuccugggcguguacuaccacaagaacaacaagagcuggauggagagcgaguuccggguguacagcagcgcuaacaauugcaccuucgaguacgucagccagcccuuccugauggaccucgagggcaagcagggcaacuucaagaaccugcgggaguucguguucaagaacaucgauggcuacuucaagaucuacagcaagcacacccccaucaaccuggugcgggaccugccccagggauucagcgcccuggagccucugguggaccugcccaucggcaucaacaucaccagguuccagacccugcuggcccugcaccggagcuaccugacccccggcgacagcagcagcggcuggaccgccggcgccgccgcauacuacgugggcuaccugcagccacggaccuuccugcugaaguacaacgagaacggcaccaucaccgacgccguggacugcgcccuggacccccugagcgagaccaagugcacccuaaagagcuucaccguggagaagggcaucuaccagaccagcaacuuccgggugcagcccacugagagcaucgugcgguuccccaacauuaccaaccugugucccuucggcgagguguucaacgccacccgguucgccagcguguacgccuggaaccggaagcggaucagcaacugcguggccgacuacagcgugcuguacaacagcgccagcuucagcaccuucaagugcuacggcgugagcccuaccaagcugaacgaccugugcuucaccaacguguacgcugacagcuucgugauccggggcgacgaggugcggcagaucgcccccggccagaccggcaagaucgccgacuacaacuacaagcugcccgacgacuucaccggcugcgugaucgccuggaacagcaacaaccuggacagcaaggugggcggcaacuacaacuaccuguuccggcuguuccguaagagcaaccugaagccauuugagcgggacaucagcaccgagaucuaccaggccggcagcacccccugcaacgguguggagggcuucaacugcuacuucccccugcagagcuacggcuuccagcccaccaacggcgugggcuaccagcccuaccgggugguggugcugagcuucgagcugcugcacgcccccgccaccgugugcggcccuaaaaagagcaccaaccuggugaagaacaagugcgugaacuucaauuucaacggccugaccggcaccggcgugcugaccgagagcaacaagaaguuccugcccuuccagcaguucggccgggauaucgccgacaccaccgacgcagugcgggacccccagacccuggagauccuggacaucaccccaugcagcuucggcggcgugagcgugaucacccccggcacaaacaccagcaaccaggucgccgugcuguaccagggagugaacugcaccgaggugcccguggccauccacgccgaccagcugacccccaccuggcggguguacagcaccggcagcaacguguuccagacccgggccggcugccugaucggcgccgagcacgugaacaacuccuacgagugcgacauccccaucggcgcuggcaucugcgccagcuaccagacccagaccaacagcccccggcgggcccggagcguggccagccagagcgugaucgccuacaccaugagcuuaggcgccgagaacagcguggccuacagcaacaacagcaucgcgaucccuaccaacuucaccaucagcgugaccaccgagauccugcccgugagcaugaccaagaccagcguggacuguaccauguacauaugcggcgacagcaccgagugcagcaaccugcugcugcaguacggcagcuucugcacccagcugaaccgggcccugaccggcaucgccguggagcaggacaagaacacccaagagguguucgcccaggugaagcagaucuacaagacucccccaaucaaggacuucggcggcuucaacuucagccagauccugcccgaccccagcaagcccagcaagcggagcuucaucgaggaccugcuguucaacaaggugacccuggccgacgccggcuucaucaagcaguacggcgacugccugggggauaucgccgcucgggaccugaucugcgcccagaaguucaacggccugaccgugcugcccccucugcugaccgacgagaugaucgcccaguacaccagcgcccugcuugccggcaccaucaccagcggcuggaccuucggcgccggcgcagcccugcagauccccuucgccaugcagauggccuaccgguucaacggcaucggcgugacccagaacgugcuguacgagaaccagaagcugaucgccaaccaguucaacagcgccaucggcaagauccaggacagccugagcagcaccgccagcgcccugggcaagcugcaggacguggugaaccagaacgcucaggcccugaacacccuggugaagcagcugagcagcaacuuuggcgccaucagcucagugcugaaugacauccugagcaggcuggacaagguggaggccgaggugcagaucgaccggcugaucaccggccggcugcagagccugcagaccuacgugacccagcagcugauccgggccgccgagauccgggccagcgccaaccuggcagccaccaagaugagcgagugcgugcugggccagagcaagcggguggacuucugcggcaagggcuaccaccugaugagcuucccccagagcgccccacacggcgugguguuccuccacgucacauacgugcccgcccaggagaagaacuucaccaccgcccccgccaucugccacgacggcaaggcucacuucccccgggagggaguguucgugagcaacggcacccacugguucgugacccagcggaacuucuacgagccccagauuaucaccaccgacaacaccuucgugagcggcaacugcgacguggugaucggcaucgugaacaacaccguguacgacccccugcagccugagcuggacagcuucaaggaggagcuggacaaguacuucaagaaccacaccagccccgacguggaucugggcgacaucagcggcaucaacgccagcguggugaacauccagaaggagaucgaccggcugaacgagguggccaagaaccugaacgagagccugaucgaccugcaggagcugggcaaguacgagcaguacaucaaguggcccugguacaucuggcugggcuucaucgccggccugaucgccaucgugaucgugaccaucaugcugugcugcaugaccagcugcuguagcugccugaagggcugcugcagcugcggcagcugcugcaaguucgacgaggacgacagcgagccagugcugaagggcgugaagcugcacuacaccugaggacuaguuauaagacugacuagcccgaugggccucccaacgggcccuccuccccuccuugcaccgagauuaauagaucuaaaaaaaaaaaaaaaaaaaaaaaaaaaaaaaaaaaaaaaaaaaaaaaaaaaaaaaaaaaaaaaaaaaaaaaaaaaaaaaaaaaaaaaaaaaaaaaaaaaa

SEQ ID NO: 25675 - RNA, 4008 nt, Artificial Sequence
  SARS-CoV-2/Wuhan/WIV05/2019__EPI_ISL_402128 spike protein mRNA gc (1-1273)(H69del_V70del_Y144del_N501Y_A570D_D614G_P681H_T716I_S982 A_D1118H)
aggagaaagcuuaccauguucguguuccuggugcugcugccccuggugagcagccagugcgugaaccugaccacccggacccagcugcccccugccuacaccaacagcuucacccggggcguguacuaccccgacaagguguuccggagcagcgugcugcacagcacccaggaccuguuccugcccuucuucagcaacgugaccugguuccacgccaucagcggcaccaacggcaccaagcgguucgacaacccagugcugcccuucaacgacggcguguacuucgccagcaccgagaagucaaacaucauccggggcuggaucuucggcaccacccuggacagcaagacacagagccugcugaucgugaacaacgccaccaacguggugaucaaggugugcgaguuucaguucugcaacgaccccuuccugggcguguaccacaagaacaacaagagcuggauggagagcgaguuccggguguacagcagcgcuaacaauugcaccuucgaguacgucagccagcccuuccugauggaccucgagggcaagcagggcaacuucaagaaccugcgggaguucguguucaagaacaucgauggcuacuucaagaucuacagcaagcacacccccaucaaccuggugcgggaccugccccagggauucagcgcccuggagccucugguggaccugcccaucggcaucaacaucaccagguuccagacccugcuggcccugcaccggagcuaccugacccccggcgacagcagcagcggcuggaccgccggcgccgccgcauacuacgugggcuaccugcagccacggaccuuccugcugaaguacaacgagaacggcaccaucaccgacgccguggacugcgcccuggacccccugagcgagaccaagugcacccuaaagagcuucaccguggagaagggcaucuaccagaccagcaacuuccgggugcagcccacugagagcaucgugcgguuccccaacauuaccaaccugugucccuucggcgagguguucaacgccacccgguucgccagcguguacgccuggaaccggaagcggaucagcaacugcguggccgacuacagcgugcuguacaacagcgccagcuucagcaccuucaagugcuacggcgugagcccuaccaagcugaacgaccugugcuucaccaacguguacgcugacagcuucgugauccggggcgacgaggugcggcagaucgcccccggccagaccggcaagaucgccgacuacaacuacaagcugcccgacgacuucaccggcugcgugaucgccuggaacagcaacaaccuggacagcaaggugggcggcaacuacaacuaccuguaccggcuguuccguaagagcaaccugaagccauucgagcgggacaucagcaccgagaucuaccaggccggcagcacccccugcaacgguguggagggcuuuaacugcuacuucccccugcagagcuacggcuuccagcccaccuacggcgugggcuaccagcccuaccgggugguggugcugagcuucgagcugcugcacgcccccgccaccgugugcggcccuaaaaagagcaccaaccuggugaagaacaagugcgugaacuucaacuucaauggccugaccggcaccggcgugcugaccgagagcaacaagaaguuccugcccuuccagcaguucggccgggauaucgacgacaccaccgacgccgugcgggacccccagacccuggagauccuggacaucaccccaugcagcuucggcggcgugagcgugaucacccccggcacaaacaccagcaaccaggucgcagugcuguaccagggagugaacugcaccgaggugcccguggccauccacgccgaccagcugacccccaccuggcggguguacagcaccggcagcaacguguuccagacccgggccggcugccugaucggcgccgagcacgugaacaacuccuacgagugcgacauccccaucggcgccggcaucugcgcuagcuaccagacccagaccaacagccaccggcgggcccggagcguggccagccagagcaucaucgccuacaccaugagcuuaggcgccgagaacagcguggccuacagcaacaacagcaucgccauccccaucaacuucaccauaagcgugaccaccgagauccugccugugagcaugaccaagaccagcguggacuguaccauguacaucugcggcgacagcaccgagugcagcaaccugcugcugcaguacggcagcuucugcacccagcugaaccgggcgcugaccggcaucgccguggagcaggacaagaacacccaagagguguucgcccaggugaagcagaucuacaagaccccacccaucaaggacuucggcggcuucaacuucagccagauccugcccgaccccagcaagcccagcaagcggagcuucaucgaggaccugcuguucaacaaggugacucuggccgacgccggcuucaucaagcaguacggcgauugccugggggacaucgccgcccgggaccugaucugcgcucagaaguucaacggccugaccgugcugccuccccugcugaccgacgagaugaucgcccaguacaccagcgcccugcuugccggcaccaucaccagcggcuggaccuucggcgccggcgccgcacugcagauccccuucgccaugcagauggccuaccgguucaacggcaucggcgugacccagaacgugcuguacgagaaccagaagcugaucgccaaccaguucaacagcgccaucggcaagauccaggacagccugagcagcaccgccagcgcccugggcaagcugcaggacguggugaaccagaacgcccaggcucugaacacccuggugaagcagcugagcagcaacuucggcgccaucagcucagugcugaacgacauccuggccaggcuggacaagguggaggccgaggugcagaucgaccggcugaucaccggccggcugcagagccugcagaccuacgugacccagcagcugauccgggccgccgagauucgggccagcgccaaucuggcagccaccaagaugagcgagugcgugcugggccagagcaagcggguggacuuuugcggcaagggcuaccaccugaugagcuucccccagagcgcuccccacggcgugguguuccuccacgugaccuacgucccagcccaggagaagaacuucacaaccgcccccgccaucugccacgacggcaaggcccacuucccccgggagggaguguucgugagcaacggcacccacugguucgugacccagcggaacuucuacgagccccagaucaucaccacccacaacaccuucgugagcggcaacugcgacguggugaucggcaucgugaacaacaccguguacgacccccugcagcccgagcuggacagcuucaaggaggagcuggacaaguacuucaagaaccacaccagcccugacguggaucugggcgacaucagcggcaucaacgccagcguggugaacauccagaaggagaucgaccggcugaacgagguggccaagaaccugaacgagagccugaucgaccugcaggagcugggcaaguacgagcaguacaucaaguggcccugguacaucuggcugggcuucaucgccggccugaucgccaucgugauggugaccaucaugcugugcugcaugaccagcugcuguagcugccugaagggcugcugcagcugcggcagcugcugcaaguucgacgaggacgacagcgagcccgugcugaagggcgugaagcugcacuacaccugaggacuaguuauaagacugacuagcccgaugggccucccaacgggcccuccuccccuccuugcaccgagauuaauagaucuaaaaaaaaaaaaaaaaaaaaaaaaaaaaaaaaaaaaaaaaaaaaaaaaaaaaaaaaaaaaaaaaaaaaaaaaaaaaaaaaaaaaaaaaaaaaaaaaaaaa

SEQ ID NO: 25676 - RNA, 4017 nt, Artificial Sequence
  SARS-CoV-2/Wuhan/WIV05/2019__EPI_ISL_402128 spike protein mRNA gc (1-1273)(K417N_E484K_N501Y_D614G)
aggagaaagcuuaccauguucguguuccuggugcugcugccccuggugagcagccagugcgugaaccugaccacccggacccagcugcccccugccuacaccaacagcuucacccggggcguguacuaccccgacaagguguuccggagcagcgugcugcacagcacccaggaccuguuccugcccuucuucagcaacgugaccugguuccacgccauccacgugagcggcaccaacggcaccaagcgguucgacaacccagugcugcccuucaacgacggcguguacuucgccagcaccgagaagucaaacaucauccggggcuggaucuucggcaccacccuggacagcaagacacagagccugcugaucgugaacaacgccaccaacguggugaucaaggugugcgaguuucaguucugcaacgaccccuuccugggcguguacuaccacaagaacaacaagagcuggauggagagcgaguuccgggucuacagcagcgcuaacaauugcaccuucgaguacgugagccagcccuuccugauggaccucgagggcaagcagggcaacuucaagaaccugcgggaguucguguucaagaacaucgauggcuacuucaagaucuacagcaagcacacccccaucaaccuggugcgggaccugccccagggauucagcgcccuggagccucugguggaccugcccaucggcaucaacaucaccagguuccagacccugcuggcccugcaccggagcuaccugacccccggcgacagcagcagcggcuggaccgccggcgccgccgcauacuacgugggcuaccugcagccacggaccuuccugcugaaguacaacgagaacggcaccaucaccgacgccguggacugcgcccuggacccccugagcgagaccaagugcacccuaaagagcuucaccguggagaagggcaucuaccagaccagcaacuuccgggugcagcccacugagagcaucgugcgguuccccaacauuaccaaccugugucccuucggcgagguguucaacgccacccgguucgccagcguguacgccuggaaccggaagcggaucagcaacugcguggccgacuacagcgugcuguacaacagcgccagcuucagcaccuucaagugcuacggcgugagcccuaccaagcugaacgaccugugcuucaccaacguguacgcugacagcuucgugauccggggcgacgaggugcggcagaucgcccccggccagaccggcaacaucgccgacuacaacuacaagcugcccgacgacuucaccggcugcgugaucgccuggaacagcaacaaccuggacagcaaggugggcggcaacuacaacuaccuguaccggcuguuccguaagagcaaccugaagccauucgagcgggacaucagcaccgagaucuaccaggccggcagcacccccugcaacggugugaagggcuuuaacugcuacuucccccugcagagcuacggcuuccagcccaccuacggcgugggcuaccagcccuaccgggugguggugcugagcuucgagcugcugcacgcccccgccaccgugugcggcccuaaaaagagcaccaaccuggugaagaacaagugcgugaacuucaauuucaacggccugaccggcaccggcgugcugaccgagagcaacaagaaguuccugcccuuccagcaguucggccgggauaucgccgacaccaccgacgcagugcgggacccccagacccuggagauccuggacaucaccccaugcagcuucggcggcgugagcgucaucacccccggcacaaacaccagcaaccagguggccgugcuguaccagggagugaacugcaccgaggugcccguggccauccacgccgaccagcugacccccaccuggcggguguacagcaccggcagcaacguguuccagacccgggccggcugccugaucggcgccgagcacgugaacaacuccuacgagugcgacauccccaucggcgcuggcaucugcgccagcuaccagacccagaccaacagcccccggcgggcccggagcguggccagccagagcaucaucgccuacaccaugagcuuaggcgccgagaacagcguggccuacagcaacaacagcaucgcgaucccuaccaacuucaccaucagcgugaccaccgagauacugcccgugagcaugaccaagaccagcguggacuguaccauguacaucugcggcgacagcaccgagugcagcaaccugcugcugcaguacggcagcuucugcacccagcugaaccgggcccugaccggcaucgccguggagcaggacaagaacacccaagagguguucgcccaggugaagcagaucuacaagacucccccaaucaaggacuucggcggcuucaacuucagccagauccugcccgaccccagcaagcccagcaagcggagcuucaucgaggaccugcuguucaacaaggugacccuggccgacgccggcuucaucaagcaguacggcgacugccugggggauaucgccgcucgggaccugaucugcgcccagaaguucaacggccugaccgugcugcccccucugcugaccgacgagaugaucgcccaguacaccagcgcccugcuugccggcaccaucaccagcggcuggaccuucggcgccggcgcagcccugcagauccccuucgccaugcagauggccuaccgguucaacggcaucggcgugacccagaacgugcuguacgagaaccagaagcugaucgccaaccaguucaacagcgccaucggcaagauccaggacagccugagcagcaccgccagcgcccugggcaagcugcaggacguggugaaccagaacgcucaggcccugaacacccuggugaagcagcugagcagcaacuucggcgccaucagcucagugcugaaugacauccugagcaggcuggacaagguggaggccgaggugcagaucgaccggcugaucaccggccggcugcagagccugcagaccuacgugacccagcagcugauccgggccgccgagauccgggccagcgccaaccuggcagccaccaagaugagcgagugcgugcugggccagagcaagcggguggacuuuugcggcaagggcuaccaccugaugagcuucccccagagcgccccacacggcgugguguuccuccacgucacauacgugcccgcccaggagaagaacuucaccaccgcccccgccauuugccacgacggcaaggcucacuucccccgggagggaguguucgugagcaacggcacccacugguucgugacccagcggaacuucuacgagccccagaucaucaccaccgacaacaccuucgugagcggcaacugcgacguggugaucggcaucgugaacaacaccguguacgacccccugcagccugagcuggacagcuucaaggaggagcuggacaaguacuucaagaaccacaccagccccgacguggaucugggcgacaucagcggcaucaacgccagcguggugaacauccagaaggagaucgaccggcugaacgagguggccaagaaccugaacgagagccugaucgaccugcaggagcugggcaaguacgagcaguacaucaaguggcccugguacaucuggcugggcuucaucgccggccugaucgccaucgugauggugaccaucaugcugugcugcaugaccagcugcuguagcugccugaagggcugcugcagcugcggcagcugcugcaaguucgacgaggacgacagcgagccagugcugaagggcgugaagcugcacuacaccugaggacuaguuauaagacugacuagcccgaugggccucccaacgggcccuccuccccuccuugcaccgagauuaauagaucuaaaaaaaaaaaaaaaaaaaaaaaaaaaaaaaaaaaaaaaaaaaaaaaaaaaaaaaaaaaaaaaaaaaaaaaaaaaaaaaaaaaaaaaaaaaaaaaaaaaa

SEQ ID NO: 25677 - RNA, 4008 nt, Artificial Sequence
  SARS-CoV-2/Wuhan/WIV05/2019__EPI_ISL_402128 spike protein mRNA gc (1-1273)(L18F_D80A_D215G_L242del_A243del_L244del_R246I_K417N_E484 K_N501Y_D614G_A701V)
aggagaaagcuuaccauguucguguuccuggugcugcugccccuggugagcagccagugcgugaacuucaccacccggacccagcugcccccugccuacaccaacagcuucacccggggcguguacuaccccgacaagguguuccggagcagcgugcugcacagcacccaggaccuguuccugcccuucuucagcaacgugaccugguuccacgccauccacgugagcggcaccaacggcaccaagcgguucgccaacccagugcugcccuucaacgacggcguguacuucgccagcaccgagaagucaaacaucauccggggcuggaucuuuggcaccacccuggacagcaagacacagagccugcugaucgugaacaacgcuaccaacguggugaucaaggugugcgaguuccaguucugcaacgaccccuuccugggcguguacuaccacaagaacaacaagagcuggauggagagcgaguuccgggucuacagcagcgccaacaauugcaccuucgaguacgugagccagcccuuccugauggaccuggagggcaagcagggcaacuucaagaaccuccgggaguucguguucaagaacaucgacggcuacuucaagaucuacagcaagcacacccccaucaaccuggugcggggacugccccagggcuucagcgcccuggagccucugguggaucugcccaucggcaucaacaucaccagguuccagacccugcacaucagcuaccugacccccggcgacagcagcagcggcuggaccgccggcgccgccgcauacuacgugggcuaccugcagccacggaccuuccugcugaaguacaacgagaacggcaccaucaccgacgccguggacugcgcccuggacccccugagcgagaccaagugcacccuuaagagcuucaccguggagaagggcaucuaccagaccagcaacuuccgggugcagcccacugagagcauugugcgguuccccaacaucaccaaccugugucccuucggcgagguguucaacgccacccgguucgccagcguguacgccuggaaccggaagcggaucagcaacugcguggccgacuacagcgugcuguacaacagcgccagcuucagcaccuucaagugcuacggcgugagcccuaccaagcugaacgaccugugcuucaccaacguguacgcugacagcuucgugauccggggcgacgaggugcggcagaucgcccccggccagaccggcaacaucgccgacuacaacuacaagcugcccgacgacuucaccggcugcgugaucgccuggaacagcaacaaccuggacagcaaggugggcggcaacuacaacuaccuguaccggcuauuccguaagagcaaccugaagccauuugagcgggacaucagcaccgagaucuaccaggccgguagcacccccugcaacggcgugaagggcuucaacugcuacuucccccugcagagcuacggcuuccagcccaccuacggcgugggcuaccagcccuaccgggugguggugcugagcuucgagcugcugcacgcccccgccaccgugugcggcccuaaaaagagcaccaaccuggugaagaacaagugcgugaacuucaauuucaacggccugaccggcaccggcgugcugaccgagagcaacaagaaguuccugcccuuccagcaguucggccgggacaucgccgacaccaccgaugcagugcgggacccccagacccuggagauccuggacaucaccccaugcagcuucggcggcgugagcgucaucacccccggaacaaacaccagcaaccagguggccgugcuguaccagggcgugaacugcaccgaggugcccguggccauccacgccgaccagcugacccccaccuggcggguguacagcaccggcagcaacguguuccagacccgggccggcugccugaucggcgccgagcacgugaacaacuccuacgagugcgacauccccaucggcgcuggcaucugcgccagcuaccagacccagaccaacagcccccggcgggcccggagcguggccagccagagcaucaucgccuacaccaugagccugggcguggagaacagcguggccuacagcaacaacagcaucgccaucccuaccaacuucaccauaagcgugaccaccgagauccugcccgugagcaugaccaagaccagcguggacuguaccauguacaucugcggcgacagcaccgagugcagcaaccuguuacugcaguacggcagcuucugcacccagcugaaccgggcgcugaccggcaucgccguggagcaggacaagaacacccaagagguguucgcccaggugaagcagaucuacaagacucccccaaucaaggacuucggcggcuucaacuucagccagauccugcccgaccccagcaagcccagcaagcggagcuucaucgaggaccugcuguucaacaaggugacccuggccgacgccggcuucaucaagcaguacggggacugccugggcgacaucgccgcccgggaccugaucugcgcucagaaguucaacggccugaccgugcugcccccucugcugaccgaugagaugaucgcccaguacaccagcgcccugcuggccggcaccaucaccagcggcuggaccuucggcgccggcgccgcacugcagauccccuucgccaugcagauggccuaccgguucaacggcaucggcgugacccagaacgugcuguacgagaaccagaagcugaucgccaaccaguucaacagcgccaucggcaagauccaggacagccugagcagcaccgccagcgcccugggcaagcugcaggacguggugaaccagaacgcccaggcucugaacacccuggugaagcagcugagcagcaacuuuggcgccaucagcucagugcugaaugacauccugagccggcuggacaagguggaggccgaggugcagaucgacaggcugaucaccggccggcugcagagccugcagaccuacgugacccagcagcugauccgggccgccgagauucgggccagcgccaaccuggccgcaaccaagaugagcgagugcgugcugggccagagcaagcggguggacuucugcggcaagggcuaccaccugaugagcuucccccagagcgccccacacggcguggucuuccugcacgugacauacgugcccgcccaggagaagaacuucaccaccgcccccgccaucugccacgacggaaaggcccacuucccccgggagggcguguucgugagcaacggcacccacugguucgugacccagcggaacuucuacgagccccagaucaucaccaccgacaacaccuucgugagcggcaacugcgacguggugaucggcaucgugaacaacaccguguacgacccccugcagccugagcuggacagcuucaaggaggagcucgacaaguacuucaagaaccacaccagccccgacguggaccugggcgacaucagcggcaucaacgcuagcguggugaacauccagaaggagaucgaucggcugaacgagguggccaagaaccugaacgagagccugaucgaccugcaggagcugggcaaguacgagcaguacaucaaguggcccugguacaucuggcugggcuucaucgccggccugaucgccaucgugauggugaccaucaugcugugcugcaugaccagcugcuguagcugccugaagggcugcugcagcugcggcagcugcugcaaguucgacgaggacgacagcgagccagugcugaagggcgugaagcugcacuacaccugaggacuaguuauaagacugacuagcccgaugggccucccaacgggcccuccuccccuccuugcaccgagauuaauagaucuaaaaaaaaaaaaaaaaaaaaaaaaaaaaaaaaaaaaaaaaaaaaaaaaaaaaaaaaaaaaaaaaaaaaaaaaaaaaaaaaaaaaaaaaaaaaaaaaaaaa

SEQ ID NO: 25678 - RNA, 4017 nt, Artificial Sequence
  SARS-CoV-2/Wuhan/WIV05/2019__EPI_ISL_402128 spike protein mRNA gc (1-1273)(E484K_D614G)
aggagaaagcuuaccauguucguguuccuggugcugcugccccuggugagcagccagugcgugaaccugaccacccggacccagcugcccccugccuacaccaacagcuucacccggggcguguacuaccccgacaagguguuccggagcagcgugcugcacagcacccaggaccuguuccugcccuucuucagcaacgugaccugguuccacgccauccacgugagcggcaccaacggcaccaagcgguucgacaacccagugcugcccuucaacgacggcguguacuucgccagcaccgagaagucaaacaucauccggggcuggaucuucggcaccacccuggacagcaagacacagagccugcugaucgugaacaacgccaccaacguggugaucaaggugugcgaguuucaguucugcaacgaccccuuccugggcguguacuaccacaagaacaacaagagcuggauggagagcgaguuccgggucuacagcagcgcuaacaauugcaccuucgaguacgugagccagcccuuccugauggaccucgagggcaagcagggcaacuucaagaaccugcgggaguucguguucaagaacaucgauggcuacuucaagaucuacagcaagcacacccccaucaaccuggugcgggaccugccccagggauucagcgcccuggagccucugguggaccugcccaucggcaucaacaucaccagguuccagacccugcuggcccugcaccggagcuaccugacccccggcgacagcagcagcggcuggaccgccggcgccgccgcauacuacgugggcuaccugcagccacggaccuuccugcugaaguacaacgagaacggcaccaucaccgacgccguggacugcgcccuggacccccugagcgagaccaagugcacccuaaagagcuucaccguggagaagggcaucuaccagaccagcaacuuccgggugcagcccacugagagcaucgugcgguuccccaacauuaccaaccugugucccuucggcgagguguucaacgccacccgguucgccagcguguacgccuggaaccggaagcggaucagcaacugcguggccgacuacagcgugcuguacaacagcgccagcuucagcaccuucaagugcuacggcgugagcccuaccaagcugaacgaccugugcuucaccaacguguacgcugacagcuucgugauccggggcgacgaggugcggcagaucgcccccggccagaccggcaagaucgccgacuacaacuacaagcugcccgacgacuucaccggcugcgugaucgccuggaacagcaacaaccuggacagcaaggugggcggcaacuacaacuaccuguaccggcuguuccguaagagcaaccugaagccauucgagcgggacaucagcaccgagaucuaccaggccggcagcacccccugcaacggugugaagggcuuuaacugcuacuucccccugcagagcuacggcuuccagcccaccaacggcgugggcuaccagcccuaccgggugguggugcugagcuucgagcugcugcacgcccccgccaccgugugcggcccuaaaaagagcaccaaccuggugaagaacaagugcgugaacuucaauuucaacggccugaccggcaccggcgugcugaccgagagcaacaagaaguuccugcccuuccagcaguucggccgggauaucgccgacaccaccgacgcagugcgggacccccagacccuggagauccuggacaucaccccaugcagcuucggcggcgugagcgucaucacccccggcacaaacaccagcaaccagguggccgugcuguaccagggagugaacugcaccgaggugcccguggccauccacgccgaccagcugacccccaccuggcggguguacagcaccggcagcaacguguuccagacccgggccggcugccugaucggcgccgagcacgugaacaacuccuacgagugcgacauccccaucggcgcuggcaucugcgccagcuaccagacccagaccaacagcccccggcgggcccggagcguggccagccagagcaucaucgccuacaccaugagcuuaggcgccgagaacagcguggccuacagcaacaacagcaucgcgaucccuaccaacuucaccaucagcgugaccaccgagauacugcccgugagcaugaccaagaccagcguggacuguaccauguacaucugcggcgacagcaccgagugcagcaaccugcugcugcaguacggcagcuucugcacccagcugaaccgggcccugaccggcaucgccguggagcaggacaagaacacccaagagguguucgcccaggugaagcagaucuacaagacucccccaaucaaggacuucggcggcuucaacuucagccagauccugcccgaccccagcaagcccagcaagcggagcuucaucgaggaccugcuguucaacaaggugacccuggccgacgccggcuucaucaagcaguacggcgacugccugggggauaucgccgcucgggaccugaucugcgcccagaaguucaacggccugaccgugcugcccccucugcugaccgacgagaugaucgcccaguacaccagcgcccugcuugccggcaccaucaccagcggcuggaccuucggcgccggcgcagcccugcagauccccuucgccaugcagauggccuaccgguucaacggcaucggcgugacccagaacgugcuguacgagaaccagaagcugaucgccaaccaguucaacagcgccaucggcaagauccaggacagccugagcagcaccgccagcgcccugggcaagcugcaggacguggugaaccagaacgcucaggcccugaacacccuggugaagcagcugagcagcaacuucggcgccaucagcucagugcugaaugacauccugagcaggcuggacaagguggaggccgaggugcagaucgaccggcugaucaccggccggcugcagagccugcagaccuacgugacccagcagcugauccgggccgccgagauccgggccagcgccaaccuggcagccaccaagaugagcgagugcgugcugggccagagcaagcggguggacuuuugcggcaagggcuaccaccugaugagcuucccccagagcgccccacacggcgugguguuccuccacgucacauacgugcccgcccaggagaagaacuucaccaccgcccccgccauuugccacgacggcaaggcucacuucccccgggagggaguguucgugagcaacggcacccacugguucgugacccagcggaacuucuacgagccccagaucaucaccaccgacaacaccuucgugagcggcaacugcgacguggugaucggcaucgugaacaacaccguguacgacccccugcagccugagcuggacagcuucaaggaggagcuggacaaguacuucaagaaccacaccagccccgacguggaucugggcgacaucagcggcaucaacgccagcguggugaacauccagaaggagaucgaccggcugaacgagguggccaagaaccugaacgagagccugaucgaccugcaggagcugggcaaguacgagcaguacaucaaguggcccugguacaucuggcugggcuucaucgccggccugaucgccaucgugauggugaccaucaugcugugcugcaugaccagcugcuguagcugccugaagggcugcugcagcugcggcagcugcugcaaguucgacgaggacgacagcgagccagugcugaagggcgugaagcugcacuacaccugaggacuaguuauaagacugacuagcccgaugggccucccaacgggcccuccuccccuccuugcaccgagauuaauagaucuaaaaaaaaaaaaaaaaaaaaaaaaaaaaaaaaaaaaaaaaaaaaaaaaaaaaaaaaaaaaaaaaaaaaaaaaaaaaaaaaaaaaaaaaaaaaaaaaaaaa

SEQ ID NO: 25679 - RNA, 4017 nt, Artificial Sequence
  SARS-CoV-2/Wuhan/WIV05/2019__EPI_ISL_402128 spike protein mRNA gc (1-1273)(L18F_T20N_P26S_D138Y_R190S_K417T_E484K_N501Y_D614G_H655Y _T1027I)
aggagaaagcuuaccauguucguguuccuggugcugcugccccuggugagcagccagugcgugaacuucaccaaccggacccagcugcccagcgccuacaccaacagcuucacccggggcguguacuacccugacaagguguuccggagcagcgugcugcacagcacccaggaccuguuccugcccuucuucagcaacgugaccugguuccacgccauccacgugagcggcaccaacggcaccaagcgguucgacaaccccgugcugccauucaacgacggcguguacuucgccagcaccgagaagucaaacaucauccggggcuggaucuuuggcaccacccuggacagcaagacccagagccugcugaucgugaacaacgccacaaacguggugaucaaggugugcgaguuccaguucugcaacuaccccuuccugggcguguacuaccacaagaacaacaagagcuggauggagagcgaguuccgggucuacagcagcgcuaauaacugcaccuucgaguacgugagccagcccuuccugauggaccuggagggcaagcagggcaacuucaagaaccucagcgaguucguguucaagaacaucgacggcuacuucaagaucuacagcaagcacacccccaucaaccuggugcgggaucugccccagggauucagcgcccuggagccccugguggaccugccuaucggcaucaacaucacccgguuccagacccugcuggcccugcacaggagcuaccugacccccggcgacagcagcagcggcuggaccgccggcgccgccgcauacuacgugggcuaccugcagccccggaccuuccugcugaaguacaacgagaacggcaccaucaccgacgccguggacugcgcccuggacccacugagcgagaccaagugcacccuaaagagcuucaccguggagaagggcaucuaccagaccagcaacuuccgggugcagcccaccgagagcaucgugcgguuccccaacauuacuaaccugugucccuucggcgagguguucaacgccacccgguucgccagcguguacgccuggaaccggaagcggaucagcaacugcguggccgacuacagcgugcuguacaacagcgccagcuucagcaccuucaagugcuacggcgugagccccaccaagcugaacgaccugugcuucaccaacguguacgcugacagcuucgugauccggggcgacgaggugcggcagaucgccccuggccagaccggcaccaucgccgacuacaacuacaagcugcccgacgacuucaccggcugcgugaucgccuggaacagcaacaaccuggacagcaaggugggcggcaacuacaacuaccuguaccggcuguuccguaagagcaaccugaagcccuuugagcgggacaucagcaccgagaucuaccaggccggcagcaccccaugcaacggugugaagggcuucaacugcuacuucccccugcagagcuacggcuuccagcccaccuacggcgugggcuaccagcccuaccgggugguggugcugagcuucgagcugcugcacgcccccgccaccgugugcggccccaaaaagagcaccaaccuggugaagaacaagugcgugaacuucaauuucaacggccugaccggcaccggcgugcugaccgagagcaacaagaaguuccugccuuuccagcaguucggccgggacaucgccgauaccaccgacgcagugcgggacccccagacccuggagauccuggacaucacccccugcagcuucggcggcgugagcgucaucaccccaggcacaaacaccagcaaccagguggccgugcuguaccagggagugaacugcaccgaggugcccguggccauccacgccgaccagcugacccccaccuggcggguguacuccaccggcagcaacguguuccagacccgggccggcugccugaucggcgccgaguacgugaacaacagcuacgagugcgacauccccaucggcgcuggcaucugcgccagcuaccagacccagaccaacagcccccggcgggcccggagcguggccagccagagcaucaucgccuacaccaugagccugggcgccgagaacagcguggccuacagcaacaacagcaucgcgauccccaccaacuucaccaucagcgugaccaccgagauauuaccugugagcaugaccaagaccagcguggacuguaccauguacaucugcggcgacagcaccgagugcagcaaccugcugcugcaguacggcagcuucugcacccagcugaaccgggcccugaccggcaucgccguggagcaggacaagaacacccaagagguguucgcccaggugaagcagaucuacaagacuccacccaucaaggacuucggcggcuucaacuucagccagauccugcccgaccccagcaagcccagcaagcggagcuucaucgaggaccugcuguucaacaaggugacccuggccgacgccggcuucaucaagcaguacggcgacugccugggggacaucgccgcucgggaucugaucugcgcccagaaguucaacggccugaccgugcugccuccccugcugaccgacgagaugaucgcccaguacaccagcgcccugcuggccggcaccaucaccagcggcuggaccuucggcgccggcgcagcccuucagauccccuucgccaugcagauggccuaccgguucaacggcaucggcgugacccagaacgugcuguacgagaaccagaagcugaucgccaaccaguucaacagcgccaucggcaagauccaggacagccugagcagcaccgccagcgcccugggcaagcugcaggacguggugaaccagaacgcucaggcccugaacacccuggugaagcagcugagcucaaacuuuggcgccaucagcagcgugcugaaugacauccugagccggcuggacaagguggaggccgaggugcagaucgacaggcugaucaccggccggcugcagagccugcagaccuacgugacccagcagcugauccgggccgccgagauccgggccagcgccaaccuggcagccauuaagaugagcgagugcgugcugggccagagcaagcggguggacuucugcggcaagggcuaccaccugaugagcuucccccagagcgcuccccacggcgugguguuccugcacgucaccuacgugccagcccaggagaagaacuucacaaccgcccccgccaucugccacgacggcaaggcccacuucccccgggagggaguguucgugagcaacggcacccacugguucgugacccagcggaacuucuacgagccccagaucaucaccaccgacaacaccuucgugagcggcaacugcgacguggugaucggcaucgugaacaacaccguguacgacccccuccagcccgagcuggacagcuucaaggaggagcuggacaaguacuucaagaaccacaccagcccugacguggaccugggcgauaucagcggcaucaacgccagcguggugaacauccagaaggagaucgaccggcugaacgagguggccaagaaccugaacgagagccugaucgaccugcaggagcugggcaaguacgagcaguacaucaaguggcccugguacaucuggcugggcuucaucgccggccugaucgccaucgugauggugaccaucaugcugugcugcaugaccagcugcuguagcugccugaagggcugcugcagcugcggcagcugcugcaaguucgacgaggacgacagcgagcccgugcugaagggcgugaagcugcacuacaccugaggacuaguuauaagacugacuagcccgaugggccucccaacgggcccuccuccccuccuugcaccgagauuaauagaucuaaaaaaaaaaaaaaaaaaaaaaaaaaaaaaaaaaaaaaaaaaaaaaaaaaaaaaaaaaaaaaaaaaaaaaaaaaaaaaaaaaaaaaaaaaaaaaaaaaaa

SEQ ID NO: 25680 - RNA, 4017 nt, Artificial Sequence
  SARS-CoV-2/Wuhan/WIV05/2019__EPI_ISL_402128 spike protein mRNA gc (1-1273)(S13I_W152C_L452R_D614G)
aggagaaagcuuaccauguucguguuccuggugcugcugccccuggugagcauccagugcgugaaccugaccacccggacccagcugcccccugccuacaccaacagcuucacccggggcguguacuaccccgacaagguguuccggagcagcgugcugcacagcacccaggaccuguuccugcccuucuucagcaacgugaccugguuccacgccauccacgugagcggcaccaacggcaccaagcgguucgacaacccagugcugcccuucaacgacggcguguacuucgccagcaccgagaagucaaacaucauccggggcuggaucuucggcaccacccuggacagcaagacacagagccugcugaucgugaacaacgccaccaacguggugaucaaggugugcgaguuucaguucugcaacgaccccuuccugggcguguacuaccacaagaacaacaagagcugcauggagagcgaguuccgggucuacagcagcgcuaacaauugcaccuucgaguacgugagccagcccuuccugauggaccucgagggcaagcagggcaacuucaagaaccugcgggaguucguguucaagaacaucgauggcuacuucaagaucuacagcaagcacacccccaucaaccuggugcgggaccugccccagggauucagcgcccuggagccucugguggaccugcccaucggcaucaacaucaccagguuccagacccugcuggcccugcaccggagcuaccugacccccggcgacagcagcagcggcuggaccgccggcgccgccgcauacuacgugggcuaccugcagccacggaccuuccugcugaaguacaacgagaacggcaccaucaccgacgccguggacugcgcccuggacccccugagcgagaccaaguguacccuaaagagcuucaccguggagaagggcaucuaccagaccagcaacuuccgggugcagcccacugagagcauugugcgguuccccaacaucaccaaccugugccccuucggcgagguguucaacgccacccgguucgccagcguguacgccuggaaccggaagcggaucagcaacugcguggccgacuacagcgugcuguacaacagcgccagcuucagcaccuucaagugcuacggcgugagcccuaccaagcugaacgaccugugcuucaccaacguguacgcugacagcuucgugauccggggcgacgaggugcggcagaucgcccccggccagaccggcaagaucgccgacuacaacuacaagcugcccgacgacuucaccggcugcgugaucgccuggaacagcaacaaccuggacagcaaggugggcggcaacuacaacuaccgguaccggcuguuccguaagagcaaccugaagccauucgagcgggacaucagcaccgagaucuaccaggccggcagcacccccugcaacgguguggagggcuuuaacugcuacuucccccugcagagcuacggcuuccagcccaccaacggcgugggcuaccagcccuaccgggugguggugcugagcuucgagcugcugcacgcccccgccaccgugugcggcccuaaaaagagcaccaaccuggugaagaacaagugcgugaacuucaauuucaacggccugaccggcaccggcgugcugaccgagagcaacaagaaguuccugcccuuccagcaguucggccgggauaucgccgacaccaccgacgcagugcgggacccccagacccuggagauccuggacaucaccccaugcagcuucggcggcgugagcgucaucacccccggcacaaacaccagcaaccagguggccgugcuguaccagggagugaacugcaccgaggugcccguggccauccacgccgaccagcugacccccaccuggcggguguacagcaccggcagcaacguguuccagacccgggccggcugccugaucggcgccgagcacgugaacaacagcuacgagugcgacauccccaucggcgcuggcaucugugccuccuaccagacccagaccaacagcccccggcgggcccggagcguggccagccagagcaucaucgccuacaccaugagccugggcgccgagaacagcguggccuacagcaacaacagcaucgcgaucccuaccaacuucaccauaagcgugaccaccgagaucuuacccgugagcaugaccaagaccagcguggacugcaccauguacaucugcggcgacagcaccgagugcagcaaccugcugcugcaguacggcagcuucugcacccagcugaaccgggcccugaccggcaucgccguggagcaggacaagaacacccaagagguguucgcccaggugaagcagaucuacaagacucccccaaucaaggacuucggcggcuucaacuucagccagauccugcccgaccccagcaagcccagcaagcggagcuucaucgaggaccugcuguucaacaaggugacccuggccgacgccggcuucaucaagcaguacggcgacugccugggggauaucgccgcucgggaccugaucugcgcccagaaguucaacggccugaccgugcugcccccucugcugaccgacgagaugaucgcccaguacaccagcgcccugcuggccggcaccaucaccagcggcuggaccuucggcgccggcgcagcccuucagauccccuucgccaugcagauggccuacagguucaacggcaucggcgugacccagaacgugcuguacgagaaccagaagcugaucgccaaccaguucaacagcgccaucggcaagauccaggacagccugagcagcaccgccagcgcccugggcaagcugcaggacguggugaaccagaacgcucaggcccugaacacccuggugaagcagcugagcagcaacuucggcgccaucagcagcgugcugaaugacauccugucacggcuggacaagguggaggccgaggugcagaucgaccggcugaucaccggccggcugcagagccugcagaccuacgugacccagcagcugauccgggccgccgagauucgggccagcgccaaccuggcagccaccaagaugagcgagugcgugcugggccagagcaagcggguggacuuuugcggcaagggcuaccaccugaugagcuucccccagagcgccccacacggcgugguguuccugcacgucacauacgugcccgcccaggagaagaacuucaccaccgcccccgccaucugccacgacggcaaggcucacuucccccgggagggaguguucgugagcaacggcacccacugguucgugacccagcggaacuucuacgagccccagaucaucaccaccgacaacaccuucgugagcggcaacugcgacguggugaucggcaucgugaacaacaccguguacgacccccuccagccugagcuggacagcuucaaggaggagcuggacaaguacuucaagaaccacaccagccccgacguggaucugggcgacaucagcggcaucaacgccagcguggugaacauccagaaggagaucgaccggcugaacgagguggccaagaaccugaacgagagccugaucgaccugcaggagcugggcaaguacgagcaguacaucaaguggcccugguacaucuggcugggcuucaucgccggccugaucgccaucgugauggugaccaucaugcugugcugcaugaccagcuguugcagcugccugaagggcugcugcagcugcggcagcugcugcaaguucgacgaggacgacagcgagccagugcugaagggcgugaagcugcacuacaccugaggacuaguuauaagacugacuagcccgaugggccucccaacgggcccuccuccccuccuugcaccgagauuaauagaucuaaaaaaaaaaaaaaaaaaaaaaaaaaaaaaaaaaaaaaaaaaaaaaaaaaaaaaaaaaaaaaaaaaaaaaaaaaaaaaaaaaaaaaaaaaaaaaaaaaaa

SEQ ID NO: 25681 - RNA, 4017 nt, Artificial Sequence
  SARS-CoV-2/Wuhan/WIV05/2019__EPI_ISL_402128 spike protein mRNA gc mod (1-1273)
aggagaaagcuuaccauguucguguuucuggugcugcugccccugguguccagccagugugugaaccugaccaccagaacacagcugccuccagccuacaccaacagcuucaccagaggcguguacuaccccgacaagguguucagauccagcgugcugcacucuacccaggaccuguuccugccuuucuucagcaacgugaccugguuccacgccauccacguguccggcaccaauggcaccaagagauucgacaaccccgugcugcccuucaacgacgggguguacuuugccagcaccgagaaguccaacaucaucagaggcuggaucuucggcaccacacuggacagcaagacccagagccugcugaucgugaacaacgccaccaacguggucaucaaagugugcgaguuccaguucugcaacgaccccuuccugggcgucuacuaccacaagaacaacaagagcuggauggaaagcgaguuccggguguacagcagcgccaacaacugcaccuucgaguacgugucccagccuuuccugauggaccuggaaggcaagcagggcaacuucaagaaccugcgcgaguucguguucaagaacaucgacggcuacuucaaaaucuacagcaagcacaccccuaucaaccucgugcgggaucugccucagggcuucucugcucuggaaccccugguggaucugcccaucggcaucaacaucacccgguuucagacacugcuggcccugcacagaagcuaccugacaccuggcgauagcagcagcggauggacagcuggugccgccgcuuacuaugugggcuaccugcagccuagaaccuuccugcugaaguacaacgagaacggcaccaucaccgacgccguggauugugcucuggauccucugagcgagacaaagugcacccugaaguccuucaccguggaaaagggcaucuaccagaccagcaacuuccgggugcagcccaccgaauccaucgugcgguuccccaauaucaccaaucugugccccuucggcgagguguucaaugccaccagauucgccucuguguacgccuggaaccggaagcggaucagcaauugcguggccgacuacuccgugcuguacaacuccgccagcuucagcaccuucaagugcuacggcguguccccuaccaagcugaacgaccugugcuucacaaacguguacgccgacagcuucgugauccggggagaugaagugcggcagauugccccuggacagacaggcaagaucgccgacuacaacuacaagcugcccgacgacuucaccggcugugugauugccuggaacagcaacaaccuggacuccaaagucggcggcaacuacaauuaccuguaccggcuguuccggaaguccaaucugaagcccuucgagcgggacaucagcaccgaaaucuaucaggccggcagcaccccuugcaacggcguggaaggcuucaacugcuacuucccacugcaguccuacggcuuucagcccacaaauggcgugggcuaucagcccuacagagugguggugcugagcuucgaacugcugcaugcuccugccacagugugcggcccuaagaaaagcaccaaucucgugaagaacaaaugcgugaacuucaacuucaacggccugaccggcaccggcgugcugacagagagcaacaagaaguuccugccauuccagcaguuuggccgggauaucgccgauaccacagacgccguuagagauccccagacacuggaaauccuggacaucaccccaugcagcuucggcggagugucugugaucaccccuggcaccaacaccagcaaucagguggcagugcuguaccaggacgugaacuguaccgaagugcccguggccauucacgccgaucagcugacaccuacauggcggguguacuccaccggcagcaauguguuucagaccagagccggcugucugaucggagccgagcacgugaacaauagcuacgagugcgacauccccaucggcgcuggcaucugugccagcuaccagacacagacaaacagccccagacgggcuagaagcguggccagccagagcaucauugccuacacaaugucucugggcgccgagaacagcguggccuacuccaacaacucuaucgcuauccccaccaacuucaccaucagcgugaccaccgagauccugccuguguccaugaccaagaccagcguggacugcaccauguacaucugcggcgauuccaccgagugcuccaaccugcugcugcaguacggcagcuucugcacccagcugaauagagcccugacagggaucgccguggaacaggacaagaacacccaagagguguucgcccaagugaagcaaaucuacaagaccccuccuaucaaggacuucggcggcuucaauuucagccagauucugcccgauccuagcaagcccagcaagcggagcuucaucgaggaccugcuguucaacaaagugacacuggccgacgccggcuucaucaagcaguauggcgauugucugggcgacauugccgccagggaucugauuugcgcccagaaguuuaacggacugacagugcugccuccucugcugaccgaugagaugaucgcccaguacacaucugcccugcuggccggcacaaucacaagcggcuggacauuuggagcuggcgccgcucugcagauccccuuugcuaugcagauggccuaccgguucaacggcaucggagugacccagaaugugcuguacgagaaccagaagcugaucgccaaccaguucaacagcgccaucggcaagauccaggacagccugagcagcacagcaagcgcccugggaaagcugcaggacguggucaaccagaaugcccaggcacugaacacccuggucaagcagcuguccuccaacuucggcgccaucagcucugugcugaacgauauccugagcagacuggacaaggucgaggccgaggugcagaucgacagacugaucacaggcagacugcagagccuccagacauacgugacccagcagcugaucagagccgccgagauuagagccucugccaaucuggccgccaccaagaugucugagugugugcugggccagagcaagagaguggacuuuugcggcaagggcuaccaccugaugagcuucccucagucugccccucacggcgugguguuucugcacgugacauaugugcccgcucaagagaagaauuucaccaccgcuccagccaucugccacgacggcaaagcccacuuuccuagagaaggcguguucguguccaacggcacccauugguucgugacacagcggaacuucuacgagccccagaucaucaccaccgacaacaccuucgugucuggcaacugcgacguugugaucggcauugugaacaauaccguguacgacccucugcagcccgagcuggacagcuucaaagaggaacuggacaaguacuuuaagaaccacacaagccccgacguggaccugggcgauaucagcggaaucaaugccagcgucgugaacauccagaaagagaucgaccggcugaacgagguggccaagaaucugaacgagagccugaucgaccugcaagaacuggggaaguacgagcaguacaucaaguggcccugguacaucuggcugggcuuuaucgccggacugauugccaucgugauggucacaaucaugcuguguugcaugaccagcugcuguagcugccugaagggcuguuguagcuguggcagcugcugcaaguucgacgaggacgauucugagcccgugcugaagggcgugaaacugcacuacaccugaggacuaguuauaagacugacuagcccgaugggccucccaacgggcccuccuccccuccuugcaccgagauuaauagaucuaaaaaaaaaaaaaaaaaaaaaaaaaaaaaaaaaaaaaaaaaaaaaaaaaaaaaaaaaaaaaaaaaaaaaaaaaaaaaaaaaaaaaaaaaaaaaaaaaaaa

SEQ ID NO: 25682 - RNA, 4017 nt, Artificial Sequence
  SARS-CoV-2/Wuhan/WIV05/2019__EPI_ISL_402128 spike protein mRNA gc mod (1-1273)(D614G)
aggagaaagcuuaccauguucguguuucuggugcugcugccccugguguccagccagugugugaaccugaccaccagaacacagcugccuccagccuacaccaacagcuucaccagaggcguguacuaccccgacaagguguucagauccagcgugcugcacucuacccaggaccuguuccugccuuucuucagcaacgugaccugguuccacgccauccacguguccggcaccaauggcaccaagagauucgacaaccccgugcugcccuucaacgacgggguguacuuugccagcaccgagaaguccaacaucaucagaggcuggaucuucggcaccacacuggacagcaagacccagagccugcugaucgugaacaacgccaccaacguggucaucaaagugugcgaguuccaguucugcaacgaccccuuccugggcgucuacuaccacaagaacaacaagagcuggauggaaagcgaguuccggguguacagcagcgccaacaacugcaccuucgaguacgugucccagccuuuccugauggaccuggaaggcaagcagggcaacuucaagaaccugcgcgaguucguguucaagaacaucgacggcuacuucaaaaucuacagcaagcacaccccuaucaaccucgugcgggaucugccucagggcuucucugcucuggaaccccugguggaucugcccaucggcaucaacaucacccgguuucagacacugcuggcccugcacagaagcuaccugacaccuggcgauagcagcagcggauggacagcuggugccgccgcuuacuaugugggcuaccugcagccuagaaccuuccugcugaaguacaacgagaacggcaccaucaccgacgccguggauugugcucuggauccucugagcgagacaaagugcacccugaaguccuucaccguggaaaagggcaucuaccagaccagcaacuuccgggugcagcccaccgaauccaucgugcgguuccccaauaucaccaaucugugccccuucggcgagguguucaaugccaccagauucgccucuguguacgccuggaaccggaagcggaucagcaauugcguggccgacuacuccgugcuguacaacuccgccagcuucagcaccuucaagugcuacggcguguccccuaccaagcugaacgaccugugcuucacaaacguguacgccgacagcuucgugauccggggagaugaagugcggcagauugccccuggacagacaggcaagaucgccgacuacaacuacaagcugcccgacgacuucaccggcugugugauugccuggaacagcaacaaccuggacuccaaagucggcggcaacuacaauuaccuguaccggcuguuccggaaguccaaucugaagcccuucgagcgggacaucagcaccgaaaucuaucaggccggcagcaccccuugcaacggcguggaaggcuucaacugcuacuucccacugcaguccuacggcuuucagcccacaaauggcgugggcuaucagcccuacagagugguggugcugagcuucgaacugcugcaugcuccugccacagugugcggcccuaagaaaagcaccaaucucgugaagaacaaaugcgugaacuucaacuucaacggccugaccggcaccggcgugcugacagagagcaacaagaaguuccugccauuccagcaguuuggccgggauaucgccgauaccacagacgccguuagagauccccagacacuggaaauccuggacaucaccccaugcagcuucggcggagugucugugaucaccccuggcaccaacaccagcaaucagguggcagugcuguaccagggcgugaacuguaccgaagugcccguggccauucacgccgaucagcugacaccuacauggcggguguacuccaccggcagcaauguguuucagaccagagccggcugucugaucggagccgagcacgugaacaauagcuacgagugcgacauccccaucggcgcuggcaucugugccagcuaccagacacagacaaacagccccagacgggcuagaagcguggccagccagagcaucauugccuacacaaugucucugggcgccgagaacagcguggccuacuccaacaacucuaucgcuauccccaccaacuucaccaucagcgugaccaccgagauccugccuguguccaugaccaagaccagcguggacugcaccauguacaucugcggcgauuccaccgagugcuccaaccugcugcugcaguacggcagcuucugcacccagcugaauagagcccugacagggaucgccguggaacaggacaagaacacccaagagguguucgcccaagugaagcaaaucuacaagaccccuccuaucaaggacuucggcggcuucaauuucagccagauucugcccgauccuagcaagcccagcaagcggagcuucaucgaggaccugcuguucaacaaagugacacuggccgacgccggcuucaucaagcaguauggcgauugucugggcgacauugccgccagggaucugauuugcgcccagaaguuuaacggacugacagugcugccuccucugcugaccgaugagaugaucgcccaguacacaucugcccugcuggccggcacaaucacaagcggcuggacauuuggagcuggcgccgcucugcagauccccuuugcuaugcagauggccuaccgguucaacggcaucggagugacccagaaugugcuguacgagaaccagaagcugaucgccaaccaguucaacagcgccaucggcaagauccaggacagccugagcagcacagcaagcgcccugggaaagcugcaggacguggucaaccagaaugcccaggcacugaacacccuggucaagcagcuguccuccaacuucggcgccaucagcucugugcugaacgauauccugagcagacuggacaaggucgaggccgaggugcagaucgacagacugaucacaggcagacugcagagccuccagacauacgugacccagcagcugaucagagccgccgagauuagagccucugccaaucuggccgccaccaagaugucugagugugugcugggccagagcaagagaguggacuuuugcggcaagggcuaccaccugaugagcuucccucagucugccccucacggcgugguguuucugcacgugacauaugugcccgcucaagagaagaauuucaccaccgcuccagccaucugccacgacggcaaagcccacuuuccuagagaaggcguguucguguccaacggcacccauugguucgugacacagcggaacuucuacgagccccagaucaucaccaccgacaacaccuucgugucuggcaacugcgacguugugaucggcauugugaacaauaccguguacgacccucugcagcccgagcuggacagcuucaaagaggaacuggacaaguacuuuaagaaccacacaagccccgacguggaccugggcgauaucagcggaaucaaugccagcgucgugaacauccagaaagagaucgaccggcugaacgagguggccaagaaucugaacgagagccugaucgaccugcaagaacuggggaaguacgagcaguacaucaaguggcccugguacaucuggcugggcuuuaucgccggacugauugccaucgugauggucacaaucaugcuguguugcaugaccagcugcuguagcugccugaagggcuguuguagcuguggcagcugcugcaaguucgacgaggacgauucugagcccgugcugaagggcgugaaacugcacuacaccugaggacuaguuauaagacugacuagcccgaugggccucccaacgggcccuccuccccuccuugcaccgagauuaauagaucuaaaaaaaaaaaaaaaaaaaaaaaaaaaaaaaaaaaaaaaaaaaaaaaaaaaaaaaaaaaaaaaaaaaaaaaaaaaaaaaaaaaaaaaaaaaaaaaaaaaa

SEQ ID NO: 25683 - RNA, 4017 nt, Artificial Sequence
  SARS-CoV-2/Wuhan/WIV05/2019__EPI_ISL_402128 spike protein mRNA gc mod (1-1273)(A222V_D614G)
aggagaaagcuuaccauguucguguuucuggugcugcugccccugguguccagccagugugugaaccugaccaccagaacacagcugccuccagccuacaccaacagcuucaccagaggcguguacuaccccgacaagguguucagauccagcgugcugcacucuacccaggaccuguuccugccuuucuucagcaacgugaccugguuccacgccauccacguguccggcaccaauggcaccaagagauucgacaaccccgugcugcccuucaacgacgggguguacuuugccagcaccgagaaguccaacaucaucagaggcuggaucuucggcaccacacuggacagcaagacccagagccugcugaucgugaacaacgccaccaacguggucaucaaagugugcgaguuccaguucugcaacgaccccuuccugggcgucuacuaccacaagaacaacaagagcuggauggaaagcgaguuccggguguacagcagcgccaacaacugcaccuucgaguacgugucccagccuuuccugauggaccuggaaggcaagcagggcaacuucaagaaccugcgcgaguucguguucaagaacaucgacggcuacuucaaaaucuacagcaagcacaccccuaucaaccucgugcgggaucugccucagggcuucucugugcuggaaccccugguggaucugcccaucggcaucaacaucacccgguuucagacacugcuggcccugcacagaagcuaccugacaccuggcgauagcagcagcggauggacagcuggugccgccgcuuacuaugugggcuaccugcagccuagaaccuuccugcugaaguacaacgagaacggcaccaucaccgacgccguggauugugcucuggauccucugagcgagacaaagugcacccugaaguccuucaccguggaaaagggcaucuaccagaccagcaacuuccgggugcagcccaccgaauccaucgugcgguuccccaauaucaccaaucugugccccuucggcgagguguucaaugccaccagauucgccucuguguacgccuggaaccggaagcggaucagcaauugcguggccgacuacuccgugcuguacaacuccgccagcuucagcaccuucaagugcuacggcguguccccuaccaagcugaacgaccugugcuucacaaacguguacgccgacagcuucgugauccggggagaugaagugcggcagauugccccuggacagacaggcaagaucgccgacuacaacuacaagcugcccgacgacuucaccggcugugugauugccuggaacagcaacaaccuggacuccaaagucggcggcaacuacaauuaccuguaccggcuguuccggaaguccaaucugaagcccuucgagcgggacaucagcaccgaaaucuaucaggccggcagcaccccuugcaacggcguggaaggcuucaacugcuacuucccacugcaguccuacggcuuucagcccacaaauggcgugggcuaucagcccuacagagugguggugcugagcuucgaacugcugcaugcuccugccacagugugcggcccuaagaaaagcaccaaucucgugaagaacaaaugcgugaacuucaacuucaacggccugaccggcaccggcgugcugacagagagcaacaagaaguuccugccauuccagcaguuuggccgggauaucgccgauaccacagacgccguuagagauccccagacacuggaaauccuggacaucaccccaugcagcuucggcggagugucugugaucaccccuggcaccaacaccagcaaucagguggcagugcuguaccagggcgugaacuguaccgaagugcccguggccauucacgccgaucagcugacaccuacauggcggguguacuccaccggcagcaauguguuucagaccagagccggcugucugaucggagccgagcacgugaacaauagcuacgagugcgacauccccaucggcgcuggcaucugugccagcuaccagacacagacaaacagccccagacgggcuagaagcguggccagccagagcaucauugccuacacaaugucucugggcgccgagaacagcguggccuacuccaacaacucuaucgcuauccccaccaacuucaccaucagcgugaccaccgagauccugccuguguccaugaccaagaccagcguggacugcaccauguacaucugcggcgauuccaccgagugcuccaaccugcugcugcaguacggcagcuucugcacccagcugaauagagcccugacagggaucgccguggaacaggacaagaacacccaagagguguucgcccaagugaagcaaaucuacaagaccccuccuaucaaggacuucggcggcuucaauuucagccagauucugcccgauccuagcaagcccagcaagcggagcuucaucgaggaccugcuguucaacaaagugacacuggccgacgccggcuucaucaagcaguauggcgauugucugggcgacauugccgccagggaucugauuugcgcccagaaguuuaacggacugacagugcugccuccucugcugaccgaugagaugaucgcccaguacacaucugcccugcuggccggcacaaucacaagcggcuggacauuuggagcuggcgccgcucugcagauccccuuugcuaugcagauggccuaccgguucaacggcaucggagugacccagaaugugcuguacgagaaccagaagcugaucgccaaccaguucaacagcgccaucggcaagauccaggacagccugagcagcacagcaagcgcccugggaaagcugcaggacguggucaaccagaaugcccaggcacugaacacccuggucaagcagcuguccuccaacuucggcgccaucagcucugugcugaacgauauccugagcagacuggacaaggucgaggccgaggugcagaucgacagacugaucacaggcagacugcagagccuccagacauacgugacccagcagcugaucagagccgccgagauuagagccucugccaaucuggccgccaccaagaugucugagugugugcugggccagagcaagagaguggacuuuugcggcaagggcuaccaccugaugagcuucccucagucugccccucacggcgugguguuucugcacgugacauaugugcccgcucaagagaagaauuucaccaccgcuccagccaucugccacgacggcaaagcccacuuuccuagagaaggcguguucguguccaacggcacccauugguucgugacacagcggaacuucuacgagccccagaucaucaccaccgacaacaccuucgugucuggcaacugcgacguugugaucggcauugugaacaauaccguguacgacccucugcagcccgagcuggacagcuucaaagaggaacuggacaaguacuuuaagaaccacacaagccccgacguggaccugggcgauaucagcggaaucaaugccagcgucgugaacauccagaaagagaucgaccggcugaacgagguggccaagaaucugaacgagagccugaucgaccugcaagaacuggggaaguacgagcaguacaucaaguggcccugguacaucuggcugggcuuuaucgccggacugauugccaucgugauggucacaaucaugcuguguugcaugaccagcugcuguagcugccugaagggcuguuguagcuguggcagcugcugcaaguucgacgaggacgauucugagcccgugcugaagggcgugaaacugcacuacaccugaggacuaguuauaagacugacuagcccgaugggccucccaacgggcccuccuccccuccuugcaccgagauuaauagaucuaaaaaaaaaaaaaaaaaaaaaaaaaaaaaaaaaaaaaaaaaaaaaaaaaaaaaaaaaaaaaaaaaaaaaaaaaaaaaaaaaaaaaaaaaaaaaaaaaaaa

SEQ ID NO: 25684 - RNA, 4017 nt, Artificial Sequence
  SARS-CoV-2/Wuhan/WIV05/2019__EPI_ISL_402128 spike protein mRNA gc mod (1-1273)(N439K_D614G)
aggagaaagcuuaccauguucguguuucuggugcugcugccccugguguccagccagugugugaaccugaccaccagaacacagcugccuccagccuacaccaacagcuucaccagaggcguguacuaccccgacaagguguucagauccagcgugcugcacucuacccaggaccuguuccugccuuucuucagcaacgugaccugguuccacgccauccacguguccggcaccaauggcaccaagagauucgacaaccccgugcugcccuucaacgacgggguguacuuugccagcaccgagaaguccaacaucaucagaggcuggaucuucggcaccacacuggacagcaagacccagagccugcugaucgugaacaacgccaccaacguggucaucaaagugugcgaguuccaguucugcaacgaccccuuccugggcgucuacuaccacaagaacaacaagagcuggauggaaagcgaguuccggguguacagcagcgccaacaacugcaccuucgaguacgugucccagccuuuccugauggaccuggaaggcaagcagggcaacuucaagaaccugcgcgaguucguguucaagaacaucgacggcuacuucaaaaucuacagcaagcacaccccuaucaaccucgugcgggaucugccucagggcuucucugcucuggaaccccugguggaucugcccaucggcaucaacaucacccgguuucagacacugcuggcccugcacagaagcuaccugacaccuggcgauagcagcagcggauggacagcuggugccgccgcuuacuaugugggcuaccugcagccuagaaccuuccugcugaaguacaacgagaacggcaccaucaccgacgccguggauugugcucuggauccucugagcgagacaaagugcacccugaaguccuucaccguggaaaagggcaucuaccagaccagcaacuuccgggugcagcccaccgaauccaucgugcgguuccccaauaucaccaaucugugccccuucggcgagguguucaaugccaccagauucgccucuguguacgccuggaaccggaagcggaucagcaauugcguggccgacuacuccgugcuguacaacuccgccagcuucagcaccuucaagugcuacggcguguccccuaccaagcugaacgaccugugcuucacaaacguguacgccgacagcuucgugauccggggagaugaagugcggcagauugccccuggacagacaggcaagaucgccgacuacaacuacaagcugcccgacgacuucaccggcugugugauugccuggaacagcaagaaccuggacuccaaagucggcggcaacuacaauuaccuguaccggcuguuccggaaguccaaucugaagcccuucgagcgggacaucagcaccgaaaucuaucaggccggcagcaccccuugcaacggcguggaaggcuucaacugcuacuucccacugcaguccuacggcuuucagcccacaaauggcgugggcuaucagcccuacagagugguggugcugagcuucgaacugcugcaugcuccugccacagugugcggcccuaagaaaagcaccaaucucgugaagaacaaaugcgugaacuucaacuucaacggccugaccggcaccggcgugcugacagagagcaacaagaaguuccugccauuccagcaguuuggccgggauaucgccgauaccacagacgccguuagagauccccagacacuggaaauccuggacaucaccccaugcagcuucggcggagugucugugaucaccccuggcaccaacaccagcaaucagguggcagugcuguaccagggcgugaacuguaccgaagugcccguggccauucacgccgaucagcugacaccuacauggcggguguacuccaccggcagcaauguguuucagaccagagccggcugucugaucggagccgagcacgugaacaauagcuacgagugcgacauccccaucggcgcuggcaucugugccagcuaccagacacagacaaacagccccagacgggcuagaagcguggccagccagagcaucauugccuacacaaugucucugggcgccgagaacagcguggccuacuccaacaacucuaucgcuauccccaccaacuucaccaucagcgugaccaccgagauccugccuguguccaugaccaagaccagcguggacugcaccauguacaucugcggcgauuccaccgagugcuccaaccugcugcugcaguacggcagcuucugcacccagcugaauagagcccugacagggaucgccguggaacaggacaagaacacccaagagguguucgcccaagugaagcaaaucuacaagaccccuccuaucaaggacuucggcggcuucaauuucagccagauucugcccgauccuagcaagcccagcaagcggagcuucaucgaggaccugcuguucaacaaagugacacuggccgacgccggcuucaucaagcaguauggcgauugucugggcgacauugccgccagggaucugauuugcgcccagaaguuuaacggacugacagugcugccuccucugcugaccgaugagaugaucgcccaguacacaucugcccugcuggccggcacaaucacaagcggcuggacauuuggagcuggcgccgcucugcagauccccuuugcuaugcagauggccuaccgguucaacggcaucggagugacccagaaugugcuguacgagaaccagaagcugaucgccaaccaguucaacagcgccaucggcaagauccaggacagccugagcagcacagcaagcgcccugggaaagcugcaggacguggucaaccagaaugcccaggcacugaacacccuggucaagcagcuguccuccaacuucggcgccaucagcucugugcugaacgauauccugagcagacuggacaaggucgaggccgaggugcagaucgacagacugaucacaggcagacugcagagccuccagacauacgugacccagcagcugaucagagccgccgagauuagagccucugccaaucuggccgccaccaagaugucugagugugugcugggccagagcaagagaguggacuuuugcggcaagggcuaccaccugaugagcuucccucagucugccccucacggcgugguguuucugcacgugacauaugugcccgcucaagagaagaauuucaccaccgcuccagccaucugccacgacggcaaagcccacuuuccuagagaaggcguguucguguccaacggcacccauugguucgugacacagcggaacuucuacgagccccagaucaucaccaccgacaacaccuucgugucuggcaacugcgacguugugaucggcauugugaacaauaccguguacgacccucugcagcccgagcuggacagcuucaaagaggaacuggacaaguacuuuaagaaccacacaagccccgacguggaccugggcgauaucagcggaaucaaugccagcgucgugaacauccagaaagagaucgaccggcugaacgagguggccaagaaucugaacgagagccugaucgaccugcaagaacuggggaaguacgagcaguacaucaaguggcccugguacaucuggcugggcuuuaucgccggacugauugccaucgugauggucacaaucaugcuguguugcaugaccagcugcuguagcugccugaagggcuguuguagcuguggcagcugcugcaaguucgacgaggacgauucugagcccgugcugaagggcgugaaacugcacuacaccugaggacuaguuauaagacugacuagcccgaugggccucccaacgggcccuccuccccuccuugcaccgagauuaauagaucuaaaaaaaaaaaaaaaaaaaaaaaaaaaaaaaaaaaaaaaaaaaaaaaaaaaaaaaaaaaaaaaaaaaaaaaaaaaaaaaaaaaaaaaaaaaaaaaaaaaa

SEQ ID NO: 25685 - RNA, 4017 nt, Artificial Sequence
  SARS-CoV-2/Wuhan/WIV05/2019__EPI_ISL_402128 spike protein mRNA gc mod (1-1273)(S477N_D614G)
aggagaaagcuuaccauguucguguuucuggugcugcugccccugguguccagccagugugugaaccugaccaccagaacacagcugccuccagccuacaccaacagcuucaccagaggcguguacuaccccgacaagguguucagauccagcgugcugcacucuacccaggaccuguuccugccuuucuucagcaacgugaccugguuccacgccauccacguguccggcaccaauggcaccaagagauucgacaaccccgugcugcccuucaacgacgggguguacuuugccagcaccgagaaguccaacaucaucagaggcuggaucuucggcaccacacuggacagcaagacccagagccugcugaucgugaacaacgccaccaacguggucaucaaagugugcgaguuccaguucugcaacgaccccuuccugggcgucuacuaccacaagaacaacaagagcuggauggaaagcgaguuccggguguacagcagcgccaacaacugcaccuucgaguacgugucccagccuuuccugauggaccuggaaggcaagcagggcaacuucaagaaccugcgcgaguucguguucaagaacaucgacggcuacuucaaaaucuacagcaagcacaccccuaucaaccucgugcgggaucugccucagggcuucucugcucuggaaccccugguggaucugcccaucggcaucaacaucacccgguuucagacacugcuggcccugcacagaagcuaccugacaccuggcgauagcagcagcggauggacagcuggugccgccgcuuacuaugugggcuaccugcagccuagaaccuuccugcugaaguacaacgagaacggcaccaucaccgacgccguggauugugcucuggauccucugagcgagacaaagugcacccugaaguccuucaccguggaaaagggcaucuaccagaccagcaacuuccgggugcagcccaccgaauccaucgugcgguuccccaauaucaccaaucugugccccuucggcgagguguucaaugccaccagauucgccucuguguacgccuggaaccggaagcggaucagcaauugcguggccgacuacuccgugcuguacaacuccgccagcuucagcaccuucaagugcuacggcguguccccuaccaagcugaacgaccugugcuucacaaacguguacgccgacagcuucgugauccggggagaugaagugcggcagauugccccuggacagacaggcaagaucgccgacuacaacuacaagcugcccgacgacuucaccggcugugugauugccuggaacagcaacaaccuggacuccaaagucggcggcaacuacaauuaccuguaccggcuguuccggaaguccaaucugaagcccuucgagcgggacaucagcaccgaaaucuaucaggccggcaacaccccuugcaacggcguggaaggcuucaacugcuacuucccacugcaguccuacggcuuucagcccacaaauggcgugggcuaucagcccuacagagugguggugcugagcuucgaacugcugcaugcuccugccacagugugcggcccuaagaaaagcaccaaucucgugaagaacaaaugcgugaacuucaacuucaacggccugaccggcaccggcgugcugacagagagcaacaagaaguuccugccauuccagcaguuuggccgggauaucgccgauaccacagacgccguuagagauccccagacacuggaaauccuggacaucaccccaugcagcuucggcggagugucugugaucaccccuggcaccaacaccagcaaucagguggcagugcuguaccagggcgugaacuguaccgaagugcccguggccauucacgccgaucagcugacaccuacauggcggguguacuccaccggcagcaauguguuucagaccagagccggcugucugaucggagccgagcacgugaacaauagcuacgagugcgacauccccaucggcgcuggcaucugugccagcuaccagacacagacaaacagccccagacgggcuagaagcguggccagccagagcaucauugccuacacaaugucucugggcgccgagaacagcguggccuacuccaacaacucuaucgcuauccccaccaacuucaccaucagcgugaccaccgagauccugccuguguccaugaccaagaccagcguggacugcaccauguacaucugcggcgauuccaccgagugcuccaaccugcugcugcaguacggcagcuucugcacccagcugaauagagcccugacagggaucgccguggaacaggacaagaacacccaagagguguucgcccaagugaagcaaaucuacaagaccccuccuaucaaggacuucggcggcuucaauuucagccagauucugcccgauccuagcaagcccagcaagcggagcuucaucgaggaccugcuguucaacaaagugacacuggccgacgccggcuucaucaagcaguauggcgauugucugggcgacauugccgccagggaucugauuugcgcccagaaguuuaacggacugacagugcugccuccucugcugaccgaugagaugaucgcccaguacacaucugcccugcuggccggcacaaucacaagcggcuggacauuuggagcuggcgccgcucugcagauccccuuugcuaugcagauggccuaccgguucaacggcaucggagugacccagaaugugcuguacgagaaccagaagcugaucgccaaccaguucaacagcgccaucggcaagauccaggacagccugagcagcacagcaagcgcccugggaaagcugcaggacguggucaaccagaaugcccaggcacugaacacccuggucaagcagcuguccuccaacuucggcgccaucagcucugugcugaacgauauccugagcagacuggacaaggucgaggccgaggugcagaucgacagacugaucacaggcagacugcagagccuccagacauacgugacccagcagcugaucagagccgccgagauuagagccucugccaaucuggccgccaccaagaugucugagugugugcugggccagagcaagagaguggacuuuugcggcaagggcuaccaccugaugagcuucccucagucugccccucacggcgugguguuucugcacgugacauaugugcccgcucaagagaagaauuucaccaccgcuccagccaucugccacgacggcaaagcccacuuuccuagagaaggcguguucguguccaacggcacccauugguucgugacacagcggaacuucuacgagccccagaucaucaccaccgacaacaccuucgugucuggcaacugcgacguugugaucggcauugugaacaauaccguguacgacccucugcagcccgagcuggacagcuucaaagaggaacuggacaaguacuuuaagaaccacacaagccccgacguggaccugggcgauaucagcggaaucaaugccagcgucgugaacauccagaaagagaucgaccggcugaacgagguggccaagaaucugaacgagagccugaucgaccugcaagaacuggggaaguacgagcaguacaucaaguggcccugguacaucuggcugggcuuuaucgccggacugauugccaucgugauggucacaaucaugcuguguugcaugaccagcugcuguagcugccugaagggcuguuguagcuguggcagcugcugcaaguucgacgaggacgauucugagcccgugcugaagggcgugaaacugcacuacaccugaggacuaguuauaagacugacuagcccgaugggccucccaacgggcccuccuccccuccuugcaccgagauuaauagaucuaaaaaaaaaaaaaaaaaaaaaaaaaaaaaaaaaaaaaaaaaaaaaaaaaaaaaaaaaaaaaaaaaaaaaaaaaaaaaaaaaaaaaaaaaaaaaaaaaaaa

SEQ ID NO: 25686 - RNA, 4017 nt, Artificial Sequence
  SARS-CoV-2/Wuhan/WIV05/2019__EPI_ISL_402128 spike protein mRNA gc mod (1-1273)(N501Y_D614G)
aggagaaagcuuaccauguucguguuucuggugcugcugccccugguguccagccagugugugaaccugaccaccagaacacagcugccuccagccuacaccaacagcuucaccagaggcguguacuaccccgacaagguguucagauccagcgugcugcacucuacccaggaccuguuccugccuuucuucagcaacgugaccugguuccacgccauccacguguccggcaccaauggcaccaagagauucgacaaccccgugcugcccuucaacgacgggguguacuuugccagcaccgagaaguccaacaucaucagaggcuggaucuucggcaccacacuggacagcaagacccagagccugcugaucgugaacaacgccaccaacguggucaucaaagugugcgaguuccaguucugcaacgaccccuuccugggcgucuacuaccacaagaacaacaagagcuggauggaaagcgaguuccggguguacagcagcgccaacaacugcaccuucgaguacgugucccagccuuuccugauggaccuggaaggcaagcagggcaacuucaagaaccugcgcgaguucguguucaagaacaucgacggcuacuucaaaaucuacagcaagcacaccccuaucaaccucgugcgggaucugccucagggcuucucugcucuggaaccccugguggaucugcccaucggcaucaacaucacccgguuucagacacugcuggcccugcacagaagcuaccugacaccuggcgauagcagcagcggauggacagcuggugccgccgcuuacuaugugggcuaccugcagccuagaaccuuccugcugaaguacaacgagaacggcaccaucaccgacgccguggauugugcucuggauccucugagcgagacaaagugcacccugaaguccuucaccguggaaaagggcaucuaccagaccagcaacuuccgggugcagcccaccgaauccaucgugcgguuccccaauaucaccaaucugugccccuucggcgagguguucaaugccaccagauucgccucuguguacgccuggaaccggaagcggaucagcaauugcguggccgacuacuccgugcuguacaacuccgccagcuucagcaccuucaagugcuacggcguguccccuaccaagcugaacgaccugugcuucacaaacguguacgccgacagcuucgugauccggggagaugaagugcggcagauugccccuggacagacaggcaagaucgccgacuacaacuacaagcugcccgacgacuucaccggcugugugauugccuggaacagcaacaaccuggacuccaaagucggcggcaacuacaauuaccuguaccggcuguuccggaaguccaaucugaagcccuucgagcgggacaucagcaccgaaaucuaucaggccggcagcaccccuugcaacggcguggaaggcuucaacugcuacuucccacugcaguccuacggcuuucagcccacauacggcgugggcuaucagcccuacagagugguggugcugagcuucgaacugcugcaugcuccugccacagugugcggcccuaagaaaagcaccaaucucgugaagaacaaaugcgugaacuucaacuucaacggccugaccggcaccggcgugcugacagagagcaacaagaaguuccugccauuccagcaguuuggccgggauaucgccgauaccacagacgccguuagagauccccagacacuggaaauccuggacaucaccccaugcagcuucggcggagugucugugaucaccccuggcaccaacaccagcaaucagguggcagugcuguaccagggcgugaacuguaccgaagugcccguggccauucacgccgaucagcugacaccuacauggcggguguacuccaccggcagcaauguguuucagaccagagccggcugucugaucggagccgagcacgugaacaauagcuacgagugcgacauccccaucggcgcuggcaucugugccagcuaccagacacagacaaacagccccagacgggcuagaagcguggccagccagagcaucauugccuacacaaugucucugggcgccgagaacagcguggccuacuccaacaacucuaucgcuauccccaccaacuucaccaucagcgugaccaccgagauccugccuguguccaugaccaagaccagcguggacugcaccauguacaucugcggcgauuccaccgagugcuccaaccugcugcugcaguacggcagcuucugcacccagcugaauagagcccugacagggaucgccguggaacaggacaagaacacccaagagguguucgcccaagugaagcaaaucuacaagaccccuccuaucaaggacuucggcggcuucaauuucagccagauucugcccgauccuagcaagcccagcaagcggagcuucaucgaggaccugcuguucaacaaagugacacuggccgacgccggcuucaucaagcaguauggcgauugucugggcgacauugccgccagggaucugauuugcgcccagaaguuuaacggacugacagugcugccuccucugcugaccgaugagaugaucgcccaguacacaucugcccugcuggccggcacaaucacaagcggcuggacauuuggagcuggcgccgcucugcagauccccuuugcuaugcagauggccuaccgguucaacggcaucggagugacccagaaugugcuguacgagaaccagaagcugaucgccaaccaguucaacagcgccaucggcaagauccaggacagccugagcagcacagcaagcgcccugggaaagcugcaggacguggucaaccagaaugcccaggcacugaacacccuggucaagcagcuguccuccaacuucggcgccaucagcucugugcugaacgauauccugagcagacuggacaaggucgaggccgaggugcagaucgacagacugaucacaggcagacugcagagccuccagacauacgugacccagcagcugaucagagccgccgagauuagagccucugccaaucuggccgccaccaagaugucugagugugugcugggccagagcaagagaguggacuuuugcggcaagggcuaccaccugaugagcuucccucagucugccccucacggcgugguguuucugcacgugacauaugugcccgcucaagagaagaauuucaccaccgcuccagccaucugccacgacggcaaagcccacuuuccuagagaaggcguguucguguccaacggcacccauugguucgugacacagcggaacuucuacgagccccagaucaucaccaccgacaacaccuucgugucuggcaacugcgacguugugaucggcauugugaacaauaccguguacgacccucugcagcccgagcuggacagcuucaaagaggaacuggacaaguacuuuaagaaccacacaagccccgacguggaccugggcgauaucagcggaaucaaugccagcgucgugaacauccagaaagagaucgaccggcugaacgagguggccaagaaucugaacgagagccugaucgaccugcaagaacuggggaaguacgagcaguacaucaaguggcccugguacaucuggcugggcuuuaucgccggacugauugccaucgugauggucacaaucaugcuguguugcaugaccagcugcuguagcugccugaagggcuguuguagcuguggcagcugcugcaaguucgacgaggacgauucugagcccgugcugaagggcgugaaacugcacuacaccugaggacuaguuauaagacugacuagcccgaugggccucccaacgggcccuccuccccuccuugcaccgagauuaauagaucuaaaaaaaaaaaaaaaaaaaaaaaaaaaaaaaaaaaaaaaaaaaaaaaaaaaaaaaaaaaaaaaaaaaaaaaaaaaaaaaaaaaaaaaaaaaaaaaaaaaa

SEQ ID NO: 25687 - RNA, 4011 nt, Artificial Sequence
  SARS-CoV-2/Wuhan/WIV05/2019__EPI_ISL_402128 spike protein mRNA gc mod (1-1273)(H69del_V70del_D614G)
aggagaaagcuuaccauguucguguuucuggugcugcugccccugguguccagccagugugugaaccugaccaccagaacacagcugccuccagccuacaccaacagcuucaccagaggcguguacuaccccgacaagguguucagauccagcgugcugcacucuacccaggaccuguuccugccuuucuucagcaacgugaccugguuccacgccaucuccggcaccaauggcaccaagagauucgacaaccccgugcugcccuucaacgacgggguguacuuugccagcaccgagaaguccaacaucaucagaggcuggaucuucggcaccacacuggacagcaagacccagagccugcugaucgugaacaacgccaccaacguggucaucaaagugugcgaguuccaguucugcaacgaccccuuccugggcgucuacuaccacaagaacaacaagagcuggauggaaagcgaguuccggguguacagcagcgccaacaacugcaccuucgaguacgugucccagccuuuccugauggaccuggaaggcaagcagggcaacuucaagaaccugcgcgaguucguguucaagaacaucgacggcuacuucaaaaucuacagcaagcacaccccuaucaaccucgugcgggaucugccucagggcuucucugcucuggaaccccugguggaucugcccaucggcaucaacaucacccgguuucagacacugcuggcccugcacagaagcuaccugacaccuggcgauagcagcagcggauggacagcuggugccgccgcuuacuaugugggcuaccugcagccuagaaccuuccugcugaaguacaacgagaacggcaccaucaccgacgccguggauugugcucuggauccucugagcgagacaaagugcacccugaaguccuucaccguggaaaagggcaucuaccagaccagcaacuuccgggugcagcccaccgaauccaucgugcgguuccccaauaucaccaaucugugccccuucggcgagguguucaaugccaccagauucgccucuguguacgccuggaaccggaagcggaucagcaauugcguggccgacuacuccgugcuguacaacuccgccagcuucagcaccuucaagugcuacggcguguccccuaccaagcugaacgaccugugcuucacaaacguguacgccgacagcuucgugauccggggagaugaagugcggcagauugccccuggacagacaggcaagaucgccgacuacaacuacaagcugcccgacgacuucaccggcugugugauugccuggaacagcaacaaccuggacuccaaagucggcggcaacuacaauuaccuguaccggcuguuccggaaguccaaucugaagcccuucgagcgggacaucagcaccgaaaucuaucaggccggcagcaccccuugcaacggcguggaaggcuucaacugcuacuucccacugcaguccuacggcuuucagcccacaaauggcgugggcuaucagcccuacagagugguggugcugagcuucgaacugcugcaugcuccugccacagugugcggcccuaagaaaagcaccaaucucgugaagaacaaaugcgugaacuucaacuucaacggccugaccggcaccggcgugcugacagagagcaacaagaaguuccugccauuccagcaguuuggccgggauaucgccgauaccacagacgccguuagagauccccagacacuggaaauccuggacaucaccccaugcagcuucggcggagugucugugaucaccccuggcaccaacaccagcaaucagguggcagugcuguaccagggcgugaacuguaccgaagugcccguggccauucacgccgaucagcugacaccuacauggcggguguacuccaccggcagcaauguguuucagaccagagccggcugucugaucggagccgagcacgugaacaauagcuacgagugcgacauccccaucggcgcuggcaucugugccagcuaccagacacagacaaacagccccagacgggcuagaagcguggccagccagagcaucauugccuacacaaugucucugggcgccgagaacagcguggccuacuccaacaacucuaucgcuauccccaccaacuucaccaucagcgugaccaccgagauccugccuguguccaugaccaagaccagcguggacugcaccauguacaucugcggcgauuccaccgagugcuccaaccugcugcugcaguacggcagcuucugcacccagcugaauagagcccugacagggaucgccguggaacaggacaagaacacccaagagguguucgcccaagugaagcaaaucuacaagaccccuccuaucaaggacuucggcggcuucaauuucagccagauucugcccgauccuagcaagcccagcaagcggagcuucaucgaggaccugcuguucaacaaagugacacuggccgacgccggcuucaucaagcaguauggcgauugucugggcgacauugccgccagggaucugauuugcgcccagaaguuuaacggacugacagugcugccuccucugcugaccgaugagaugaucgcccaguacacaucugcccugcuggccggcacaaucacaagcggcuggacauuuggagcuggcgccgcucugcagauccccuuugcuaugcagauggccuaccgguucaacggcaucggagugacccagaaugugcuguacgagaaccagaagcugaucgccaaccaguucaacagcgccaucggcaagauccaggacagccugagcagcacagcaagcgcccugggaaagcugcaggacguggucaaccagaaugcccaggcacugaacacccuggucaagcagcuguccuccaacuucggcgccaucagcucugugcugaacgauauccugagcagacuggacaaggucgaggccgaggugcagaucgacagacugaucacaggcagacugcagagccuccagacauacgugacccagcagcugaucagagccgccgagauuagagccucugccaaucuggccgccaccaagaugucugagugugugcugggccagagcaagagaguggacuuuugcggcaagggcuaccaccugaugagcuucccucagucugccccucacggcgugguguuucugcacgugacauaugugcccgcucaagagaagaauuucaccaccgcuccagccaucugccacgacggcaaagcccacuuuccuagagaaggcguguucguguccaacggcacccauugguucgugacacagcggaacuucuacgagccccagaucaucaccaccgacaacaccuucgugucuggcaacugcgacguugugaucggcauugugaacaauaccguguacgacccucugcagcccgagcuggacagcuucaaagaggaacuggacaaguacuuuaagaaccacacaagccccgacguggaccugggcgauaucagcggaaucaaugccagcgucgugaacauccagaaagagaucgaccggcugaacgagguggccaagaaucugaacgagagccugaucgaccugcaagaacuggggaaguacgagcaguacaucaaguggcccugguacaucuggcugggcuuuaucgccggacugauugccaucgugauggucacaaucaugcuguguugcaugaccagcugcuguagcugccugaagggcuguuguagcuguggcagcugcugcaaguucgacgaggacgauucugagcccgugcugaagggcgugaaacugcacuacaccugaggacuaguuauaagacugacuagcccgaugggccucccaacgggcccuccuccccuccuugcaccgagauuaauagaucuaaaaaaaaaaaaaaaaaaaaaaaaaaaaaaaaaaaaaaaaaaaaaaaaaaaaaaaaaaaaaaaaaaaaaaaaaaaaaaaaaaaaaaaaaaaaaaaaaaaa

SEQ ID NO: 25688 - RNA, 4017 nt, Artificial Sequence
  SARS-CoV-2/Wuhan/WIV05/2019__EPI_ISL_402128 spike protein mRNA gc mod (1-1273)(Y453F_D614G)
aggagaaagcuuaccauguucguguuucuggugcugcugccccugguguccagccagugugugaaccugaccaccagaacacagcugccuccagccuacaccaacagcuucaccagaggcguguacuaccccgacaagguguucagauccagcgugcugcacucuacccaggaccuguuccugccuuucuucagcaacgugaccugguuccacgccauccacguguccggcaccaauggcaccaagagauucgacaaccccgugcugcccuucaacgacgggguguacuuugccagcaccgagaaguccaacaucaucagaggcuggaucuucggcaccacacuggacagcaagacccagagccugcugaucgugaacaacgccaccaacguggucaucaaagugugcgaguuccaguucugcaacgaccccuuccugggcgucuacuaccacaagaacaacaagagcuggauggaaagcgaguuccggguguacagcagcgccaacaacugcaccuucgaguacgugucccagccuuuccugauggaccuggaaggcaagcagggcaacuucaagaaccugcgcgaguucguguucaagaacaucgacggcuacuucaaaaucuacagcaagcacaccccuaucaaccucgugcgggaucugccucagggcuucucugcucuggaaccccugguggaucugcccaucggcaucaacaucacccgguuucagacacugcuggcccugcacagaagcuaccugacaccuggcgauagcagcagcggauggacagcuggugccgccgcuuacuaugugggcuaccugcagccuagaaccuuccugcugaaguacaacgagaacggcaccaucaccgacgccguggauugugcucuggauccucugagcgagacaaagugcacccugaaguccuucaccguggaaaagggcaucuaccagaccagcaacuuccgggugcagcccaccgaauccaucgugcgguuccccaauaucaccaaucugugccccuucggcgagguguucaaugccaccagauucgccucuguguacgccuggaaccggaagcggaucagcaauugcguggccgacuacuccgugcuguacaacuccgccagcuucagcaccuucaagugcuacggcguguccccuaccaagcugaacgaccugugcuucacaaacguguacgccgacagcuucgugauccggggagaugaagugcggcagauugccccuggacagacaggcaagaucgccgacuacaacuacaagcugcccgacgacuucaccggcugugugauugccuggaacagcaacaaccuggacuccaaagucggcggcaacuacaauuaccuguuccggcuguuccggaaguccaaucugaagcccuucgagcgggacaucagcaccgaaaucuaucaggccggcagcaccccuugcaacggcguggaaggcuucaacugcuacuucccacugcaguccuacggcuuucagcccacaaauggcgugggcuaucagcccuacagagugguggugcugagcuucgaacugcugcaugcuccugccacagugugcggcccuaagaaaagcaccaaucucgugaagaacaaaugcgugaacuucaacuucaacggccugaccggcaccggcgugcugacagagagcaacaagaaguuccugccauuccagcaguuuggccgggauaucgccgauaccacagacgccguuagagauccccagacacuggaaauccuggacaucaccccaugcagcuucggcggagugucugugaucaccccuggcaccaacaccagcaaucagguggcagugcuguaccagggcgugaacuguaccgaagugcccguggccauucacgccgaucagcugacaccuacauggcggguguacuccaccggcagcaauguguuucagaccagagccggcugucugaucggagccgagcacgugaacaauagcuacgagugcgacauccccaucggcgcuggcaucugugccagcuaccagacacagacaaacagccccagacgggcuagaagcguggccagccagagcaucauugccuacacaaugucucugggcgccgagaacagcguggccuacuccaacaacucuaucgcuauccccaccaacuucaccaucagcgugaccaccgagauccugccuguguccaugaccaagaccagcguggacugcaccauguacaucugcggcgauuccaccgagugcuccaaccugcugcugcaguacggcagcuucugcacccagcugaauagagcccugacagggaucgccguggaacaggacaagaacacccaagagguguucgcccaagugaagcaaaucuacaagaccccuccuaucaaggacuucggcggcuucaauuucagccagauucugcccgauccuagcaagcccagcaagcggagcuucaucgaggaccugcuguucaacaaagugacacuggccgacgccggcuucaucaagcaguauggcgauugucugggcgacauugccgccagggaucugauuugcgcccagaaguuuaacggacugacagugcugccuccucugcugaccgaugagaugaucgcccaguacacaucugcccugcuggccggcacaaucacaagcggcuggacauuuggagcuggcgccgcucugcagauccccuuugcuaugcagauggccuaccgguucaacggcaucggagugacccagaaugugcuguacgagaaccagaagcugaucgccaaccaguucaacagcgccaucggcaagauccaggacagccugagcagcacagcaagcgcccugggaaagcugcaggacguggucaaccagaaugcccaggcacugaacacccuggucaagcagcuguccuccaacuucggcgccaucagcucugugcugaacgauauccugagcagacuggacaaggucgaggccgaggugcagaucgacagacugaucacaggcagacugcagagccuccagacauacgugacccagcagcugaucagagccgccgagauuagagccucugccaaucuggccgccaccaagaugucugagugugugcugggccagagcaagagaguggacuuuugcggcaagggcuaccaccugaugagcuucccucagucugccccucacggcgugguguuucugcacgugacauaugugcccgcucaagagaagaauuucaccaccgcuccagccaucugccacgacggcaaagcccacuuuccuagagaaggcguguucguguccaacggcacccauugguucgugacacagcggaacuucuacgagccccagaucaucaccaccgacaacaccuucgugucuggcaacugcgacguugugaucggcauugugaacaauaccguguacgacccucugcagcccgagcuggacagcuucaaagaggaacuggacaaguacuuuaagaaccacacaagccccgacguggaccugggcgauaucagcggaaucaaugccagcgucgugaacauccagaaagagaucgaccggcugaacgagguggccaagaaucugaacgagagccugaucgaccugcaagaacuggggaaguacgagcaguacaucaaguggcccugguacaucuggcugggcuuuaucgccggacugauugccaucgugauggucacaaucaugcuguguugcaugaccagcugcuguagcugccugaagggcuguuguagcuguggcagcugcugcaaguucgacgaggacgauucugagcccgugcugaagggcgugaaacugcacuacaccugaggacuaguuauaagacugacuagcccgaugggccucccaacgggcccuccuccccuccuugcaccgagauuaauagaucuaaaaaaaaaaaaaaaaaaaaaaaaaaaaaaaaaaaaaaaaaaaaaaaaaaaaaaaaaaaaaaaaaaaaaaaaaaaaaaaaaaaaaaaaaaaaaaaaaaaa

SEQ ID NO: 25689 - RNA, 4017 nt, Artificial Sequence
  SARS-CoV-2/Wuhan/WIV05/2019__EPI_ISL_402128 spike protein mRNA gc mod (1-1273)(D614G_I692V)
aggagaaagcuuaccauguucguguuucuggugcugcugccccugguguccagccagugugugaaccugaccaccagaacacagcugccuccagccuacaccaacagcuucaccagaggcguguacuaccccgacaagguguucagauccagcgugcugcacucuacccaggaccuguuccugccuuucuucagcaacgugaccugguuccacgccauccacguguccggcaccaauggcaccaagagauucgacaaccccgugcugcccuucaacgacgggguguacuuugccagcaccgagaaguccaacaucaucagaggcuggaucuucggcaccacacuggacagcaagacccagagccugcugaucgugaacaacgccaccaacguggucaucaaagugugcgaguuccaguucugcaacgaccccuuccugggcgucuacuaccacaagaacaacaagagcuggauggaaagcgaguuccggguguacagcagcgccaacaacugcaccuucgaguacgugucccagccuuuccugauggaccuggaaggcaagcagggcaacuucaagaaccugcgcgaguucguguucaagaacaucgacggcuacuucaaaaucuacagcaagcacaccccuaucaaccucgugcgggaucugccucagggcuucucugcucuggaaccccugguggaucugcccaucggcaucaacaucacccgguuucagacacugcuggcccugcacagaagcuaccugacaccuggcgauagcagcagcggauggacagcuggugccgccgcuuacuaugugggcuaccugcagccuagaaccuuccugcugaaguacaacgagaacggcaccaucaccgacgccguggauugugcucuggauccucugagcgagacaaagugcacccugaaguccuucaccguggaaaagggcaucuaccagaccagcaacuuccgggugcagcccaccgaauccaucgugcgguuccccaauaucaccaaucugugccccuucggcgagguguucaaugccaccagauucgccucuguguacgccuggaaccggaagcggaucagcaauugcguggccgacuacuccgugcuguacaacuccgccagcuucagcaccuucaagugcuacggcguguccccuaccaagcugaacgaccugugcuucacaaacguguacgccgacagcuucgugauccggggagaugaagugcggcagauugccccuggacagacaggcaagaucgccgacuacaacuacaagcugcccgacgacuucaccggcugugugauugccuggaacagcaacaaccuggacuccaaagucggcggcaacuacaauuaccuguaccggcuguuccggaaguccaaucugaagcccuucgagcgggacaucagcaccgaaaucuaucaggccggcagcaccccuugcaacggcguggaaggcuucaacugcuacuucccacugcaguccuacggcuuucagcccacaaauggcgugggcuaucagcccuacagagugguggugcugagcuucgaacugcugcaugcuccugccacagugugcggcccuaagaaaagcaccaaucucgugaagaacaaaugcgugaacuucaacuucaacggccugaccggcaccggcgugcugacagagagcaacaagaaguuccugccauuccagcaguuuggccgggauaucgccgauaccacagacgccguuagagauccccagacacuggaaauccuggacaucaccccaugcagcuucggcggagugucugugaucaccccuggcaccaacaccagcaaucagguggcagugcuguaccagggcgugaacuguaccgaagugcccguggccauucacgccgaucagcugacaccuacauggcggguguacuccaccggcagcaauguguuucagaccagagccggcugucugaucggagccgagcacgugaacaauagcuacgagugcgacauccccaucggcgcuggcaucugugccagcuaccagacacagacaaacagccccagacgggcuagaagcguggccagccagagcgugauugccuacacaaugucucugggcgccgagaacagcguggccuacuccaacaacucuaucgcuauccccaccaacuucaccaucagcgugaccaccgagauccugccuguguccaugaccaagaccagcguggacugcaccauguacaucugcggcgauuccaccgagugcuccaaccugcugcugcaguacggcagcuucugcacccagcugaauagagcccugacagggaucgccguggaacaggacaagaacacccaagagguguucgcccaagugaagcaaaucuacaagaccccuccuaucaaggacuucggcggcuucaauuucagccagauucugcccgauccuagcaagcccagcaagcggagcuucaucgaggaccugcuguucaacaaagugacacuggccgacgccggcuucaucaagcaguauggcgauugucugggcgacauugccgccagggaucugauuugcgcccagaaguuuaacggacugacagugcugccuccucugcugaccgaugagaugaucgcccaguacacaucugcccugcuggccggcacaaucacaagcggcuggacauuuggagcuggcgccgcucugcagauccccuuugcuaugcagauggccuaccgguucaacggcaucggagugacccagaaugugcuguacgagaaccagaagcugaucgccaaccaguucaacagcgccaucggcaagauccaggacagccugagcagcacagcaagcgcccugggaaagcugcaggacguggucaaccagaaugcccaggcacugaacacccuggucaagcagcuguccuccaacuucggcgccaucagcucugugcugaacgauauccugagcagacuggacaaggucgaggccgaggugcagaucgacagacugaucacaggcagacugcagagccuccagacauacgugacccagcagcugaucagagccgccgagauuagagccucugccaaucuggccgccaccaagaugucugagugugugcugggccagagcaagagaguggacuuuugcggcaagggcuaccaccugaugagcuucccucagucugccccucacggcgugguguuucugcacgugacauaugugcccgcucaagagaagaauuucaccaccgcuccagccaucugccacgacggcaaagcccacuuuccuagagaaggcguguucguguccaacggcacccauugguucgugacacagcggaacuucuacgagccccagaucaucaccaccgacaacaccuucgugucuggcaacugcgacguugugaucggcauugugaacaauaccguguacgacccucugcagcccgagcuggacagcuucaaagaggaacuggacaaguacuuuaagaaccacacaagccccgacguggaccugggcgauaucagcggaaucaaugccagcgucgugaacauccagaaagagaucgaccggcugaacgagguggccaagaaucugaacgagagccugaucgaccugcaagaacuggggaaguacgagcaguacaucaaguggcccugguacaucuggcugggcuuuaucgccggacugauugccaucgugauggucacaaucaugcuguguugcaugaccagcugcuguagcugccugaagggcuguuguagcuguggcagcugcugcaaguucgacgaggacgauucugagcccgugcugaagggcgugaaacugcacuacaccugaggacuaguuauaagacugacuagcccgaugggccucccaacgggcccuccuccccuccuugcaccgagauuaauagaucuaaaaaaaaaaaaaaaaaaaaaaaaaaaaaaaaaaaaaaaaaaaaaaaaaaaaaaaaaaaaaaaaaaaaaaaaaaaaaaaaaaaaaaaaaaaaaaaaaaaa

SEQ ID NO: 25690 - RNA, 4017 nt, Artificial Sequence
  SARS-CoV-2/Wuhan/WIV05/2019__EPI_ISL_402128 spike protein mRNA gc mod (1-1273)(D614G_M1229I)
aggagaaagcuuaccauguucguguuucuggugcugcugccccugguguccagccagugugugaaccugaccaccagaacacagcugccuccagccuacaccaacagcuucaccagaggcguguacuaccccgacaagguguucagauccagcgugcugcacucuacccaggaccuguuccugccuuucuucagcaacgugaccugguuccacgccauccacguguccggcaccaauggcaccaagagauucgacaaccccgugcugcccuucaacgacgggguguacuuugccagcaccgagaaguccaacaucaucagaggcuggaucuucggcaccacacuggacagcaagacccagagccugcugaucgugaacaacgccaccaacguggucaucaaagugugcgaguuccaguucugcaacgaccccuuccugggcgucuacuaccacaagaacaacaagagcuggauggaaagcgaguuccggguguacagcagcgccaacaacugcaccuucgaguacgugucccagccuuuccugauggaccuggaaggcaagcagggcaacuucaagaaccugcgcgaguucguguucaagaacaucgacggcuacuucaaaaucuacagcaagcacaccccuaucaaccucgugcgggaucugccucagggcuucucugcucuggaaccccugguggaucugcccaucggcaucaacaucacccgguuucagacacugcuggcccugcacagaagcuaccugacaccuggcgauagcagcagcggauggacagcuggugccgccgcuuacuaugugggcuaccugcagccuagaaccuuccugcugaaguacaacgagaacggcaccaucaccgacgccguggauugugcucuggauccucugagcgagacaaagugcacccugaaguccuucaccguggaaaagggcaucuaccagaccagcaacuuccgggugcagcccaccgaauccaucgugcgguuccccaauaucaccaaucugugccccuucggcgagguguucaaugccaccagauucgccucuguguacgccuggaaccggaagcggaucagcaauugcguggccgacuacuccgugcuguacaacuccgccagcuucagcaccuucaagugcuacggcguguccccuaccaagcugaacgaccugugcuucacaaacguguacgccgacagcuucgugauccggggagaugaagugcggcagauugccccuggacagacaggcaagaucgccgacuacaacuacaagcugcccgacgacuucaccggcugugugauugccuggaacagcaacaaccuggacuccaaagucggcggcaacuacaauuaccuguaccggcuguuccggaaguccaaucugaagcccuucgagcgggacaucagcaccgaaaucuaucaggccggcagcaccccuugcaacggcguggaaggcuucaacugcuacuucccacugcaguccuacggcuuucagcccacaaauggcgugggcuaucagcccuacagagugguggugcugagcuucgaacugcugcaugcuccugccacagugugcggcccuaagaaaagcaccaaucucgugaagaacaaaugcgugaacuucaacuucaacggccugaccggcaccggcgugcugacagagagcaacaagaaguuccugccauuccagcaguuuggccgggauaucgccgauaccacagacgccguuagagauccccagacacuggaaauccuggacaucaccccaugcagcuucggcggagugucugugaucaccccuggcaccaacaccagcaaucagguggcagugcuguaccagggcgugaacuguaccgaagugcccguggccauucacgccgaucagcugacaccuacauggcggguguacuccaccggcagcaauguguuucagaccagagccggcugucugaucggagccgagcacgugaacaauagcuacgagugcgacauccccaucggcgcuggcaucugugccagcuaccagacacagacaaacagccccagacgggcuagaagcguggccagccagagcaucauugccuacacaaugucucugggcgccgagaacagcguggccuacuccaacaacucuaucgcuauccccaccaacuucaccaucagcgugaccaccgagauccugccuguguccaugaccaagaccagcguggacugcaccauguacaucugcggcgauuccaccgagugcuccaaccugcugcugcaguacggcagcuucugcacccagcugaauagagcccugacagggaucgccguggaacaggacaagaacacccaagagguguucgcccaagugaagcaaaucuacaagaccccuccuaucaaggacuucggcggcuucaauuucagccagauucugcccgauccuagcaagcccagcaagcggagcuucaucgaggaccugcuguucaacaaagugacacuggccgacgccggcuucaucaagcaguauggcgauugucugggcgacauugccgccagggaucugauuugcgcccagaaguuuaacggacugacagugcugccuccucugcugaccgaugagaugaucgcccaguacacaucugcccugcuggccggcacaaucacaagcggcuggacauuuggagcuggcgccgcucugcagauccccuuugcuaugcagauggccuaccgguucaacggcaucggagugacccagaaugugcuguacgagaaccagaagcugaucgccaaccaguucaacagcgccaucggcaagauccaggacagccugagcagcacagcaagcgcccugggaaagcugcaggacguggucaaccagaaugcccaggcacugaacacccuggucaagcagcuguccuccaacuucggcgccaucagcucugugcugaacgauauccugagcagacuggacaaggucgaggccgaggugcagaucgacagacugaucacaggcagacugcagagccuccagacauacgugacccagcagcugaucagagccgccgagauuagagccucugccaaucuggccgccaccaagaugucugagugugugcugggccagagcaagagaguggacuuuugcggcaagggcuaccaccugaugagcuucccucagucugccccucacggcgugguguuucugcacgugacauaugugcccgcucaagagaagaauuucaccaccgcuccagccaucugccacgacggcaaagcccacuuuccuagagaaggcguguucguguccaacggcacccauugguucgugacacagcggaacuucuacgagccccagaucaucaccaccgacaacaccuucgugucuggcaacugcgacguugugaucggcauugugaacaauaccguguacgacccucugcagcccgagcuggacagcuucaaagaggaacuggacaaguacuuuaagaaccacacaagccccgacguggaccugggcgauaucagcggaaucaaugccagcgucgugaacauccagaaagagaucgaccggcugaacgagguggccaagaaucugaacgagagccugaucgaccugcaagaacuggggaaguacgagcaguacaucaaguggcccugguacaucuggcugggcuuuaucgccggacugauugccaucgugaucgucacaaucaugcuguguugcaugaccagcugcuguagcugccugaagggcuguuguagcuguggcagcugcugcaaguucgacgaggacgauucugagcccgugcugaagggcgugaaacugcacuacaccugaggacuaguuauaagacugacuagcccgaugggccucccaacgggcccuccuccccuccuugcaccgagauuaauagaucuaaaaaaaaaaaaaaaaaaaaaaaaaaaaaaaaaaaaaaaaaaaaaaaaaaaaaaaaaaaaaaaaaaaaaaaaaaaaaaaaaaaaaaaaaaaaaaaaaaaa

SEQ ID NO: 25691 - RNA, 4011 nt, Artificial Sequence
  SARS-CoV-2/Wuhan/WIV05/2019__EPI_ISL_402128 spike protein mRNA gc mod (1-1273)(H69del_V70del_A222V_Y453F_S477N_D614G_I692V)
aggagaaagcuuaccauguucguguuucuggugcugcugccccugguguccagccagugugugaaccugaccaccagaacacagcugccuccagccuacaccaacagcuucaccagaggcguguacuaccccgacaagguguucagauccagcgugcugcacucuacccaggaccuguuccugccuuucuucagcaacgugaccugguuccacgccaucuccggcaccaauggcaccaagagauucgacaaccccgugcugcccuucaacgacgggguguacuuugccagcaccgagaaguccaacaucaucagaggcuggaucuucggcaccacacuggacagcaagacccagagccugcugaucgugaacaacgccaccaacguggucaucaaagugugcgaguuccaguucugcaacgaccccuuccugggcgucuacuaccacaagaacaacaagagcuggauggaaagcgaguuccggguguacagcagcgccaacaacugcaccuucgaguacgugucccagccuuuccugauggaccuggaaggcaagcagggcaacuucaagaaccugcgcgaguucguguucaagaacaucgacggcuacuucaaaaucuacagcaagcacaccccuaucaaccucgugcgggaucugccucagggcuucucugugcuggaaccccugguggaucugcccaucggcaucaacaucacccgguuucagacacugcuggcccugcacagaagcuaccugacaccuggcgauagcagcagcggauggacagcuggugccgccgcuuacuaugugggcuaccugcagccuagaaccuuccugcugaaguacaacgagaacggcaccaucaccgacgccguggauugugcucuggauccucugagcgagacaaagugcacccugaaguccuucaccguggaaaagggcaucuaccagaccagcaacuuccgggugcagcccaccgaauccaucgugcgguuccccaauaucaccaaucugugccccuucggcgagguguucaaugccaccagauucgccucuguguacgccuggaaccggaagcggaucagcaauugcguggccgacuacuccgugcuguacaacuccgccagcuucagcaccuucaagugcuacggcguguccccuaccaagcugaacgaccugugcuucacaaacguguacgccgacagcuucgugauccggggagaugaagugcggcagauugccccuggacagacaggcaagaucgccgacuacaacuacaagcugcccgacgacuucaccggcugugugauugccuggaacagcaacaaccuggacuccaaagucggcggcaacuacaauuaccuguuccggcuguuccggaaguccaaucugaagcccuucgagcgggacaucagcaccgaaaucuaucaggccggcaacaccccuugcaacggcguggaaggcuucaacugcuacuucccacugcaguccuacggcuuucagcccacaaauggcgugggcuaucagcccuacagagugguggugcugagcuucgaacugcugcaugcuccugccacagugugcggcccuaagaaaagcaccaaucucgugaagaacaaaugcgugaacuucaacuucaacggccugaccggcaccggcgugcugacagagagcaacaagaaguuccugccauuccagcaguuuggccgggauaucgccgauaccacagacgccguuagagauccccagacacuggaaauccuggacaucaccccaugcagcuucggcggagugucugugaucaccccuggcaccaacaccagcaaucagguggcagugcuguaccagggcgugaacuguaccgaagugcccguggccauucacgccgaucagcugacaccuacauggcggguguacuccaccggcagcaauguguuucagaccagagccggcugucugaucggagccgagcacgugaacaauagcuacgagugcgacauccccaucggcgcuggcaucugugccagcuaccagacacagacaaacagccccagacgggcuagaagcguggccagccagagcgugauugccuacacaaugucucugggcgccgagaacagcguggccuacuccaacaacucuaucgcuauccccaccaacuucaccaucagcgugaccaccgagauccugccuguguccaugaccaagaccagcguggacugcaccauguacaucugcggcgauuccaccgagugcuccaaccugcugcugcaguacggcagcuucugcacccagcugaauagagcccugacagggaucgccguggaacaggacaagaacacccaagagguguucgcccaagugaagcaaaucuacaagaccccuccuaucaaggacuucggcggcuucaauuucagccagauucugcccgauccuagcaagcccagcaagcggagcuucaucgaggaccugcuguucaacaaagugacacuggccgacgccggcuucaucaagcaguauggcgauugucugggcgacauugccgccagggaucugauuugcgcccagaaguuuaacggacugacagugcugccuccucugcugaccgaugagaugaucgcccaguacacaucugcccugcuggccggcacaaucacaagcggcuggacauuuggagcuggcgccgcucugcagauccccuuugcuaugcagauggccuaccgguucaacggcaucggagugacccagaaugugcuguacgagaaccagaagcugaucgccaaccaguucaacagcgccaucggcaagauccaggacagccugagcagcacagcaagcgcccugggaaagcugcaggacguggucaaccagaaugcccaggcacugaacacccuggucaagcagcuguccuccaacuucggcgccaucagcucugugcugaacgauauccugagcagacuggacaaggucgaggccgaggugcagaucgacagacugaucacaggcagacugcagagccuccagacauacgugacccagcagcugaucagagccgccgagauuagagccucugccaaucuggccgccaccaagaugucugagugugugcugggccagagcaagagaguggacuuuugcggcaagggcuaccaccugaugagcuucccucagucugccccucacggcgugguguuucugcacgugacauaugugcccgcucaagagaagaauuucaccaccgcuccagccaucugccacgacggcaaagcccacuuuccuagagaaggcguguucguguccaacggcacccauugguucgugacacagcggaacuucuacgagccccagaucaucaccaccgacaacaccuucgugucuggcaacugcgacguugugaucggcauugugaacaauaccguguacgacccucugcagcccgagcuggacagcuucaaagaggaacuggacaaguacuuuaagaaccacacaagccccgacguggaccugggcgauaucagcggaaucaaugccagcgucgugaacauccagaaagagaucgaccggcugaacgagguggccaagaaucugaacgagagccugaucgaccugcaagaacuggggaaguacgagcaguacaucaaguggcccugguacaucuggcugggcuuuaucgccggacugauugccaucgugauggucacaaucaugcuguguugcaugaccagcugcuguagcugccugaagggcuguuguagcuguggcagcugcugcaaguucgacgaggacgauucugagcccgugcugaagggcgugaaacugcacuacaccugaggacuaguuauaagacugacuagcccgaugggccucccaacgggcccuccuccccuccuugcaccgagauuaauagaucuaaaaaaaaaaaaaaaaaaaaaaaaaaaaaaaaaaaaaaaaaaaaaaaaaaaaaaaaaaaaaaaaaaaaaaaaaaaaaaaaaaaaaaaaaaaaaaaaaaaa

SEQ ID NO: 25692 - RNA, 4011 nt, Artificial Sequence
  SARS-CoV-2/Wuhan/WIV05/2019__EPI_ISL_402128 spike protein mRNA gc mod (1-1273)(H69del_V70del_Y453F_D614G_I692V_M1229I)
aggagaaagcuuaccauguucguguuucuggugcugcugccccugguguccagccagugugugaaccugaccaccagaacacagcugccuccagccuacaccaacagcuucaccagaggcguguacuaccccgacaagguguucagauccagcgugcugcacucuacccaggaccuguuccugccuuucuucagcaacgugaccugguuccacgccaucuccggcaccaauggcaccaagagauucgacaaccccgugcugcccuucaacgacgggguguacuuugccagcaccgagaaguccaacaucaucagaggcuggaucuucggcaccacacuggacagcaagacccagagccugcugaucgugaacaacgccaccaacguggucaucaaagugugcgaguuccaguucugcaacgaccccuuccugggcgucuacuaccacaagaacaacaagagcuggauggaaagcgaguuccggguguacagcagcgccaacaacugcaccuucgaguacgugucccagccuuuccugauggaccuggaaggcaagcagggcaacuucaagaaccugcgcgaguucguguucaagaacaucgacggcuacuucaaaaucuacagcaagcacaccccuaucaaccucgugcgggaucugccucagggcuucucugcucuggaaccccugguggaucugcccaucggcaucaacaucacccgguuucagacacugcuggcccugcacagaagcuaccugacaccuggcgauagcagcagcggauggacagcuggugccgccgcuuacuaugugggcuaccugcagccuagaaccuuccugcugaaguacaacgagaacggcaccaucaccgacgccguggauugugcucuggauccucugagcgagacaaagugcacccugaaguccuucaccguggaaaagggcaucuaccagaccagcaacuuccgggugcagcccaccgaauccaucgugcgguuccccaauaucaccaaucugugccccuucggcgagguguucaaugccaccagauucgccucuguguacgccuggaaccggaagcggaucagcaauugcguggccgacuacuccgugcuguacaacuccgccagcuucagcaccuucaagugcuacggcguguccccuaccaagcugaacgaccugugcuucacaaacguguacgccgacagcuucgugauccggggagaugaagugcggcagauugccccuggacagacaggcaagaucgccgacuacaacuacaagcugcccgacgacuucaccggcugugugauugccuggaacagcaacaaccuggacuccaaagucggcggcaacuacaauuaccuguuccggcuguuccggaaguccaaucugaagcccuucgagcgggacaucagcaccgaaaucuaucaggccggcagcaccccuugcaacggcguggaaggcuucaacugcuacuucccacugcaguccuacggcuuucagcccacaaauggcgugggcuaucagcccuacagagugguggugcugagcuucgaacugcugcaugcuccugccacagugugcggcccuaagaaaagcaccaaucucgugaagaacaaaugcgugaacuucaacuucaacggccugaccggcaccggcgugcugacagagagcaacaagaaguuccugccauuccagcaguuuggccgggauaucgccgauaccacagacgccguuagagauccccagacacuggaaauccuggacaucaccccaugcagcuucggcggagugucugugaucaccccuggcaccaacaccagcaaucagguggcagugcuguaccagggcgugaacuguaccgaagugcccguggccauucacgccgaucagcugacaccuacauggcggguguacuccaccggcagcaauguguuucagaccagagccggcugucugaucggagccgagcacgugaacaauagcuacgagugcgacauccccaucggcgcuggcaucugugccagcuaccagacacagacaaacagccccagacgggcuagaagcguggccagccagagcgugauugccuacacaaugucucugggcgccgagaacagcguggccuacuccaacaacucuaucgcuauccccaccaacuucaccaucagcgugaccaccgagauccugccuguguccaugaccaagaccagcguggacugcaccauguacaucugcggcgauuccaccgagugcuccaaccugcugcugcaguacggcagcuucugcacccagcugaauagagcccugacagggaucgccguggaacaggacaagaacacccaagagguguucgcccaagugaagcaaaucuacaagaccccuccuaucaaggacuucggcggcuucaauuucagccagauucugcccgauccuagcaagcccagcaagcggagcuucaucgaggaccugcuguucaacaaagugacacuggccgacgccggcuucaucaagcaguauggcgauugucugggcgacauugccgccagggaucugauuugcgcccagaaguuuaacggacugacagugcugccuccucugcugaccgaugagaugaucgcccaguacacaucugcccugcuggccggcacaaucacaagcggcuggacauuuggagcuggcgccgcucugcagauccccuuugcuaugcagauggccuaccgguucaacggcaucggagugacccagaaugugcuguacgagaaccagaagcugaucgccaaccaguucaacagcgccaucggcaagauccaggacagccugagcagcacagcaagcgcccugggaaagcugcaggacguggucaaccagaaugcccaggcacugaacacccuggucaagcagcuguccuccaacuucggcgccaucagcucugugcugaacgauauccugagcagacuggacaaggucgaggccgaggugcagaucgacagacugaucacaggcagacugcagagccuccagacauacgugacccagcagcugaucagagccgccgagauuagagccucugccaaucuggccgccaccaagaugucugagugugugcugggccagagcaagagaguggacuuuugcggcaagggcuaccaccugaugagcuucccucagucugccccucacggcgugguguuucugcacgugacauaugugcccgcucaagagaagaauuucaccaccgcuccagccaucugccacgacggcaaagcccacuuuccuagagaaggcguguucguguccaacggcacccauugguucgugacacagcggaacuucuacgagccccagaucaucaccaccgacaacaccuucgugucuggcaacugcgacguugugaucggcauugugaacaauaccguguacgacccucugcagcccgagcuggacagcuucaaagaggaacuggacaaguacuuuaagaaccacacaagccccgacguggaccugggcgauaucagcggaaucaaugccagcgucgugaacauccagaaagagaucgaccggcugaacgagguggccaagaaucugaacgagagccugaucgaccugcaagaacuggggaaguacgagcaguacaucaaguggcccugguacaucuggcugggcuuuaucgccggacugauugccaucgugaucgucacaaucaugcuguguugcaugaccagcugcuguagcugccugaagggcuguuguagcuguggcagcugcugcaaguucgacgaggacgauucugagcccgugcugaagggcgugaaacugcacuacaccugaggacuaguuauaagacugacuagcccgaugggccucccaacgggcccuccuccccuccuugcaccgagauuaauagaucuaaaaaaaaaaaaaaaaaaaaaaaaaaaaaaaaaaaaaaaaaaaaaaaaaaaaaaaaaaaaaaaaaaaaaaaaaaaaaaaaaaaaaaaaaaaaaaaaaaaa

SEQ ID NO: 25693 - RNA, 4008 nt, Artificial Sequence
  SARS-CoV-2/Wuhan/WIV05/2019__EPI_ISL_402128 spike protein mRNA gc mod (1-1273)(H69del_V70del_Y144del_N501Y_A570D_D614G_P681H_T716I_S982 A_D1118H)
aggagaaagcuuaccauguucguguuucuggugcugcugccccugguguccagccagugugugaaccugaccaccagaacacagcugccuccagccuacaccaacagcuucaccagaggcguguacuaccccgacaagguguucagauccagcgugcugcacucuacccaggaccuguuccugccuuucuucagcaacgugaccugguuccacgccaucuccggcaccaauggcaccaagagauucgacaaccccgugcugcccuucaacgacgggguguacuuugccagcaccgagaaguccaacaucaucagaggcuggaucuucggcaccacacuggacagcaagacccagagccugcugaucgugaacaacgccaccaacguggucaucaaagugugcgaguuccaguucugcaacgaccccuuccugggcgucuaccacaagaacaacaagagcuggauggaaagcgaguuccggguguacagcagcgccaacaacugcaccuucgaguacgugucccagccuuuccugauggaccuggaaggcaagcagggcaacuucaagaaccugcgcgaguucguguucaagaacaucgacggcuacuucaaaaucuacagcaagcacaccccuaucaaccucgugcgggaucugccucagggcuucucugcucuggaaccccugguggaucugcccaucggcaucaacaucacccgguuucagacacugcuggcccugcacagaagcuaccugacaccuggcgauagcagcagcggauggacagcuggugccgccgcuuacuaugugggcuaccugcagccuagaaccuuccugcugaaguacaacgagaacggcaccaucaccgacgccguggauugugcucuggauccucugagcgagacaaagugcacccugaaguccuucaccguggaaaagggcaucuaccagaccagcaacuuccgggugcagcccaccgaauccaucgugcgguuccccaauaucaccaaucugugccccuucggcgagguguucaaugccaccagauucgccucuguguacgccuggaaccggaagcggaucagcaauugcguggccgacuacuccgugcuguacaacuccgccagcuucagcaccuucaagugcuacggcguguccccuaccaagcugaacgaccugugcuucacaaacguguacgccgacagcuucgugauccggggagaugaagugcggcagauugccccuggacagacaggcaagaucgccgacuacaacuacaagcugcccgacgacuucaccggcugugugauugccuggaacagcaacaaccuggacuccaaagucggcggcaacuacaauuaccuguaccggcuguuccggaaguccaaucugaagcccuucgagcgggacaucagcaccgaaaucuaucaggccggcagcaccccuugcaacggcguggaaggcuucaacugcuacuucccacugcaguccuacggcuuucagcccacauacggcgugggcuaucagcccuacagagugguggugcugagcuucgaacugcugcaugcuccugccacagugugcggcccuaagaaaagcaccaaucucgugaagaacaaaugcgugaacuucaacuucaacggccugaccggcaccggcgugcugacagagagcaacaagaaguuccugccauuccagcaguuuggccgggauaucgacgauaccacagacgccguuagagauccccagacacuggaaauccuggacaucaccccaugcagcuucggcggagugucugugaucaccccuggcaccaacaccagcaaucagguggcagugcuguaccagggcgugaacuguaccgaagugcccguggccauucacgccgaucagcugacaccuacauggcggguguacuccaccggcagcaauguguuucagaccagagccggcugucugaucggagccgagcacgugaacaauagcuacgagugcgacauccccaucggcgcuggcaucugugccagcuaccagacacagacaaacagccacagacgggcuagaagcguggccagccagagcaucauugccuacacaaugucucugggcgccgagaacagcguggccuacuccaacaacucuaucgcuauccccaucaacuucaccaucagcgugaccaccgagauccugccuguguccaugaccaagaccagcguggacugcaccauguacaucugcggcgauuccaccgagugcuccaaccugcugcugcaguacggcagcuucugcacccagcugaauagagcccugacagggaucgccguggaacaggacaagaacacccaagagguguucgcccaagugaagcaaaucuacaagaccccuccuaucaaggacuucggcggcuucaauuucagccagauucugcccgauccuagcaagcccagcaagcggagcuucaucgaggaccugcuguucaacaaagugacacuggccgacgccggcuucaucaagcaguauggcgauugucugggcgacauugccgccagggaucugauuugcgcccagaaguuuaacggacugacagugcugccuccucugcugaccgaugagaugaucgcccaguacacaucugcccugcuggccggcacaaucacaagcggcuggacauuuggagcuggcgccgcucugcagauccccuuugcuaugcagauggccuaccgguucaacggcaucggagugacccagaaugugcuguacgagaaccagaagcugaucgccaaccaguucaacagcgccaucggcaagauccaggacagccugagcagcacagcaagcgcccugggaaagcugcaggacguggucaaccagaaugcccaggcacugaacacccuggucaagcagcuguccuccaacuucggcgccaucagcucugugcugaacgauauccuggccagacuggacaaggucgaggccgaggugcagaucgacagacugaucacaggcagacugcagagccuccagacauacgugacccagcagcugaucagagccgccgagauuagagccucugccaaucuggccgccaccaagaugucugagugugugcugggccagagcaagagaguggacuuuugcggcaagggcuaccaccugaugagcuucccucagucugccccucacggcgugguguuucugcacgugacauaugugcccgcucaagagaagaauuucaccaccgcuccagccaucugccacgacggcaaagcccacuuuccuagagaaggcguguucguguccaacggcacccauugguucgugacacagcggaacuucuacgagccccagaucaucaccacccacaacaccuucgugucuggcaacugcgacguugugaucggcauugugaacaauaccguguacgacccucugcagcccgagcuggacagcuucaaagaggaacuggacaaguacuuuaagaaccacacaagccccgacguggaccugggcgauaucagcggaaucaaugccagcgucgugaacauccagaaagagaucgaccggcugaacgagguggccaagaaucugaacgagagccugaucgaccugcaagaacuggggaaguacgagcaguacaucaaguggcccugguacaucuggcugggcuuuaucgccggacugauugccaucgugauggucacaaucaugcuguguugcaugaccagcugcuguagcugccugaagggcuguuguagcuguggcagcugcugcaaguucgacgaggacgauucugagcccgugcugaagggcgugaaacugcacuacaccugaggacuaguuauaagacugacuagcccgaugggccucccaacgggcccuccuccccuccuugcaccgagauuaauagaucuaaaaaaaaaaaaaaaaaaaaaaaaaaaaaaaaaaaaaaaaaaaaaaaaaaaaaaaaaaaaaaaaaaaaaaaaaaaaaaaaaaaaaaaaaaaaaaaaaaaa

SEQ ID NO: 25694 - RNA, 4017 nt, Artificial Sequence
  SARS-CoV-2/Wuhan/WIV05/2019__EPI_ISL_402128 spike protein mRNA gc mod (1-1273)(K417N_E484K_N501Y_D614G)
aggagaaagcuuaccauguucguguuucuggugcugcugccccugguguccagccagugugugaaccugaccaccagaacacagcugccuccagccuacaccaacagcuucaccagaggcguguacuaccccgacaagguguucagauccagcgugcugcacucuacccaggaccuguuccugccuuucuucagcaacgugaccugguuccacgccauccacguguccggcaccaauggcaccaagagauucgacaaccccgugcugcccuucaacgacgggguguacuuugccagcaccgagaaguccaacaucaucagaggcuggaucuucggcaccacacuggacagcaagacccagagccugcugaucgugaacaacgccaccaacguggucaucaaagugugcgaguuccaguucugcaacgaccccuuccugggcgucuacuaccacaagaacaacaagagcuggauggaaagcgaguuccggguguacagcagcgccaacaacugcaccuucgaguacgugucccagccuuuccugauggaccuggaaggcaagcagggcaacuucaagaaccugcgcgaguucguguucaagaacaucgacggcuacuucaaaaucuacagcaagcacaccccuaucaaccucgugcgggaucugccucagggcuucucugcucuggaaccccugguggaucugcccaucggcaucaacaucacccgguuucagacacugcuggcccugcacagaagcuaccugacaccuggcgauagcagcagcggauggacagcuggugccgccgcuuacuaugugggcuaccugcagccuagaaccuuccugcugaaguacaacgagaacggcaccaucaccgacgccguggauugugcucuggauccucugagcgagacaaagugcacccugaaguccuucaccguggaaaagggcaucuaccagaccagcaacuuccgggugcagcccaccgaauccaucgugcgguuccccaauaucaccaaucugugccccuucggcgagguguucaaugccaccagauucgccucuguguacgccuggaaccggaagcggaucagcaauugcguggccgacuacuccgugcuguacaacuccgccagcuucagcaccuucaagugcuacggcguguccccuaccaagcugaacgaccugugcuucacaaacguguacgccgacagcuucgugauccggggagaugaagugcggcagauugccccuggacagacaggcaacaucgccgacuacaacuacaagcugcccgacgacuucaccggcugugugauugccuggaacagcaacaaccuggacuccaaagucggcggcaacuacaauuaccuguaccggcuguuccggaaguccaaucugaagcccuucgagcgggacaucagcaccgaaaucuaucaggccggcagcaccccuugcaacggcgugaagggcuucaacugcuacuucccacugcaguccuacggcuuucagcccacauacggcgugggcuaucagcccuacagagugguggugcugagcuucgaacugcugcaugcuccugccacagugugcggcccuaagaaaagcaccaaucucgugaagaacaaaugcgugaacuucaacuucaacggccugaccggcaccggcgugcugacagagagcaacaagaaguuccugccauuccagcaguuuggccgggauaucgccgauaccacagacgccguuagagauccccagacacuggaaauccuggacaucaccccaugcagcuucggcggagugucugugaucaccccuggcaccaacaccagcaaucagguggcagugcuguaccagggcgugaacuguaccgaagugcccguggccauucacgccgaucagcugacaccuacauggcggguguacuccaccggcagcaauguguuucagaccagagccggcugucugaucggagccgagcacgugaacaauagcuacgagugcgacauccccaucggcgcuggcaucugugccagcuaccagacacagacaaacagccccagacgggcuagaagcguggccagccagagcaucauugccuacacaaugucucugggcgccgagaacagcguggccuacuccaacaacucuaucgcuauccccaccaacuucaccaucagcgugaccaccgagauccugccuguguccaugaccaagaccagcguggacugcaccauguacaucugcggcgauuccaccgagugcuccaaccugcugcugcaguacggcagcuucugcacccagcugaauagagcccugacagggaucgccguggaacaggacaagaacacccaagagguguucgcccaagugaagcaaaucuacaagaccccuccuaucaaggacuucggcggcuucaauuucagccagauucugcccgauccuagcaagcccagcaagcggagcuucaucgaggaccugcuguucaacaaagugacacuggccgacgccggcuucaucaagcaguauggcgauugucugggcgacauugccgccagggaucugauuugcgcccagaaguuuaacggacugacagugcugccuccucugcugaccgaugagaugaucgcccaguacacaucugcccugcuggccggcacaaucacaagcggcuggacauuuggagcuggcgccgcucugcagauccccuuugcuaugcagauggccuaccgguucaacggcaucggagugacccagaaugugcuguacgagaaccagaagcugaucgccaaccaguucaacagcgccaucggcaagauccaggacagccugagcagcacagcaagcgcccugggaaagcugcaggacguggucaaccagaaugcccaggcacugaacacccuggucaagcagcuguccuccaacuucggcgccaucagcucugugcugaacgauauccugagcagacuggacaaggucgaggccgaggugcagaucgacagacugaucacaggcagacugcagagccuccagacauacgugacccagcagcugaucagagccgccgagauuagagccucugccaaucuggccgccaccaagaugucugagugugugcugggccagagcaagagaguggacuuuugcggcaagggcuaccaccugaugagcuucccucagucugccccucacggcgugguguuucugcacgugacauaugugcccgcucaagagaagaauuucaccaccgcuccagccaucugccacgacggcaaagcccacuuuccuagagaaggcguguucguguccaacggcacccauugguucgugacacagcggaacuucuacgagccccagaucaucaccaccgacaacaccuucgugucuggcaacugcgacguugugaucggcauugugaacaauaccguguacgacccucugcagcccgagcuggacagcuucaaagaggaacuggacaaguacuuuaagaaccacacaagccccgacguggaccugggcgauaucagcggaaucaaugccagcgucgugaacauccagaaagagaucgaccggcugaacgagguggccaagaaucugaacgagagccugaucgaccugcaagaacuggggaaguacgagcaguacaucaaguggcccugguacaucuggcugggcuuuaucgccggacugauugccaucgugauggucacaaucaugcuguguugcaugaccagcugcuguagcugccugaagggcuguuguagcuguggcagcugcugcaaguucgacgaggacgauucugagcccgugcugaagggcgugaaacugcacuacaccugaggacuaguuauaagacugacuagcccgaugggccucccaacgggcccuccuccccuccuugcaccgagauuaauagaucuaaaaaaaaaaaaaaaaaaaaaaaaaaaaaaaaaaaaaaaaaaaaaaaaaaaaaaaaaaaaaaaaaaaaaaaaaaaaaaaaaaaaaaaaaaaaaaaaaaaa

SEQ ID NO: 25695 - RNA, 4008 nt, Artificial Sequence
  SARS-CoV-2/Wuhan/WIV05/2019__EPI_ISL_402128 spike protein mRNA gc mod (1-1273)(L18F_D80A_D215G_L242del_A243del_L244del_R246I_K417N_E484 K_N501Y_D614G_A701V)
aggagaaagcuuaccauguucguguuucuggugcugcugccccugguguccagccagugugugaacuucaccaccagaacacagcugccuccagccuacaccaacagcuucaccagaggcguguacuaccccgacaagguguucagauccagcgugcugcacucuacccaggaccuguuccugccuuucuucagcaacgugaccugguuccacgccauccacguguccggcaccaauggcaccaagagauucgccaaccccgugcugcccuucaacgacgggguguacuuugccagcaccgagaaguccaacaucaucagaggcuggaucuucggcaccacacuggacagcaagacccagagccugcugaucgugaacaacgccaccaacguggucaucaaagugugcgaguuccaguucugcaacgaccccuuccugggcgucuacuaccacaagaacaacaagagcuggauggaaagcgaguuccggguguacagcagcgccaacaacugcaccuucgaguacgugucccagccuuuccugauggaccuggaaggcaagcagggcaacuucaagaaccugcgcgaguucguguucaagaacaucgacggcuacuucaaaaucuacagcaagcacaccccuaucaaccucgugcggggccugccucagggcuucucugcucuggaaccccugguggaucugcccaucggcaucaacaucacccgguuucagacacugcacaucagcuaccugacaccuggcgauagcagcagcggauggacagcuggugccgccgcuuacuaugugggcuaccugcagccuagaaccuuccugcugaaguacaacgagaacggcaccaucaccgacgccguggauugugcucuggauccucugagcgagacaaagugcacccugaaguccuucaccguggaaaagggcaucuaccagaccagcaacuuccgggugcagcccaccgaauccaucgugcgguuccccaauaucaccaaucugugccccuucggcgagguguucaaugccaccagauucgccucuguguacgccuggaaccggaagcggaucagcaauugcguggccgacuacuccgugcuguacaacuccgccagcuucagcaccuucaagugcuacggcguguccccuaccaagcugaacgaccugugcuucacaaacguguacgccgacagcuucgugauccggggagaugaagugcggcagauugccccuggacagacaggcaacaucgccgacuacaacuacaagcugcccgacgacuucaccggcugugugauugccuggaacagcaacaaccuggacuccaaagucggcggcaacuacaauuaccuguaccggcuguuccggaaguccaaucugaagcccuucgagcgggacaucagcaccgaaaucuaucaggccggcagcaccccuugcaacggcgugaagggcuucaacugcuacuucccacugcaguccuacggcuuucagcccacauacggcgugggcuaucagcccuacagagugguggugcugagcuucgaacugcugcaugcuccugccacagugugcggcccuaagaaaagcaccaaucucgugaagaacaaaugcgugaacuucaacuucaacggccugaccggcaccggcgugcugacagagagcaacaagaaguuccugccauuccagcaguuuggccgggauaucgccgauaccacagacgccguuagagauccccagacacuggaaauccuggacaucaccccaugcagcuucggcggagugucugugaucaccccuggcaccaacaccagcaaucagguggcagugcuguaccagggcgugaacuguaccgaagugcccguggccauucacgccgaucagcugacaccuacauggcggguguacuccaccggcagcaauguguuucagaccagagccggcugucugaucggagccgagcacgugaacaauagcuacgagugcgacauccccaucggcgcuggcaucugugccagcuaccagacacagacaaacagccccagacgggcuagaagcguggccagccagagcaucauugccuacacaaugucucugggcguggagaacagcguggccuacuccaacaacucuaucgcuauccccaccaacuucaccaucagcgugaccaccgagauccugccuguguccaugaccaagaccagcguggacugcaccauguacaucugcggcgauuccaccgagugcuccaaccugcugcugcaguacggcagcuucugcacccagcugaauagagcccugacagggaucgccguggaacaggacaagaacacccaagagguguucgcccaagugaagcaaaucuacaagaccccuccuaucaaggacuucggcggcuucaauuucagccagauucugcccgauccuagcaagcccagcaagcggagcuucaucgaggaccugcuguucaacaaagugacacuggccgacgccggcuucaucaagcaguauggcgauugucugggcgacauugccgccagggaucugauuugcgcccagaaguuuaacggacugacagugcugccuccucugcugaccgaugagaugaucgcccaguacacaucugcccugcuggccggcacaaucacaagcggcuggacauuuggagcuggcgccgcucugcagauccccuuugcuaugcagauggccuaccgguucaacggcaucggagugacccagaaugugcuguacgagaaccagaagcugaucgccaaccaguucaacagcgccaucggcaagauccaggacagccugagcagcacagcaagcgcccugggaaagcugcaggacguggucaaccagaaugcccaggcacugaacacccuggucaagcagcuguccuccaacuucggcgccaucagcucugugcugaacgauauccugagcagacuggacaaggucgaggccgaggugcagaucgacagacugaucacaggcagacugcagagccuccagacauacgugacccagcagcugaucagagccgccgagauuagagccucugccaaucuggccgccaccaagaugucugagugugugcugggccagagcaagagaguggacuuuugcggcaagggcuaccaccugaugagcuucccucagucugccccucacggcgugguguuucugcacgugacauaugugcccgcucaagagaagaauuucaccaccgcuccagccaucugccacgacggcaaagcccacuuuccuagagaaggcguguucguguccaacggcacccauugguucgugacacagcggaacuucuacgagccccagaucaucaccaccgacaacaccuucgugucuggcaacugcgacguugugaucggcauugugaacaauaccguguacgacccucugcagcccgagcuggacagcuucaaagaggaacuggacaaguacuuuaagaaccacacaagccccgacguggaccugggcgauaucagcggaaucaaugccagcgucgugaacauccagaaagagaucgaccggcugaacgagguggccaagaaucugaacgagagccugaucgaccugcaagaacuggggaaguacgagcaguacaucaaguggcccugguacaucuggcugggcuuuaucgccggacugauugccaucgugauggucacaaucaugcuguguugcaugaccagcugcuguagcugccugaagggcuguuguagcuguggcagcugcugcaaguucgacgaggacgauucugagcccgugcugaagggcgugaaacugcacuacaccugaggacuaguuauaagacugacuagcccgaugggccucccaacgggcccuccuccccuccuugcaccgagauuaauagaucuaaaaaaaaaaaaaaaaaaaaaaaaaaaaaaaaaaaaaaaaaaaaaaaaaaaaaaaaaaaaaaaaaaaaaaaaaaaaaaaaaaaaaaaaaaaaaaaaaaaa

SEQ ID NO: 25696 - RNA, 4017 nt, Artificial Sequence
  SARS-CoV-2/Wuhan/WIV05/2019__EPI_ISL_402128 spike protein mRNA gc mod (1-1273)(E484K_D614G)
aggagaaagcuuaccauguucguguuucuggugcugcugccccugguguccagccagugugugaaccugaccaccagaacacagcugccuccagccuacaccaacagcuucaccagaggcguguacuaccccgacaagguguucagauccagcgugcugcacucuacccaggaccuguuccugccuuucuucagcaacgugaccugguuccacgccauccacguguccggcaccaauggcaccaagagauucgacaaccccgugcugcccuucaacgacgggguguacuuugccagcaccgagaaguccaacaucaucagaggcuggaucuucggcaccacacuggacagcaagacccagagccugcugaucgugaacaacgccaccaacguggucaucaaagugugcgaguuccaguucugcaacgaccccuuccugggcgucuacuaccacaagaacaacaagagcuggauggaaagcgaguuccggguguacagcagcgccaacaacugcaccuucgaguacgugucccagccuuuccugauggaccuggaaggcaagcagggcaacuucaagaaccugcgcgaguucguguucaagaacaucgacggcuacuucaaaaucuacagcaagcacaccccuaucaaccucgugcgggaucugccucagggcuucucugcucuggaaccccugguggaucugcccaucggcaucaacaucacccgguuucagacacugcuggcccugcacagaagcuaccugacaccuggcgauagcagcagcggauggacagcuggugccgccgcuuacuaugugggcuaccugcagccuagaaccuuccugcugaaguacaacgagaacggcaccaucaccgacgccguggauugugcucuggauccucugagcgagacaaagugcacccugaaguccuucaccguggaaaagggcaucuaccagaccagcaacuuccgggugcagcccaccgaauccaucgugcgguuccccaauaucaccaaucugugccccuucggcgagguguucaaugccaccagauucgccucuguguacgccuggaaccggaagcggaucagcaauugcguggccgacuacuccgugcuguacaacuccgccagcuucagcaccuucaagugcuacggcguguccccuaccaagcugaacgaccugugcuucacaaacguguacgccgacagcuucgugauccggggagaugaagugcggcagauugccccuggacagacaggcaagaucgccgacuacaacuacaagcugcccgacgacuucaccggcugugugauugccuggaacagcaacaaccuggacuccaaagucggcggcaacuacaauuaccuguaccggcuguuccggaaguccaaucugaagcccuucgagcgggacaucagcaccgaaaucuaucaggccggcagcaccccuugcaacggcgugaagggcuucaacugcuacuucccacugcaguccuacggcuuucagcccacaaauggcgugggcuaucagcccuacagagugguggugcugagcuucgaacugcugcaugcuccugccacagugugcggcccuaagaaaagcaccaaucucgugaagaacaaaugcgugaacuucaacuucaacggccugaccggcaccggcgugcugacagagagcaacaagaaguuccugccauuccagcaguuuggccgggauaucgccgauaccacagacgccguuagagauccccagacacuggaaauccuggacaucaccccaugcagcuucggcggagugucugugaucaccccuggcaccaacaccagcaaucagguggcagugcuguaccagggcgugaacuguaccgaagugcccguggccauucacgccgaucagcugacaccuacauggcggguguacuccaccggcagcaauguguuucagaccagagccggcugucugaucggagccgagcacgugaacaauagcuacgagugcgacauccccaucggcgcuggcaucugugccagcuaccagacacagacaaacagccccagacgggcuagaagcguggccagccagagcaucauugccuacacaaugucucugggcgccgagaacagcguggccuacuccaacaacucuaucgcuauccccaccaacuucaccaucagcgugaccaccgagauccugccuguguccaugaccaagaccagcguggacugcaccauguacaucugcggcgauuccaccgagugcuccaaccugcugcugcaguacggcagcuucugcacccagcugaauagagcccugacagggaucgccguggaacaggacaagaacacccaagagguguucgcccaagugaagcaaaucuacaagaccccuccuaucaaggacuucggcggcuucaauuucagccagauucugcccgauccuagcaagcccagcaagcggagcuucaucgaggaccugcuguucaacaaagugacacuggccgacgccggcuucaucaagcaguauggcgauugucugggcgacauugccgccagggaucugauuugcgcccagaaguuuaacggacugacagugcugccuccucugcugaccgaugagaugaucgcccaguacacaucugcccugcuggccggcacaaucacaagcggcuggacauuuggagcuggcgccgcucugcagauccccuuugcuaugcagauggccuaccgguucaacggcaucggagugacccagaaugugcuguacgagaaccagaagcugaucgccaaccaguucaacagcgccaucggcaagauccaggacagccugagcagcacagcaagcgcccugggaaagcugcaggacguggucaaccagaaugcccaggcacugaacacccuggucaagcagcuguccuccaacuucggcgccaucagcucugugcugaacgauauccugagcagacuggacaaggucgaggccgaggugcagaucgacagacugaucacaggcagacugcagagccuccagacauacgugacccagcagcugaucagagccgccgagauuagagccucugccaaucuggccgccaccaagaugucugagugugugcugggccagagcaagagaguggacuuuugcggcaagggcuaccaccugaugagcuucccucagucugccccucacggcgugguguuucugcacgugacauaugugcccgcucaagagaagaauuucaccaccgcuccagccaucugccacgacggcaaagcccacuuuccuagagaaggcguguucguguccaacggcacccauugguucgugacacagcggaacuucuacgagccccagaucaucaccaccgacaacaccuucgugucuggcaacugcgacguugugaucggcauugugaacaauaccguguacgacccucugcagcccgagcuggacagcuucaaagaggaacuggacaaguacuuuaagaaccacacaagccccgacguggaccugggcgauaucagcggaaucaaugccagcgucgugaacauccagaaagagaucgaccggcugaacgagguggccaagaaucugaacgagagccugaucgaccugcaagaacuggggaaguacgagcaguacaucaaguggcccugguacaucuggcugggcuuuaucgccggacugauugccaucgugauggucacaaucaugcuguguugcaugaccagcugcuguagcugccugaagggcuguuguagcuguggcagcugcugcaaguucgacgaggacgauucugagcccgugcugaagggcgugaaacugcacuacaccugaggacuaguuauaagacugacuagcccgaugggccucccaacgggcccuccuccccuccuugcaccgagauuaauagaucuaaaaaaaaaaaaaaaaaaaaaaaaaaaaaaaaaaaaaaaaaaaaaaaaaaaaaaaaaaaaaaaaaaaaaaaaaaaaaaaaaaaaaaaaaaaaaaaaaaaa

SEQ ID NO: 25697 - RNA, 4017 nt, Artificial Sequence
  SARS-CoV-2/Wuhan/WIV05/2019__EPI_ISL_402128 spike protein mRNA gc mod (1-1273)(L18F_T20N_P26S_D138Y_R190S_K417T_E484K_N501Y_D614G_H655Y _T1027I)
aggagaaagcuuaccauguucguguuucuggugcugcugccccugguguccagccagugugugaacuucaccaacagaacacagcugccuagcgccuacaccaacagcuucaccagaggcguguacuaccccgacaagguguucagauccagcgugcugcacucuacccaggaccuguuccugccuuucuucagcaacgugaccugguuccacgccauccacguguccggcaccaauggcaccaagagauucgacaaccccgugcugcccuucaacgacgggguguacuuugccagcaccgagaaguccaacaucaucagaggcuggaucuucggcaccacacuggacagcaagacccagagccugcugaucgugaacaacgccaccaacguggucaucaaagugugcgaguuccaguucugcaacuaccccuuccugggcgucuacuaccacaagaacaacaagagcuggauggaaagcgaguuccggguguacagcagcgccaacaacugcaccuucgaguacgugucccagccuuuccugauggaccuggaaggcaagcagggcaacuucaagaaccugagcgaguucguguucaagaacaucgacggcuacuucaaaaucuacagcaagcacaccccuaucaaccucgugcgggaucugccucagggcuucucugcucuggaaccccugguggaucugcccaucggcaucaacaucacccgguuucagacacugcuggcccugcacagaagcuaccugacaccuggcgauagcagcagcggauggacagcuggugccgccgcuuacuaugugggcuaccugcagccuagaaccuuccugcugaaguacaacgagaacggcaccaucaccgacgccguggauugugcucuggauccucugagcgagacaaagugcacccugaaguccuucaccguggaaaagggcaucuaccagaccagcaacuuccgggugcagcccaccgaauccaucgugcgguuccccaauaucaccaaucugugccccuucggcgagguguucaaugccaccagauucgccucuguguacgccuggaaccggaagcggaucagcaauugcguggccgacuacuccgugcuguacaacuccgccagcuucagcaccuucaagugcuacggcguguccccuaccaagcugaacgaccugugcuucacaaacguguacgccgacagcuucgugauccggggagaugaagugcggcagauugccccuggacagacaggcaccaucgccgacuacaacuacaagcugcccgacgacuucaccggcugugugauugccuggaacagcaacaaccuggacuccaaagucggcggcaacuacaauuaccuguaccggcuguuccggaaguccaaucugaagcccuucgagcgggacaucagcaccgaaaucuaucaggccggcagcaccccuugcaacggcgugaagggcuucaacugcuacuucccacugcaguccuacggcuuucagcccacauacggcgugggcuaucagcccuacagagugguggugcugagcuucgaacugcugcaugcuccugccacagugugcggcccuaagaaaagcaccaaucucgugaagaacaaaugcgugaacuucaacuucaacggccugaccggcaccggcgugcugacagagagcaacaagaaguuccugccauuccagcaguuuggccgggauaucgccgauaccacagacgccguuagagauccccagacacuggaaauccuggacaucaccccaugcagcuucggcggagugucugugaucaccccuggcaccaacaccagcaaucagguggcagugcuguaccagggcgugaacuguaccgaagugcccguggccauucacgccgaucagcugacaccuacauggcggguguacuccaccggcagcaauguguuucagaccagagccggcugucugaucggagccgaguacgugaacaauagcuacgagugcgacauccccaucggcgcuggcaucugugccagcuaccagacacagacaaacagccccagacgggcuagaagcguggccagccagagcaucauugccuacacaaugucucugggcgccgagaacagcguggccuacuccaacaacucuaucgcuauccccaccaacuucaccaucagcgugaccaccgagauccugccuguguccaugaccaagaccagcguggacugcaccauguacaucugcggcgauuccaccgagugcuccaaccugcugcugcaguacggcagcuucugcacccagcugaauagagcccugacagggaucgccguggaacaggacaagaacacccaagagguguucgcccaagugaagcaaaucuacaagaccccuccuaucaaggacuucggcggcuucaauuucagccagauucugcccgauccuagcaagcccagcaagcggagcuucaucgaggaccugcuguucaacaaagugacacuggccgacgccggcuucaucaagcaguauggcgauugucugggcgacauugccgccagggaucugauuugcgcccagaaguuuaacggacugacagugcugccuccucugcugaccgaugagaugaucgcccaguacacaucugcccugcuggccggcacaaucacaagcggcuggacauuuggagcuggcgccgcucugcagauccccuuugcuaugcagauggccuaccgguucaacggcaucggagugacccagaaugugcuguacgagaaccagaagcugaucgccaaccaguucaacagcgccaucggcaagauccaggacagccugagcagcacagcaagcgcccugggaaagcugcaggacguggucaaccagaaugcccaggcacugaacacccuggucaagcagcuguccuccaacuucggcgccaucagcucugugcugaacgauauccugagcagacuggacaaggucgaggccgaggugcagaucgacagacugaucacaggcagacugcagagccuccagacauacgugacccagcagcugaucagagccgccgagauuagagccucugccaaucuggccgccaucaagaugucugagugugugcugggccagagcaagagaguggacuuuugcggcaagggcuaccaccugaugagcuucccucagucugccccucacggcgugguguuucugcacgugacauaugugcccgcucaagagaagaauuucaccaccgcuccagccaucugccacgacggcaaagcccacuuuccuagagaaggcguguucguguccaacggcacccauugguucgugacacagcggaacuucuacgagccccagaucaucaccaccgacaacaccuucgugucuggcaacugcgacguugugaucggcauugugaacaauaccguguacgacccucugcagcccgagcuggacagcuucaaagaggaacuggacaaguacuuuaagaaccacacaagccccgacguggaccugggcgauaucagcggaaucaaugccagcgucgugaacauccagaaagagaucgaccggcugaacgagguggccaagaaucugaacgagagccugaucgaccugcaagaacuggggaaguacgagcaguacaucaaguggcccugguacaucuggcugggcuuuaucgccggacugauugccaucgugauggucacaaucaugcuguguugcaugaccagcugcuguagcugccugaagggcuguuguagcuguggcagcugcugcaaguucgacgaggacgauucugagcccgugcugaagggcgugaaacugcacuacaccugaggacuaguuauaagacugacuagcccgaugggccucccaacgggcccuccuccccuccuugcaccgagauuaauagaucuaaaaaaaaaaaaaaaaaaaaaaaaaaaaaaaaaaaaaaaaaaaaaaaaaaaaaaaaaaaaaaaaaaaaaaaaaaaaaaaaaaaaaaaaaaaaaaaaaaaa

SEQ ID NO: 25698 - RNA, 4017 nt, Artificial Sequence
  SARS-CoV-2/Wuhan/WIV05/2019__EPI_ISL_402128 spike protein mRNA gc mod (1-1273)(S13I_W152C_L452R_D614G)
aggagaaagcuuaccauguucguguuucuggugcugcugccccugguguccauccagugugugaaccugaccaccagaacacagcugccuccagccuacaccaacagcuucaccagaggcguguacuaccccgacaagguguucagauccagcgugcugcacucuacccaggaccuguuccugccuuucuucagcaacgugaccugguuccacgccauccacguguccggcaccaauggcaccaagagauucgacaaccccgugcugcccuucaacgacgggguguacuuugccagcaccgagaaguccaacaucaucagaggcuggaucuucggcaccacacuggacagcaagacccagagccugcugaucgugaacaacgccaccaacguggucaucaaagugugcgaguuccaguucugcaacgaccccuuccugggcgucuacuaccacaagaacaacaagagcugcauggaaagcgaguuccggguguacagcagcgccaacaacugcaccuucgaguacgugucccagccuuuccugauggaccuggaaggcaagcagggcaacuucaagaaccugcgcgaguucguguucaagaacaucgacggcuacuucaaaaucuacagcaagcacaccccuaucaaccucgugcgggaucugccucagggcuucucugcucuggaaccccugguggaucugcccaucggcaucaacaucacccgguuucagacacugcuggcccugcacagaagcuaccugacaccuggcgauagcagcagcggauggacagcuggugccgccgcuuacuaugugggcuaccugcagccuagaaccuuccugcugaaguacaacgagaacggcaccaucaccgacgccguggauugugcucuggauccucugagcgagacaaagugcacccugaaguccuucaccguggaaaagggcaucuaccagaccagcaacuuccgggugcagcccaccgaauccaucgugcgguuccccaauaucaccaaucugugccccuucggcgagguguucaaugccaccagauucgccucuguguacgccuggaaccggaagcggaucagcaauugcguggccgacuacuccgugcuguacaacuccgccagcuucagcaccuucaagugcuacggcguguccccuaccaagcugaacgaccugugcuucacaaacguguacgccgacagcuucgugauccggggagaugaagugcggcagauugccccuggacagacaggcaagaucgccgacuacaacuacaagcugcccgacgacuucaccggcugugugauugccuggaacagcaacaaccuggacuccaaagucggcggcaacuacaauuaccgcuaccggcuguuccggaaguccaaucugaagcccuucgagcgggacaucagcaccgaaaucuaucaggccggcagcaccccuugcaacggcguggaaggcuucaacugcuacuucccacugcaguccuacggcuuucagcccacaaauggcgugggcuaucagcccuacagagugguggugcugagcuucgaacugcugcaugcuccugccacagugugcggcccuaagaaaagcaccaaucucgugaagaacaaaugcgugaacuucaacuucaacggccugaccggcaccggcgugcugacagagagcaacaagaaguuccugccauuccagcaguuuggccgggauaucgccgauaccacagacgccguuagagauccccagacacuggaaauccuggacaucaccccaugcagcuucggcggagugucugugaucaccccuggcaccaacaccagcaaucagguggcagugcuguaccagggcgugaacuguaccgaagugcccguggccauucacgccgaucagcugacaccuacauggcggguguacuccaccggcagcaauguguuucagaccagagccggcugucugaucggagccgagcacgugaacaauagcuacgagugcgacauccccaucggcgcuggcaucugugccagcuaccagacacagacaaacagccccagacgggcuagaagcguggccagccagagcaucauugccuacacaaugucucugggcgccgagaacagcguggccuacuccaacaacucuaucgcuauccccaccaacuucaccaucagcgugaccaccgagauccugccuguguccaugaccaagaccagcguggacugcaccauguacaucugcggcgauuccaccgagugcuccaaccugcugcugcaguacggcagcuucugcacccagcugaauagagcccugacagggaucgccguggaacaggacaagaacacccaagagguguucgcccaagugaagcaaaucuacaagaccccuccuaucaaggacuucggcggcuucaauuucagccagauucugcccgauccuagcaagcccagcaagcggagcuucaucgaggaccugcuguucaacaaagugacacuggccgacgccggcuucaucaagcaguauggcgauugucugggcgacauugccgccagggaucugauuugcgcccagaaguuuaacggacugacagugcugccuccucugcugaccgaugagaugaucgcccaguacacaucugcccugcuggccggcacaaucacaagcggcuggacauuuggagcuggcgccgcucugcagauccccuuugcuaugcagauggccuaccgguucaacggcaucggagugacccagaaugugcuguacgagaaccagaagcugaucgccaaccaguucaacagcgccaucggcaagauccaggacagccugagcagcacagcaagcgcccugggaaagcugcaggacguggucaaccagaaugcccaggcacugaacacccuggucaagcagcuguccuccaacuucggcgccaucagcucugugcugaacgauauccugagcagacuggacaaggucgaggccgaggugcagaucgacagacugaucacaggcagacugcagagccuccagacauacgugacccagcagcugaucagagccgccgagauuagagccucugccaaucuggccgccaccaagaugucugagugugugcugggccagagcaagagaguggacuuuugcggcaagggcuaccaccugaugagcuucccucagucugccccucacggcgugguguuucugcacgugacauaugugcccgcucaagagaagaauuucaccaccgcuccagccaucugccacgacggcaaagcccacuuuccuagagaaggcguguucguguccaacggcacccauugguucgugacacagcggaacuucuacgagccccagaucaucaccaccgacaacaccuucgugucuggcaacugcgacguugugaucggcauugugaacaauaccguguacgacccucugcagcccgagcuggacagcuucaaagaggaacuggacaaguacuuuaagaaccacacaagccccgacguggaccugggcgauaucagcggaaucaaugccagcgucgugaacauccagaaagagaucgaccggcugaacgagguggccaagaaucugaacgagagccugaucgaccugcaagaacuggggaaguacgagcaguacaucaaguggcccugguacaucuggcugggcuuuaucgccggacugauugccaucgugauggucacaaucaugcuguguugcaugaccagcugcuguagcugccugaagggcuguuguagcuguggcagcugcugcaaguucgacgaggacgauucugagcccgugcugaagggcgugaaacugcacuacaccugaggacuaguuauaagacugacuagcccgaugggccucccaacgggcccuccuccccuccuugcaccgagauuaauagaucuaaaaaaaaaaaaaaaaaaaaaaaaaaaaaaaaaaaaaaaaaaaaaaaaaaaaaaaaaaaaaaaaaaaaaaaaaaaaaaaaaaaaaaaaaaaaaaaaaaaa

SEQ ID NO: 25699 - RNA, 4017 nt, Artificial Sequence
  SARS-CoV-2/Wuhan/WIV05/2019__EPI_ISL_402128 spike protein mRNA gc mod (1-1273)
aggagaaagcuuaccauguucguguuccuggugcugcugccucugguguccagccagugugugaaccugaccaccagaacacagcugccuccagccuacaccaacagcuuuaccagaggcguguacuaccccgacaagguguucagauccagcgugcugcacucuacccaggaccuguuccugccuuucuucagcaacgugaccugguuccacgccauccacguguccggcaccaauggcaccaagagauucgacaaccccgugcugcccuucaacgacgggguguacuuugccagcaccgagaaguccaacaucaucagaggcuggaucuucggcaccacacuggacagcaagacccagagccugcugaucgugaacaacgccaccaacguggucaucaaagugugcgaguuccaguucugcaacgaccccuuccugggcgucuacuaccacaagaacaacaagagcuggauggaaagcgaguuccggguguacagcagcgccaacaacugcaccuucgaguacgugucccagccuuuccugauggaccuggaaggcaagcagggcaacuucaagaaccugcgcgaguucguguuuaagaacaucgacggcuacuucaagaucuacagcaagcacaccccuaucaaccucgugcgggaucugccucagggcuucucugcucuggaaccccugguggaucugcccaucggcaucaacaucacccgguuucagacacugcuggcccugcacagaagcuaccugacaccuggcgauagcagcagcggauggacagcuggugccgccgcuuacuaugugggcuaccugcagccuagaaccuuccugcugaaguacaacgagaacggcaccaucaccgacgccguggauugugcucuggauccucugagcgagacaaagugcacccugaaguccuucaccguggaaaagggcaucuaccagaccagcaacuuccgggugcagcccaccgaauccaucgugcgguuccccaauaucaccaaucugugccccuucggcgagguguucaaugccaccagauucgccucuguguacgccuggaaccggaagcggaucagcaauugcguggccgacuacuccgugcuguacaacuccgccagcuucagcaccuucaagugcuacggcguguccccuaccaagcugaacgaccugugcuucacaaacguguacgccgacagcuucgugauccggggagaugaagugcggcagauugccccuggacagacaggcaagaucgccgacuacaacuacaagcugcccgacgacuucaccggcugugugauugccuggaacagcaacaaccuggacuccaaagucggcggcaacuacaauuaccuguaccggcuguuccggaaguccaaucugaagcccuucgagcgggacaucuccaccgagaucuaucaggccggcagcaccccuuguaacggcguggaaggcuucaacugcuacuucccacugcaguccuacggcuuucagcccacaaauggcgugggcuaucagcccuacagagugguggugcugagcuucgaacugcugcaugccccugccacagugugcggcccuaagaaaagcaccaaucucgugaagaacaaaugcgugaacuucaacuucaacggccugaccggcaccggcgugcugacagagagcaacaagaaguuccugccauuccagcaguuuggccgggauaucgccgauaccacagacgccguuagagauccccagacacuggaaauccuggacaucaccccuugcagcuucggcggagugucugugaucaccccuggcaccaacaccagcaaucagguggcagugcuguaccaggacgugaacuguaccgaagugcccguggccauucacgccgaucagcugacaccuacauggcggguguacuccaccggcagcaauguguuucagaccagagccggcugucugaucggagccgagcacgugaacaauagcuacgagugcgacauccccaucggcgcuggaaucugcgccagcuaccagacacagacaaacagcccucggagagccagaagcguggccagccagagcaucauugccuacacaaugucucugggcgccgagaacagcguggccuacuccaacaacucuaucgcuauccccaccaacuucaccaucagcgugaccacagagauccugccuguguccaugaccaagaccagcguggacugcaccauguacaucugcggcgauuccaccgagugcuccaaccugcugcugcaguacggcagcuucugcacccagcugaauagagcccugacagggaucgccguggaacaggacaagaacacccaagagguguucgcccaagugaagcagaucuacaagaccccuccuaucaaggacuucggcggcuucaauuucagccagauucugcccgauccuagcaagcccagcaagcggagcuucaucgaggaccugcuguucaacaaagugacacuggccgacgccggcuucaucaagcaguauggcgauugucugggcgacauugccgccagggaucugauuugcgcccagaaguuuaacggacugacagugcugccuccucugcugaccgaugagaugaucgcccaguacacaucugcccugcuggccggcacaaucacaagcggcuggacauuuggagcaggcgccgcucugcagauccccuuugcuaugcagauggccuaccgguucaacggcaucggagugacccagaaugugcuguacgagaaccagaagcugaucgccaaccaguucaacagcgccaucggcaagauccaggacagccugagcagcacagcaagcgcccugggaaagcugcaggacguggucaaccagaaugcccaggcacugaacacccuggucaagcagcuguccuccaacuucggcgccaucagcucugugcugaacgauauccugagcagacuggacaaggucgaggccgaggugcagaucgacagacugaucacaggcagacugcagagccuccagacauacgugacccagcagcugaucagagccgccgagauuagagccucugccaaucuggccgccaccaagaugucugagugugugcugggccagagcaagagaguggacuuuugcggcaagggcuaccaccugaugagcuucccucagucugccccucacggcgugguguuucugcacgugacauaugugcccgcucaagagaagaauuucaccaccgcuccagccaucugccacgacggcaaagcccacuuuccuagagaaggcguguucguguccaacggcacccauugguucgugacacagcggaacuucuacgagccccagaucaucaccaccgacaacaccuucgugucuggcaacugcgacgucgugaucggcauugugaacaauaccguguacgacccucugcagcccgagcuggacagcuucaaagaggaacuggacaaguacuuuaagaaccacacaagccccgacguggaccugggcgauaucagcggaaucaaugccagcgucgugaacauccagaaagagaucgaccggcugaacgagguggccaagaaucugaacgagagccugaucgaccugcaagaacuggggaaguacgagcaguacaucaaguggcccugguacaucuggcugggcuuuaucgccggacugauugccaucgugauggucacaaucaugcuguguugcaugaccagcugcuguagcugccugaagggcuguuguagcuguggcagcugcugcaaguucgacgaggacgauucugagcccgugcugaagggcgugaaacugcacuacacaugaggacuaguuauaagacugacuagcccgaugggccucccaacgggcccuccuccccuccuugcaccgagauuaauagaucuaaaaaaaaaaaaaaaaaaaaaaaaaaaaaaaaaaaaaaaaaaaaaaaaaaaaaaaaaaaaaaaaaaaaaaaaaaaaaaaaaaaaaaaaaaaaaaaaaaaa

SEQ ID NO: 25700 - RNA, 4017 nt, Artificial Sequence
  SARS-CoV-2/Wuhan/WIV05/2019__EPI_ISL_402128 spike protein mRNA gc mod (1-1273)(D614G)
aggagaaagcuuaccauguucguguuccuggugcugcugccucugguguccagccagugugugaaccugaccaccagaacacagcugccuccagccuacaccaacagcuuuaccagaggcguguacuaccccgacaagguguucagauccagcgugcugcacucuacccaggaccuguuccugccuuucuucagcaacgugaccugguuccacgccauccacguguccggcaccaauggcaccaagagauucgacaaccccgugcugcccuucaacgacgggguguacuuugccagcaccgagaaguccaacaucaucagaggcuggaucuucggcaccacacuggacagcaagacccagagccugcugaucgugaacaacgccaccaacguggucaucaaagugugcgaguuccaguucugcaacgaccccuuccugggcgucuacuaccacaagaacaacaagagcuggauggaaagcgaguuccggguguacagcagcgccaacaacugcaccuucgaguacgugucccagccuuuccugauggaccuggaaggcaagcagggcaacuucaagaaccugcgcgaguucguguuuaagaacaucgacggcuacuucaagaucuacagcaagcacaccccuaucaaccucgugcgggaucugccucagggcuucucugcucuggaaccccugguggaucugcccaucggcaucaacaucacccgguuucagacacugcuggcccugcacagaagcuaccugacaccuggcgauagcagcagcggauggacagcuggugccgccgcuuacuaugugggcuaccugcagccuagaaccuuccugcugaaguacaacgagaacggcaccaucaccgacgccguggauugugcucuggauccucugagcgagacaaagugcacccugaaguccuucaccguggaaaagggcaucuaccagaccagcaacuuccgggugcagcccaccgaauccaucgugcgguuccccaauaucaccaaucugugccccuucggcgagguguucaaugccaccagauucgccucuguguacgccuggaaccggaagcggaucagcaauugcguggccgacuacuccgugcuguacaacuccgccagcuucagcaccuucaagugcuacggcguguccccuaccaagcugaacgaccugugcuucacaaacguguacgccgacagcuucgugauccggggagaugaagugcggcagauugccccuggacagacaggcaagaucgccgacuacaacuacaagcugcccgacgacuucaccggcugugugauugccuggaacagcaacaaccuggacuccaaagucggcggcaacuacaauuaccuguaccggcuguuccggaaguccaaucugaagcccuucgagcgggacaucuccaccgagaucuaucaggccggcagcaccccuuguaacggcguggaaggcuucaacugcuacuucccacugcaguccuacggcuuucagcccacaaauggcgugggcuaucagcccuacagagugguggugcugagcuucgaacugcugcaugccccugccacagugugcggcccuaagaaaagcaccaaucucgugaagaacaaaugcgugaacuucaacuucaacggccugaccggcaccggcgugcugacagagagcaacaagaaguuccugccauuccagcaguuuggccgggauaucgccgauaccacagacgccguuagagauccccagacacuggaaauccuggacaucaccccuugcagcuucggcggagugucugugaucaccccuggcaccaacaccagcaaucagguggcagugcuguaccagggcgugaacuguaccgaagugcccguggccauucacgccgaucagcugacaccuacauggcggguguacuccaccggcagcaauguguuucagaccagagccggcugucugaucggagccgagcacgugaacaauagcuacgagugcgacauccccaucggcgcuggaaucugcgccagcuaccagacacagacaaacagcccucggagagccagaagcguggccagccagagcaucauugccuacacaaugucucugggcgccgagaacagcguggccuacuccaacaacucuaucgcuauccccaccaacuucaccaucagcgugaccacagagauccugccuguguccaugaccaagaccagcguggacugcaccauguacaucugcggcgauuccaccgagugcuccaaccugcugcugcaguacggcagcuucugcacccagcugaauagagcccugacagggaucgccguggaacaggacaagaacacccaagagguguucgcccaagugaagcagaucuacaagaccccuccuaucaaggacuucggcggcuucaauuucagccagauucugcccgauccuagcaagcccagcaagcggagcuucaucgaggaccugcuguucaacaaagugacacuggccgacgccggcuucaucaagcaguauggcgauugucugggcgacauugccgccagggaucugauuugcgcccagaaguuuaacggacugacagugcugccuccucugcugaccgaugagaugaucgcccaguacacaucugcccugcuggccggcacaaucacaagcggcuggacauuuggagcaggcgccgcucugcagauccccuuugcuaugcagauggccuaccgguucaacggcaucggagugacccagaaugugcuguacgagaaccagaagcugaucgccaaccaguucaacagcgccaucggcaagauccaggacagccugagcagcacagcaagcgcccugggaaagcugcaggacguggucaaccagaaugcccaggcacugaacacccuggucaagcagcuguccuccaacuucggcgccaucagcucugugcugaacgauauccugagcagacuggacaaggucgaggccgaggugcagaucgacagacugaucacaggcagacugcagagccuccagacauacgugacccagcagcugaucagagccgccgagauuagagccucugccaaucuggccgccaccaagaugucugagugugugcugggccagagcaagagaguggacuuuugcggcaagggcuaccaccugaugagcuucccucagucugccccucacggcgugguguuucugcacgugacauaugugcccgcucaagagaagaauuucaccaccgcuccagccaucugccacgacggcaaagcccacuuuccuagagaaggcguguucguguccaacggcacccauugguucgugacacagcggaacuucuacgagccccagaucaucaccaccgacaacaccuucgugucuggcaacugcgacgucgugaucggcauugugaacaauaccguguacgacccucugcagcccgagcuggacagcuucaaagaggaacuggacaaguacuuuaagaaccacacaagccccgacguggaccugggcgauaucagcggaaucaaugccagcgucgugaacauccagaaagagaucgaccggcugaacgagguggccaagaaucugaacgagagccugaucgaccugcaagaacuggggaaguacgagcaguacaucaaguggcccugguacaucuggcugggcuuuaucgccggacugauugccaucgugauggucacaaucaugcuguguugcaugaccagcugcuguagcugccugaagggcuguuguagcuguggcagcugcugcaaguucgacgaggacgauucugagcccgugcugaagggcgugaaacugcacuacacaugaggacuaguuauaagacugacuagcccgaugggccucccaacgggcccuccuccccuccuugcaccgagauuaauagaucuaaaaaaaaaaaaaaaaaaaaaaaaaaaaaaaaaaaaaaaaaaaaaaaaaaaaaaaaaaaaaaaaaaaaaaaaaaaaaaaaaaaaaaaaaaaaaaaaaaaa

SEQ ID NO: 25701 - RNA, 4017 nt, Artificial Sequence
  SARS-CoV-2/Wuhan/WIV05/2019__EPI_ISL_402128 spike protein mRNA gc mod (1-1273)(A222V_D614G)
aggagaaagcuuaccauguucguguuccuggugcugcugccucugguguccagccagugugugaaccugaccaccagaacacagcugccuccagccuacaccaacagcuuuaccagaggcguguacuaccccgacaagguguucagauccagcgugcugcacucuacccaggaccuguuccugccuuucuucagcaacgugaccugguuccacgccauccacguguccggcaccaauggcaccaagagauucgacaaccccgugcugcccuucaacgacgggguguacuuugccagcaccgagaaguccaacaucaucagaggcuggaucuucggcaccacacuggacagcaagacccagagccugcugaucgugaacaacgccaccaacguggucaucaaagugugcgaguuccaguucugcaacgaccccuuccugggcgucuacuaccacaagaacaacaagagcuggauggaaagcgaguuccggguguacagcagcgccaacaacugcaccuucgaguacgugucccagccuuuccugauggaccuggaaggcaagcagggcaacuucaagaaccugcgcgaguucguguuuaagaacaucgacggcuacuucaagaucuacagcaagcacaccccuaucaaccucgugcgggaucugccucagggcuucucugugcuggaaccccugguggaucugcccaucggcaucaacaucacccgguuucagacacugcuggcccugcacagaagcuaccugacaccuggcgauagcagcagcggauggacagcuggugccgccgcuuacuaugugggcuaccugcagccuagaaccuuccugcugaaguacaacgagaacggcaccaucaccgacgccguggauugugcucuggauccucugagcgagacaaagugcacccugaaguccuucaccguggaaaagggcaucuaccagaccagcaacuuccgggugcagcccaccgaauccaucgugcgguuccccaauaucaccaaucugugccccuucggcgagguguucaaugccaccagauucgccucuguguacgccuggaaccggaagcggaucagcaauugcguggccgacuacuccgugcuguacaacuccgccagcuucagcaccuucaagugcuacggcguguccccuaccaagcugaacgaccugugcuucacaaacguguacgccgacagcuucgugauccggggagaugaagugcggcagauugccccuggacagacaggcaagaucgccgacuacaacuacaagcugcccgacgacuucaccggcugugugauugccuggaacagcaacaaccuggacuccaaagucggcggcaacuacaauuaccuguaccggcuguuccggaaguccaaucugaagcccuucgagcgggacaucuccaccgagaucuaucaggccggcagcaccccuuguaacggcguggaaggcuucaacugcuacuucccacugcaguccuacggcuuucagcccacaaauggcgugggcuaucagcccuacagagugguggugcugagcuucgaacugcugcaugccccugccacagugugcggcccuaagaaaagcaccaaucucgugaagaacaaaugcgugaacuucaacuucaacggccugaccggcaccggcgugcugacagagagcaacaagaaguuccugccauuccagcaguuuggccgggauaucgccgauaccacagacgccguuagagauccccagacacuggaaauccuggacaucaccccuugcagcuucggcggagugucugugaucaccccuggcaccaacaccagcaaucagguggcagugcuguaccagggcgugaacuguaccgaagugcccguggccauucacgccgaucagcugacaccuacauggcggguguacuccaccggcagcaauguguuucagaccagagccggcugucugaucggagccgagcacgugaacaauagcuacgagugcgacauccccaucggcgcuggaaucugcgccagcuaccagacacagacaaacagcccucggagagccagaagcguggccagccagagcaucauugccuacacaaugucucugggcgccgagaacagcguggccuacuccaacaacucuaucgcuauccccaccaacuucaccaucagcgugaccacagagauccugccuguguccaugaccaagaccagcguggacugcaccauguacaucugcggcgauuccaccgagugcuccaaccugcugcugcaguacggcagcuucugcacccagcugaauagagcccugacagggaucgccguggaacaggacaagaacacccaagagguguucgcccaagugaagcagaucuacaagaccccuccuaucaaggacuucggcggcuucaauuucagccagauucugcccgauccuagcaagcccagcaagcggagcuucaucgaggaccugcuguucaacaaagugacacuggccgacgccggcuucaucaagcaguauggcgauugucugggcgacauugccgccagggaucugauuugcgcccagaaguuuaacggacugacagugcugccuccucugcugaccgaugagaugaucgcccaguacacaucugcccugcuggccggcacaaucacaagcggcuggacauuuggagcaggcgccgcucugcagauccccuuugcuaugcagauggccuaccgguucaacggcaucggagugacccagaaugugcuguacgagaaccagaagcugaucgccaaccaguucaacagcgccaucggcaagauccaggacagccugagcagcacagcaagcgcccugggaaagcugcaggacguggucaaccagaaugcccaggcacugaacacccuggucaagcagcuguccuccaacuucggcgccaucagcucugugcugaacgauauccugagcagacuggacaaggucgaggccgaggugcagaucgacagacugaucacaggcagacugcagagccuccagacauacgugacccagcagcugaucagagccgccgagauuagagccucugccaaucuggccgccaccaagaugucugagugugugcugggccagagcaagagaguggacuuuugcggcaagggcuaccaccugaugagcuucccucagucugccccucacggcgugguguuucugcacgugacauaugugcccgcucaagagaagaauuucaccaccgcuccagccaucugccacgacggcaaagcccacuuuccuagagaaggcguguucguguccaacggcacccauugguucgugacacagcggaacuucuacgagccccagaucaucaccaccgacaacaccuucgugucuggcaacugcgacgucgugaucggcauugugaacaauaccguguacgacccucugcagcccgagcuggacagcuucaaagaggaacuggacaaguacuuuaagaaccacacaagccccgacguggaccugggcgauaucagcggaaucaaugccagcgucgugaacauccagaaagagaucgaccggcugaacgagguggccaagaaucugaacgagagccugaucgaccugcaagaacuggggaaguacgagcaguacaucaaguggcccugguacaucuggcugggcuuuaucgccggacugauugccaucgugauggucacaaucaugcuguguugcaugaccagcugcuguagcugccugaagggcuguuguagcuguggcagcugcugcaaguucgacgaggacgauucugagcccgugcugaagggcgugaaacugcacuacacaugaggacuaguuauaagacugacuagcccgaugggccucccaacgggcccuccuccccuccuugcaccgagauuaauagaucuaaaaaaaaaaaaaaaaaaaaaaaaaaaaaaaaaaaaaaaaaaaaaaaaaaaaaaaaaaaaaaaaaaaaaaaaaaaaaaaaaaaaaaaaaaaaaaaaaaaa

SEQ ID NO: 25702 - RNA, 4017 nt, Artificial Sequence
  SARS-CoV-2/Wuhan/WIV05/2019__EPI_ISL_402128 spike protein mRNA gc mod (1-1273)(N439K_D614G)
aggagaaagcuuaccauguucguguuccuggugcugcugccucugguguccagccagugugugaaccugaccaccagaacacagcugccuccagccuacaccaacagcuuuaccagaggcguguacuaccccgacaagguguucagauccagcgugcugcacucuacccaggaccuguuccugccuuucuucagcaacgugaccugguuccacgccauccacguguccggcaccaauggcaccaagagauucgacaaccccgugcugcccuucaacgacgggguguacuuugccagcaccgagaaguccaacaucaucagaggcuggaucuucggcaccacacuggacagcaagacccagagccugcugaucgugaacaacgccaccaacguggucaucaaagugugcgaguuccaguucugcaacgaccccuuccugggcgucuacuaccacaagaacaacaagagcuggauggaaagcgaguuccggguguacagcagcgccaacaacugcaccuucgaguacgugucccagccuuuccugauggaccuggaaggcaagcagggcaacuucaagaaccugcgcgaguucguguuuaagaacaucgacggcuacuucaagaucuacagcaagcacaccccuaucaaccucgugcgggaucugccucagggcuucucugcucuggaaccccugguggaucugcccaucggcaucaacaucacccgguuucagacacugcuggcccugcacagaagcuaccugacaccuggcgauagcagcagcggauggacagcuggugccgccgcuuacuaugugggcuaccugcagccuagaaccuuccugcugaaguacaacgagaacggcaccaucaccgacgccguggauugugcucuggauccucugagcgagacaaagugcacccugaaguccuucaccguggaaaagggcaucuaccagaccagcaacuuccgggugcagcccaccgaauccaucgugcgguuccccaauaucaccaaucugugccccuucggcgagguguucaaugccaccagauucgccucuguguacgccuggaaccggaagcggaucagcaauugcguggccgacuacuccgugcuguacaacuccgccagcuucagcaccuucaagugcuacggcguguccccuaccaagcugaacgaccugugcuucacaaacguguacgccgacagcuucgugauccggggagaugaagugcggcagauugccccuggacagacaggcaagaucgccgacuacaacuacaagcugcccgacgacuucaccggcugugugauugccuggaacagcaagaaccuggacuccaaagucggcggcaacuacaauuaccuguaccggcuguuccggaaguccaaucugaagcccuucgagcgggacaucuccaccgagaucuaucaggccggcagcaccccuuguaacggcguggaaggcuucaacugcuacuucccacugcaguccuacggcuuucagcccacaaauggcgugggcuaucagcccuacagagugguggugcugagcuucgaacugcugcaugccccugccacagugugcggcccuaagaaaagcaccaaucucgugaagaacaaaugcgugaacuucaacuucaacggccugaccggcaccggcgugcugacagagagcaacaagaaguuccugccauuccagcaguuuggccgggauaucgccgauaccacagacgccguuagagauccccagacacuggaaauccuggacaucaccccuugcagcuucggcggagugucugugaucaccccuggcaccaacaccagcaaucagguggcagugcuguaccagggcgugaacuguaccgaagugcccguggccauucacgccgaucagcugacaccuacauggcggguguacuccaccggcagcaauguguuucagaccagagccggcugucugaucggagccgagcacgugaacaauagcuacgagugcgacauccccaucggcgcuggaaucugcgccagcuaccagacacagacaaacagcccucggagagccagaagcguggccagccagagcaucauugccuacacaaugucucugggcgccgagaacagcguggccuacuccaacaacucuaucgcuauccccaccaacuucaccaucagcgugaccacagagauccugccuguguccaugaccaagaccagcguggacugcaccauguacaucugcggcgauuccaccgagugcuccaaccugcugcugcaguacggcagcuucugcacccagcugaauagagcccugacagggaucgccguggaacaggacaagaacacccaagagguguucgcccaagugaagcagaucuacaagaccccuccuaucaaggacuucggcggcuucaauuucagccagauucugcccgauccuagcaagcccagcaagcggagcuucaucgaggaccugcuguucaacaaagugacacuggccgacgccggcuucaucaagcaguauggcgauugucugggcgacauugccgccagggaucugauuugcgcccagaaguuuaacggacugacagugcugccuccucugcugaccgaugagaugaucgcccaguacacaucugcccugcuggccggcacaaucacaagcggcuggacauuuggagcaggcgccgcucugcagauccccuuugcuaugcagauggccuaccgguucaacggcaucggagugacccagaaugugcuguacgagaaccagaagcugaucgccaaccaguucaacagcgccaucggcaagauccaggacagccugagcagcacagcaagcgcccugggaaagcugcaggacguggucaaccagaaugcccaggcacugaacacccuggucaagcagcuguccuccaacuucggcgccaucagcucugugcugaacgauauccugagcagacuggacaaggucgaggccgaggugcagaucgacagacugaucacaggcagacugcagagccuccagacauacgugacccagcagcugaucagagccgccgagauuagagccucugccaaucuggccgccaccaagaugucugagugugugcugggccagagcaagagaguggacuuuugcggcaagggcuaccaccugaugagcuucccucagucugccccucacggcgugguguuucugcacgugacauaugugcccgcucaagagaagaauuucaccaccgcuccagccaucugccacgacggcaaagcccacuuuccuagagaaggcguguucguguccaacggcacccauugguucgugacacagcggaacuucuacgagccccagaucaucaccaccgacaacaccuucgugucuggcaacugcgacgucgugaucggcauugugaacaauaccguguacgacccucugcagcccgagcuggacagcuucaaagaggaacuggacaaguacuuuaagaaccacacaagccccgacguggaccugggcgauaucagcggaaucaaugccagcgucgugaacauccagaaagagaucgaccggcugaacgagguggccaagaaucugaacgagagccugaucgaccugcaagaacuggggaaguacgagcaguacaucaaguggcccugguacaucuggcugggcuuuaucgccggacugauugccaucgugauggucacaaucaugcuguguugcaugaccagcugcuguagcugccugaagggcuguuguagcuguggcagcugcugcaaguucgacgaggacgauucugagcccgugcugaagggcgugaaacugcacuacacaugaggacuaguuauaagacugacuagcccgaugggccucccaacgggcccuccuccccuccuugcaccgagauuaauagaucuaaaaaaaaaaaaaaaaaaaaaaaaaaaaaaaaaaaaaaaaaaaaaaaaaaaaaaaaaaaaaaaaaaaaaaaaaaaaaaaaaaaaaaaaaaaaaaaaaaaa

SEQ ID NO: 25703 - RNA, 4017 nt, Artificial Sequence
  SARS-CoV-2/Wuhan/WIV05/2019__EPI_ISL_402128 spike protein mRNA gc mod (1-1273)(S477N_D614G)
aggagaaagcuuaccauguucguguuccuggugcugcugccucugguguccagccagugugugaaccugaccaccagaacacagcugccuccagccuacaccaacagcuuuaccagaggcguguacuaccccgacaagguguucagauccagcgugcugcacucuacccaggaccuguuccugccuuucuucagcaacgugaccugguuccacgccauccacguguccggcaccaauggcaccaagagauucgacaaccccgugcugcccuucaacgacgggguguacuuugccagcaccgagaaguccaacaucaucagaggcuggaucuucggcaccacacuggacagcaagacccagagccugcugaucgugaacaacgccaccaacguggucaucaaagugugcgaguuccaguucugcaacgaccccuuccugggcgucuacuaccacaagaacaacaagagcuggauggaaagcgaguuccggguguacagcagcgccaacaacugcaccuucgaguacgugucccagccuuuccugauggaccuggaaggcaagcagggcaacuucaagaaccugcgcgaguucguguuuaagaacaucgacggcuacuucaagaucuacagcaagcacaccccuaucaaccucgugcgggaucugccucagggcuucucugcucuggaaccccugguggaucugcccaucggcaucaacaucacccgguuucagacacugcuggcccugcacagaagcuaccugacaccuggcgauagcagcagcggauggacagcuggugccgccgcuuacuaugugggcuaccugcagccuagaaccuuccugcugaaguacaacgagaacggcaccaucaccgacgccguggauugugcucuggauccucugagcgagacaaagugcacccugaaguccuucaccguggaaaagggcaucuaccagaccagcaacuuccgggugcagcccaccgaauccaucgugcgguuccccaauaucaccaaucugugccccuucggcgagguguucaaugccaccagauucgccucuguguacgccuggaaccggaagcggaucagcaauugcguggccgacuacuccgugcuguacaacuccgccagcuucagcaccuucaagugcuacggcguguccccuaccaagcugaacgaccugugcuucacaaacguguacgccgacagcuucgugauccggggagaugaagugcggcagauugccccuggacagacaggcaagaucgccgacuacaacuacaagcugcccgacgacuucaccggcugugugauugccuggaacagcaacaaccuggacuccaaagucggcggcaacuacaauuaccuguaccggcuguuccggaaguccaaucugaagcccuucgagcgggacaucuccaccgagaucuaucaggccggcaacaccccuuguaacggcguggaaggcuucaacugcuacuucccacugcaguccuacggcuuucagcccacaaauggcgugggcuaucagcccuacagagugguggugcugagcuucgaacugcugcaugccccugccacagugugcggcccuaagaaaagcaccaaucucgugaagaacaaaugcgugaacuucaacuucaacggccugaccggcaccggcgugcugacagagagcaacaagaaguuccugccauuccagcaguuuggccgggauaucgccgauaccacagacgccguuagagauccccagacacuggaaauccuggacaucaccccuugcagcuucggcggagugucugugaucaccccuggcaccaacaccagcaaucagguggcagugcuguaccagggcgugaacuguaccgaagugcccguggccauucacgccgaucagcugacaccuacauggcggguguacuccaccggcagcaauguguuucagaccagagccggcugucugaucggagccgagcacgugaacaauagcuacgagugcgacauccccaucggcgcuggaaucugcgccagcuaccagacacagacaaacagcccucggagagccagaagcguggccagccagagcaucauugccuacacaaugucucugggcgccgagaacagcguggccuacuccaacaacucuaucgcuauccccaccaacuucaccaucagcgugaccacagagauccugccuguguccaugaccaagaccagcguggacugcaccauguacaucugcggcgauuccaccgagugcuccaaccugcugcugcaguacggcagcuucugcacccagcugaauagagcccugacagggaucgccguggaacaggacaagaacacccaagagguguucgcccaagugaagcagaucuacaagaccccuccuaucaaggacuucggcggcuucaauuucagccagauucugcccgauccuagcaagcccagcaagcggagcuucaucgaggaccugcuguucaacaaagugacacuggccgacgccggcuucaucaagcaguauggcgauugucugggcgacauugccgccagggaucugauuugcgcccagaaguuuaacggacugacagugcugccuccucugcugaccgaugagaugaucgcccaguacacaucugcccugcuggccggcacaaucacaagcggcuggacauuuggagcaggcgccgcucugcagauccccuuugcuaugcagauggccuaccgguucaacggcaucggagugacccagaaugugcuguacgagaaccagaagcugaucgccaaccaguucaacagcgccaucggcaagauccaggacagccugagcagcacagcaagcgcccugggaaagcugcaggacguggucaaccagaaugcccaggcacugaacacccuggucaagcagcuguccuccaacuucggcgccaucagcucugugcugaacgauauccugagcagacuggacaaggucgaggccgaggugcagaucgacagacugaucacaggcagacugcagagccuccagacauacgugacccagcagcugaucagagccgccgagauuagagccucugccaaucuggccgccaccaagaugucugagugugugcugggccagagcaagagaguggacuuuugcggcaagggcuaccaccugaugagcuucccucagucugccccucacggcgugguguuucugcacgugacauaugugcccgcucaagagaagaauuucaccaccgcuccagccaucugccacgacggcaaagcccacuuuccuagagaaggcguguucguguccaacggcacccauugguucgugacacagcggaacuucuacgagccccagaucaucaccaccgacaacaccuucgugucuggcaacugcgacgucgugaucggcauugugaacaauaccguguacgacccucugcagcccgagcuggacagcuucaaagaggaacuggacaaguacuuuaagaaccacacaagccccgacguggaccugggcgauaucagcggaaucaaugccagcgucgugaacauccagaaagagaucgaccggcugaacgagguggccaagaaucugaacgagagccugaucgaccugcaagaacuggggaaguacgagcaguacaucaaguggcccugguacaucuggcugggcuuuaucgccggacugauugccaucgugauggucacaaucaugcuguguugcaugaccagcugcuguagcugccugaagggcuguuguagcuguggcagcugcugcaaguucgacgaggacgauucugagcccgugcugaagggcgugaaacugcacuacacaugaggacuaguuauaagacugacuagcccgaugggccucccaacgggcccuccuccccuccuugcaccgagauuaauagaucuaaaaaaaaaaaaaaaaaaaaaaaaaaaaaaaaaaaaaaaaaaaaaaaaaaaaaaaaaaaaaaaaaaaaaaaaaaaaaaaaaaaaaaaaaaaaaaaaaaaa

SEQ ID NO: 25704 - RNA, 4017 nt, Artificial Sequence
  SARS-CoV-2/Wuhan/WIV05/2019__EPI_ISL_402128 spike protein mRNA gc mod (1-1273)(N501Y_D614G)
aggagaaagcuuaccauguucguguuccuggugcugcugccucugguguccagccagugugugaaccugaccaccagaacacagcugccuccagccuacaccaacagcuuuaccagaggcguguacuaccccgacaagguguucagauccagcgugcugcacucuacccaggaccuguuccugccuuucuucagcaacgugaccugguuccacgccauccacguguccggcaccaauggcaccaagagauucgacaaccccgugcugcccuucaacgacgggguguacuuugccagcaccgagaaguccaacaucaucagaggcuggaucuucggcaccacacuggacagcaagacccagagccugcugaucgugaacaacgccaccaacguggucaucaaagugugcgaguuccaguucugcaacgaccccuuccugggcgucuacuaccacaagaacaacaagagcuggauggaaagcgaguuccggguguacagcagcgccaacaacugcaccuucgaguacgugucccagccuuuccugauggaccuggaaggcaagcagggcaacuucaagaaccugcgcgaguucguguuuaagaacaucgacggcuacuucaagaucuacagcaagcacaccccuaucaaccucgugcgggaucugccucagggcuucucugcucuggaaccccugguggaucugcccaucggcaucaacaucacccgguuucagacacugcuggcccugcacagaagcuaccugacaccuggcgauagcagcagcggauggacagcuggugccgccgcuuacuaugugggcuaccugcagccuagaaccuuccugcugaaguacaacgagaacggcaccaucaccgacgccguggauugugcucuggauccucugagcgagacaaagugcacccugaaguccuucaccguggaaaagggcaucuaccagaccagcaacuuccgggugcagcccaccgaauccaucgugcgguuccccaauaucaccaaucugugccccuucggcgagguguucaaugccaccagauucgccucuguguacgccuggaaccggaagcggaucagcaauugcguggccgacuacuccgugcuguacaacuccgccagcuucagcaccuucaagugcuacggcguguccccuaccaagcugaacgaccugugcuucacaaacguguacgccgacagcuucgugauccggggagaugaagugcggcagauugccccuggacagacaggcaagaucgccgacuacaacuacaagcugcccgacgacuucaccggcugugugauugccuggaacagcaacaaccuggacuccaaagucggcggcaacuacaauuaccuguaccggcuguuccggaaguccaaucugaagcccuucgagcgggacaucuccaccgagaucuaucaggccggcagcaccccuuguaacggcguggaaggcuucaacugcuacuucccacugcaguccuacggcuuucagcccacauacggcgugggcuaucagcccuacagagugguggugcugagcuucgaacugcugcaugccccugccacagugugcggcccuaagaaaagcaccaaucucgugaagaacaaaugcgugaacuucaacuucaacggccugaccggcaccggcgugcugacagagagcaacaagaaguuccugccauuccagcaguuuggccgggauaucgccgauaccacagacgccguuagagauccccagacacuggaaauccuggacaucaccccuugcagcuucggcggagugucugugaucaccccuggcaccaacaccagcaaucagguggcagugcuguaccagggcgugaacuguaccgaagugcccguggccauucacgccgaucagcugacaccuacauggcggguguacuccaccggcagcaauguguuucagaccagagccggcugucugaucggagccgagcacgugaacaauagcuacgagugcgacauccccaucggcgcuggaaucugcgccagcuaccagacacagacaaacagcccucggagagccagaagcguggccagccagagcaucauugccuacacaaugucucugggcgccgagaacagcguggccuacuccaacaacucuaucgcuauccccaccaacuucaccaucagcgugaccacagagauccugccuguguccaugaccaagaccagcguggacugcaccauguacaucugcggcgauuccaccgagugcuccaaccugcugcugcaguacggcagcuucugcacccagcugaauagagcccugacagggaucgccguggaacaggacaagaacacccaagagguguucgcccaagugaagcagaucuacaagaccccuccuaucaaggacuucggcggcuucaauuucagccagauucugcccgauccuagcaagcccagcaagcggagcuucaucgaggaccugcuguucaacaaagugacacuggccgacgccggcuucaucaagcaguauggcgauugucugggcgacauugccgccagggaucugauuugcgcccagaaguuuaacggacugacagugcugccuccucugcugaccgaugagaugaucgcccaguacacaucugcccugcuggccggcacaaucacaagcggcuggacauuuggagcaggcgccgcucugcagauccccuuugcuaugcagauggccuaccgguucaacggcaucggagugacccagaaugugcuguacgagaaccagaagcugaucgccaaccaguucaacagcgccaucggcaagauccaggacagccugagcagcacagcaagcgcccugggaaagcugcaggacguggucaaccagaaugcccaggcacugaacacccuggucaagcagcuguccuccaacuucggcgccaucagcucugugcugaacgauauccugagcagacuggacaaggucgaggccgaggugcagaucgacagacugaucacaggcagacugcagagccuccagacauacgugacccagcagcugaucagagccgccgagauuagagccucugccaaucuggccgccaccaagaugucugagugugugcugggccagagcaagagaguggacuuuugcggcaagggcuaccaccugaugagcuucccucagucugccccucacggcgugguguuucugcacgugacauaugugcccgcucaagagaagaauuucaccaccgcuccagccaucugccacgacggcaaagcccacuuuccuagagaaggcguguucguguccaacggcacccauugguucgugacacagcggaacuucuacgagccccagaucaucaccaccgacaacaccuucgugucuggcaacugcgacgucgugaucggcauugugaacaauaccguguacgacccucugcagcccgagcuggacagcuucaaagaggaacuggacaaguacuuuaagaaccacacaagccccgacguggaccugggcgauaucagcggaaucaaugccagcgucgugaacauccagaaagagaucgaccggcugaacgagguggccaagaaucugaacgagagccugaucgaccugcaagaacuggggaaguacgagcaguacaucaaguggcccugguacaucuggcugggcuuuaucgccggacugauugccaucgugauggucacaaucaugcuguguugcaugaccagcugcuguagcugccugaagggcuguuguagcuguggcagcugcugcaaguucgacgaggacgauucugagcccgugcugaagggcgugaaacugcacuacacaugaggacuaguuauaagacugacuagcccgaugggccucccaacgggcccuccuccccuccuugcaccgagauuaauagaucuaaaaaaaaaaaaaaaaaaaaaaaaaaaaaaaaaaaaaaaaaaaaaaaaaaaaaaaaaaaaaaaaaaaaaaaaaaaaaaaaaaaaaaaaaaaaaaaaaaaa

SEQ ID NO: 25705 - RNA, 4011 nt, Artificial Sequence
  SARS-CoV-2/Wuhan/WIV05/2019__EPI_ISL_402128 spike protein mRNA gc mod (1-1273)(H69del_V70del_D614G)
aggagaaagcuuaccauguucguguuccuggugcugcugccucugguguccagccagugugugaaccugaccaccagaacacagcugccuccagccuacaccaacagcuuuaccagaggcguguacuaccccgacaagguguucagauccagcgugcugcacucuacccaggaccuguuccugccuuucuucagcaacgugaccugguuccacgccaucuccggcaccaauggcaccaagagauucgacaaccccgugcugcccuucaacgacgggguguacuuugccagcaccgagaaguccaacaucaucagaggcuggaucuucggcaccacacuggacagcaagacccagagccugcugaucgugaacaacgccaccaacguggucaucaaagugugcgaguuccaguucugcaacgaccccuuccugggcgucuacuaccacaagaacaacaagagcuggauggaaagcgaguuccggguguacagcagcgccaacaacugcaccuucgaguacgugucccagccuuuccugauggaccuggaaggcaagcagggcaacuucaagaaccugcgcgaguucguguuuaagaacaucgacggcuacuucaagaucuacagcaagcacaccccuaucaaccucgugcgggaucugccucagggcuucucugcucuggaaccccugguggaucugcccaucggcaucaacaucacccgguuucagacacugcuggcccugcacagaagcuaccugacaccuggcgauagcagcagcggauggacagcuggugccgccgcuuacuaugugggcuaccugcagccuagaaccuuccugcugaaguacaacgagaacggcaccaucaccgacgccguggauugugcucuggauccucugagcgagacaaagugcacccugaaguccuucaccguggaaaagggcaucuaccagaccagcaacuuccgggugcagcccaccgaauccaucgugcgguuccccaauaucaccaaucugugccccuucggcgagguguucaaugccaccagauucgccucuguguacgccuggaaccggaagcggaucagcaauugcguggccgacuacuccgugcuguacaacuccgccagcuucagcaccuucaagugcuacggcguguccccuaccaagcugaacgaccugugcuucacaaacguguacgccgacagcuucgugauccggggagaugaagugcggcagauugccccuggacagacaggcaagaucgccgacuacaacuacaagcugcccgacgacuucaccggcugugugauugccuggaacagcaacaaccuggacuccaaagucggcggcaacuacaauuaccuguaccggcuguuccggaaguccaaucugaagcccuucgagcgggacaucuccaccgagaucuaucaggccggcagcaccccuuguaacggcguggaaggcuucaacugcuacuucccacugcaguccuacggcuuucagcccacaaauggcgugggcuaucagcccuacagagugguggugcugagcuucgaacugcugcaugccccugccacagugugcggcccuaagaaaagcaccaaucucgugaagaacaaaugcgugaacuucaacuucaacggccugaccggcaccggcgugcugacagagagcaacaagaaguuccugccauuccagcaguuuggccgggauaucgccgauaccacagacgccguuagagauccccagacacuggaaauccuggacaucaccccuugcagcuucggcggagugucugugaucaccccuggcaccaacaccagcaaucagguggcagugcuguaccagggcgugaacuguaccgaagugcccguggccauucacgccgaucagcugacaccuacauggcggguguacuccaccggcagcaauguguuucagaccagagccggcugucugaucggagccgagcacgugaacaauagcuacgagugcgacauccccaucggcgcuggaaucugcgccagcuaccagacacagacaaacagcccucggagagccagaagcguggccagccagagcaucauugccuacacaaugucucugggcgccgagaacagcguggccuacuccaacaacucuaucgcuauccccaccaacuucaccaucagcgugaccacagagauccugccuguguccaugaccaagaccagcguggacugcaccauguacaucugcggcgauuccaccgagugcuccaaccugcugcugcaguacggcagcuucugcacccagcugaauagagcccugacagggaucgccguggaacaggacaagaacacccaagagguguucgcccaagugaagcagaucuacaagaccccuccuaucaaggacuucggcggcuucaauuucagccagauucugcccgauccuagcaagcccagcaagcggagcuucaucgaggaccugcuguucaacaaagugacacuggccgacgccggcuucaucaagcaguauggcgauugucugggcgacauugccgccagggaucugauuugcgcccagaaguuuaacggacugacagugcugccuccucugcugaccgaugagaugaucgcccaguacacaucugcccugcuggccggcacaaucacaagcggcuggacauuuggagcaggcgccgcucugcagauccccuuugcuaugcagauggccuaccgguucaacggcaucggagugacccagaaugugcuguacgagaaccagaagcugaucgccaaccaguucaacagcgccaucggcaagauccaggacagccugagcagcacagcaagcgcccugggaaagcugcaggacguggucaaccagaaugcccaggcacugaacacccuggucaagcagcuguccuccaacuucggcgccaucagcucugugcugaacgauauccugagcagacuggacaaggucgaggccgaggugcagaucgacagacugaucacaggcagacugcagagccuccagacauacgugacccagcagcugaucagagccgccgagauuagagccucugccaaucuggccgccaccaagaugucugagugugugcugggccagagcaagagaguggacuuuugcggcaagggcuaccaccugaugagcuucccucagucugccccucacggcgugguguuucugcacgugacauaugugcccgcucaagagaagaauuucaccaccgcuccagccaucugccacgacggcaaagcccacuuuccuagagaaggcguguucguguccaacggcacccauugguucgugacacagcggaacuucuacgagccccagaucaucaccaccgacaacaccuucgugucuggcaacugcgacgucgugaucggcauugugaacaauaccguguacgacccucugcagcccgagcuggacagcuucaaagaggaacuggacaaguacuuuaagaaccacacaagccccgacguggaccugggcgauaucagcggaaucaaugccagcgucgugaacauccagaaagagaucgaccggcugaacgagguggccaagaaucugaacgagagccugaucgaccugcaagaacuggggaaguacgagcaguacaucaaguggcccugguacaucuggcugggcuuuaucgccggacugauugccaucgugauggucacaaucaugcuguguugcaugaccagcugcuguagcugccugaagggcuguuguagcuguggcagcugcugcaaguucgacgaggacgauucugagcccgugcugaagggcgugaaacugcacuacacaugaggacuaguuauaagacugacuagcccgaugggccucccaacgggcccuccuccccuccuugcaccgagauuaauagaucuaaaaaaaaaaaaaaaaaaaaaaaaaaaaaaaaaaaaaaaaaaaaaaaaaaaaaaaaaaaaaaaaaaaaaaaaaaaaaaaaaaaaaaaaaaaaaaaaaaaa

SEQ ID NO: 25706 - RNA, 4017 nt, Artificial Sequence
  SARS-CoV-2/Wuhan/WIV05/2019__EPI_ISL_402128 spike protein mRNA gc mod (1-1273)(Y453F_D614G)
aggagaaagcuuaccauguucguguuccuggugcugcugccucugguguccagccagugugugaaccugaccaccagaacacagcugccuccagccuacaccaacagcuuuaccagaggcguguacuaccccgacaagguguucagauccagcgugcugcacucuacccaggaccuguuccugccuuucuucagcaacgugaccugguuccacgccauccacguguccggcaccaauggcaccaagagauucgacaaccccgugcugcccuucaacgacgggguguacuuugccagcaccgagaaguccaacaucaucagaggcuggaucuucggcaccacacuggacagcaagacccagagccugcugaucgugaacaacgccaccaacguggucaucaaagugugcgaguuccaguucugcaacgaccccuuccugggcgucuacuaccacaagaacaacaagagcuggauggaaagcgaguuccggguguacagcagcgccaacaacugcaccuucgaguacgugucccagccuuuccugauggaccuggaaggcaagcagggcaacuucaagaaccugcgcgaguucguguuuaagaacaucgacggcuacuucaagaucuacagcaagcacaccccuaucaaccucgugcgggaucugccucagggcuucucugcucuggaaccccugguggaucugcccaucggcaucaacaucacccgguuucagacacugcuggcccugcacagaagcuaccugacaccuggcgauagcagcagcggauggacagcuggugccgccgcuuacuaugugggcuaccugcagccuagaaccuuccugcugaaguacaacgagaacggcaccaucaccgacgccguggauugugcucuggauccucugagcgagacaaagugcacccugaaguccuucaccguggaaaagggcaucuaccagaccagcaacuuccgggugcagcccaccgaauccaucgugcgguuccccaauaucaccaaucugugccccuucggcgagguguucaaugccaccagauucgccucuguguacgccuggaaccggaagcggaucagcaauugcguggccgacuacuccgugcuguacaacuccgccagcuucagcaccuucaagugcuacggcguguccccuaccaagcugaacgaccugugcuucacaaacguguacgccgacagcuucgugauccggggagaugaagugcggcagauugccccuggacagacaggcaagaucgccgacuacaacuacaagcugcccgacgacuucaccggcugugugauugccuggaacagcaacaaccuggacuccaaagucggcggcaacuacaauuaccuguuccggcuguuccggaaguccaaucugaagcccuucgagcgggacaucuccaccgagaucuaucaggccggcagcaccccuuguaacggcguggaaggcuucaacugcuacuucccacugcaguccuacggcuuucagcccacaaauggcgugggcuaucagcccuacagagugguggugcugagcuucgaacugcugcaugccccugccacagugugcggcccuaagaaaagcaccaaucucgugaagaacaaaugcgugaacuucaacuucaacggccugaccggcaccggcgugcugacagagagcaacaagaaguuccugccauuccagcaguuuggccgggauaucgccgauaccacagacgccguuagagauccccagacacuggaaauccuggacaucaccccuugcagcuucggcggagugucugugaucaccccuggcaccaacaccagcaaucagguggcagugcuguaccagggcgugaacuguaccgaagugcccguggccauucacgccgaucagcugacaccuacauggcggguguacuccaccggcagcaauguguuucagaccagagccggcugucugaucggagccgagcacgugaacaauagcuacgagugcgacauccccaucggcgcuggaaucugcgccagcuaccagacacagacaaacagcccucggagagccagaagcguggccagccagagcaucauugccuacacaaugucucugggcgccgagaacagcguggccuacuccaacaacucuaucgcuauccccaccaacuucaccaucagcgugaccacagagauccugccuguguccaugaccaagaccagcguggacugcaccauguacaucugcggcgauuccaccgagugcuccaaccugcugcugcaguacggcagcuucugcacccagcugaauagagcccugacagggaucgccguggaacaggacaagaacacccaagagguguucgcccaagugaagcagaucuacaagaccccuccuaucaaggacuucggcggcuucaauuucagccagauucugcccgauccuagcaagcccagcaagcggagcuucaucgaggaccugcuguucaacaaagugacacuggccgacgccggcuucaucaagcaguauggcgauugucugggcgacauugccgccagggaucugauuugcgcccagaaguuuaacggacugacagugcugccuccucugcugaccgaugagaugaucgcccaguacacaucugcccugcuggccggcacaaucacaagcggcuggacauuuggagcaggcgccgcucugcagauccccuuugcuaugcagauggccuaccgguucaacggcaucggagugacccagaaugugcuguacgagaaccagaagcugaucgccaaccaguucaacagcgccaucggcaagauccaggacagccugagcagcacagcaagcgcccugggaaagcugcaggacguggucaaccagaaugcccaggcacugaacacccuggucaagcagcuguccuccaacuucggcgccaucagcucugugcugaacgauauccugagcagacuggacaaggucgaggccgaggugcagaucgacagacugaucacaggcagacugcagagccuccagacauacgugacccagcagcugaucagagccgccgagauuagagccucugccaaucuggccgccaccaagaugucugagugugugcugggccagagcaagagaguggacuuuugcggcaagggcuaccaccugaugagcuucccucagucugccccucacggcgugguguuucugcacgugacauaugugcccgcucaagagaagaauuucaccaccgcuccagccaucugccacgacggcaaagcccacuuuccuagagaaggcguguucguguccaacggcacccauugguucgugacacagcggaacuucuacgagccccagaucaucaccaccgacaacaccuucgugucuggcaacugcgacgucgugaucggcauugugaacaauaccguguacgacccucugcagcccgagcuggacagcuucaaagaggaacuggacaaguacuuuaagaaccacacaagccccgacguggaccugggcgauaucagcggaaucaaugccagcgucgugaacauccagaaagagaucgaccggcugaacgagguggccaagaaucugaacgagagccugaucgaccugcaagaacuggggaaguacgagcaguacaucaaguggcccugguacaucuggcugggcuuuaucgccggacugauugccaucgugauggucacaaucaugcuguguugcaugaccagcugcuguagcugccugaagggcuguuguagcuguggcagcugcugcaaguucgacgaggacgauucugagcccgugcugaagggcgugaaacugcacuacacaugaggacuaguuauaagacugacuagcccgaugggccucccaacgggcccuccuccccuccuugcaccgagauuaauagaucuaaaaaaaaaaaaaaaaaaaaaaaaaaaaaaaaaaaaaaaaaaaaaaaaaaaaaaaaaaaaaaaaaaaaaaaaaaaaaaaaaaaaaaaaaaaaaaaaaaaa

SEQ ID NO: 25707 - RNA, 4017 nt, Artificial Sequence
  SARS-CoV-2/Wuhan/WIV05/2019__EPI_ISL_402128 spike protein mRNA gc mod (1-1273)(D614G_I692V)
aggagaaagcuuaccauguucguguuccuggugcugcugccucugguguccagccagugugugaaccugaccaccagaacacagcugccuccagccuacaccaacagcuuuaccagaggcguguacuaccccgacaagguguucagauccagcgugcugcacucuacccaggaccuguuccugccuuucuucagcaacgugaccugguuccacgccauccacguguccggcaccaauggcaccaagagauucgacaaccccgugcugcccuucaacgacgggguguacuuugccagcaccgagaaguccaacaucaucagaggcuggaucuucggcaccacacuggacagcaagacccagagccugcugaucgugaacaacgccaccaacguggucaucaaagugugcgaguuccaguucugcaacgaccccuuccugggcgucuacuaccacaagaacaacaagagcuggauggaaagcgaguuccggguguacagcagcgccaacaacugcaccuucgaguacgugucccagccuuuccugauggaccuggaaggcaagcagggcaacuucaagaaccugcgcgaguucguguuuaagaacaucgacggcuacuucaagaucuacagcaagcacaccccuaucaaccucgugcgggaucugccucagggcuucucugcucuggaaccccugguggaucugcccaucggcaucaacaucacccgguuucagacacugcuggcccugcacagaagcuaccugacaccuggcgauagcagcagcggauggacagcuggugccgccgcuuacuaugugggcuaccugcagccuagaaccuuccugcugaaguacaacgagaacggcaccaucaccgacgccguggauugugcucuggauccucugagcgagacaaagugcacccugaaguccuucaccguggaaaagggcaucuaccagaccagcaacuuccgggugcagcccaccgaauccaucgugcgguuccccaauaucaccaaucugugccccuucggcgagguguucaaugccaccagauucgccucuguguacgccuggaaccggaagcggaucagcaauugcguggccgacuacuccgugcuguacaacuccgccagcuucagcaccuucaagugcuacggcguguccccuaccaagcugaacgaccugugcuucacaaacguguacgccgacagcuucgugauccggggagaugaagugcggcagauugccccuggacagacaggcaagaucgccgacuacaacuacaagcugcccgacgacuucaccggcugugugauugccuggaacagcaacaaccuggacuccaaagucggcggcaacuacaauuaccuguaccggcuguuccggaaguccaaucugaagcccuucgagcgggacaucuccaccgagaucuaucaggccggcagcaccccuuguaacggcguggaaggcuucaacugcuacuucccacugcaguccuacggcuuucagcccacaaauggcgugggcuaucagcccuacagagugguggugcugagcuucgaacugcugcaugccccugccacagugugcggcccuaagaaaagcaccaaucucgugaagaacaaaugcgugaacuucaacuucaacggccugaccggcaccggcgugcugacagagagcaacaagaaguuccugccauuccagcaguuuggccgggauaucgccgauaccacagacgccguuagagauccccagacacuggaaauccuggacaucaccccuugcagcuucggcggagugucugugaucaccccuggcaccaacaccagcaaucagguggcagugcuguaccagggcgugaacuguaccgaagugcccguggccauucacgccgaucagcugacaccuacauggcggguguacuccaccggcagcaauguguuucagaccagagccggcugucugaucggagccgagcacgugaacaauagcuacgagugcgacauccccaucggcgcuggaaucugcgccagcuaccagacacagacaaacagcccucggagagccagaagcguggccagccagagcgugauugccuacacaaugucucugggcgccgagaacagcguggccuacuccaacaacucuaucgcuauccccaccaacuucaccaucagcgugaccacagagauccugccuguguccaugaccaagaccagcguggacugcaccauguacaucugcggcgauuccaccgagugcuccaaccugcugcugcaguacggcagcuucugcacccagcugaauagagcccugacagggaucgccguggaacaggacaagaacacccaagagguguucgcccaagugaagcagaucuacaagaccccuccuaucaaggacuucggcggcuucaauuucagccagauucugcccgauccuagcaagcccagcaagcggagcuucaucgaggaccugcuguucaacaaagugacacuggccgacgccggcuucaucaagcaguauggcgauugucugggcgacauugccgccagggaucugauuugcgcccagaaguuuaacggacugacagugcugccuccucugcugaccgaugagaugaucgcccaguacacaucugcccugcuggccggcacaaucacaagcggcuggacauuuggagcaggcgccgcucugcagauccccuuugcuaugcagauggccuaccgguucaacggcaucggagugacccagaaugugcuguacgagaaccagaagcugaucgccaaccaguucaacagcgccaucggcaagauccaggacagccugagcagcacagcaagcgcccugggaaagcugcaggacguggucaaccagaaugcccaggcacugaacacccuggucaagcagcuguccuccaacuucggcgccaucagcucugugcugaacgauauccugagcagacuggacaaggucgaggccgaggugcagaucgacagacugaucacaggcagacugcagagccuccagacauacgugacccagcagcugaucagagccgccgagauuagagccucugccaaucuggccgccaccaagaugucugagugugugcugggccagagcaagagaguggacuuuugcggcaagggcuaccaccugaugagcuucccucagucugccccucacggcgugguguuucugcacgugacauaugugcccgcucaagagaagaauuucaccaccgcuccagccaucugccacgacggcaaagcccacuuuccuagagaaggcguguucguguccaacggcacccauugguucgugacacagcggaacuucuacgagccccagaucaucaccaccgacaacaccuucgugucuggcaacugcgacgucgugaucggcauugugaacaauaccguguacgacccucugcagcccgagcuggacagcuucaaagaggaacuggacaaguacuuuaagaaccacacaagccccgacguggaccugggcgauaucagcggaaucaaugccagcgucgugaacauccagaaagagaucgaccggcugaacgagguggccaagaaucugaacgagagccugaucgaccugcaagaacuggggaaguacgagcaguacaucaaguggcccugguacaucuggcugggcuuuaucgccggacugauugccaucgugauggucacaaucaugcuguguugcaugaccagcugcuguagcugccugaagggcuguuguagcuguggcagcugcugcaaguucgacgaggacgauucugagcccgugcugaagggcgugaaacugcacuacacaugaggacuaguuauaagacugacuagcccgaugggccucccaacgggcccuccuccccuccuugcaccgagauuaauagaucuaaaaaaaaaaaaaaaaaaaaaaaaaaaaaaaaaaaaaaaaaaaaaaaaaaaaaaaaaaaaaaaaaaaaaaaaaaaaaaaaaaaaaaaaaaaaaaaaaaaa

SEQ ID NO: 25708 - RNA, 4017 nt, Artificial Sequence
  SARS-CoV-2/Wuhan/WIV05/2019__EPI_ISL_402128 spike protein mRNA gc mod (1-1273)(D614G_M1229I)
aggagaaagcuuaccauguucguguuccuggugcugcugccucugguguccagccagugugugaaccugaccaccagaacacagcugccuccagccuacaccaacagcuuuaccagaggcguguacuaccccgacaagguguucagauccagcgugcugcacucuacccaggaccuguuccugccuuucuucagcaacgugaccugguuccacgccauccacguguccggcaccaauggcaccaagagauucgacaaccccgugcugcccuucaacgacgggguguacuuugccagcaccgagaaguccaacaucaucagaggcuggaucuucggcaccacacuggacagcaagacccagagccugcugaucgugaacaacgccaccaacguggucaucaaagugugcgaguuccaguucugcaacgaccccuuccugggcgucuacuaccacaagaacaacaagagcuggauggaaagcgaguuccggguguacagcagcgccaacaacugcaccuucgaguacgugucccagccuuuccugauggaccuggaaggcaagcagggcaacuucaagaaccugcgcgaguucguguuuaagaacaucgacggcuacuucaagaucuacagcaagcacaccccuaucaaccucgugcgggaucugccucagggcuucucugcucuggaaccccugguggaucugcccaucggcaucaacaucacccgguuucagacacugcuggcccugcacagaagcuaccugacaccuggcgauagcagcagcggauggacagcuggugccgccgcuuacuaugugggcuaccugcagccuagaaccuuccugcugaaguacaacgagaacggcaccaucaccgacgccguggauugugcucuggauccucugagcgagacaaagugcacccugaaguccuucaccguggaaaagggcaucuaccagaccagcaacuuccgggugcagcccaccgaauccaucgugcgguuccccaauaucaccaaucugugccccuucggcgagguguucaaugccaccagauucgccucuguguacgccuggaaccggaagcggaucagcaauugcguggccgacuacuccgugcuguacaacuccgccagcuucagcaccuucaagugcuacggcguguccccuaccaagcugaacgaccugugcuucacaaacguguacgccgacagcuucgugauccggggagaugaagugcggcagauugccccuggacagacaggcaagaucgccgacuacaacuacaagcugcccgacgacuucaccggcugugugauugccuggaacagcaacaaccuggacuccaaagucggcggcaacuacaauuaccuguaccggcuguuccggaaguccaaucugaagcccuucgagcgggacaucuccaccgagaucuaucaggccggcagcaccccuuguaacggcguggaaggcuucaacugcuacuucccacugcaguccuacggcuuucagcccacaaauggcgugggcuaucagcccuacagagugguggugcugagcuucgaacugcugcaugccccugccacagugugcggcccuaagaaaagcaccaaucucgugaagaacaaaugcgugaacuucaacuucaacggccugaccggcaccggcgugcugacagagagcaacaagaaguuccugccauuccagcaguuuggccgggauaucgccgauaccacagacgccguuagagauccccagacacuggaaauccuggacaucaccccuugcagcuucggcggagugucugugaucaccccuggcaccaacaccagcaaucagguggcagugcuguaccagggcgugaacuguaccgaagugcccguggccauucacgccgaucagcugacaccuacauggcggguguacuccaccggcagcaauguguuucagaccagagccggcugucugaucggagccgagcacgugaacaauagcuacgagugcgacauccccaucggcgcuggaaucugcgccagcuaccagacacagacaaacagcccucggagagccagaagcguggccagccagagcaucauugccuacacaaugucucugggcgccgagaacagcguggccuacuccaacaacucuaucgcuauccccaccaacuucaccaucagcgugaccacagagauccugccuguguccaugaccaagaccagcguggacugcaccauguacaucugcggcgauuccaccgagugcuccaaccugcugcugcaguacggcagcuucugcacccagcugaauagagcccugacagggaucgccguggaacaggacaagaacacccaagagguguucgcccaagugaagcagaucuacaagaccccuccuaucaaggacuucggcggcuucaauuucagccagauucugcccgauccuagcaagcccagcaagcggagcuucaucgaggaccugcuguucaacaaagugacacuggccgacgccggcuucaucaagcaguauggcgauugucugggcgacauugccgccagggaucugauuugcgcccagaaguuuaacggacugacagugcugccuccucugcugaccgaugagaugaucgcccaguacacaucugcccugcuggccggcacaaucacaagcggcuggacauuuggagcaggcgccgcucugcagauccccuuugcuaugcagauggccuaccgguucaacggcaucggagugacccagaaugugcuguacgagaaccagaagcugaucgccaaccaguucaacagcgccaucggcaagauccaggacagccugagcagcacagcaagcgcccugggaaagcugcaggacguggucaaccagaaugcccaggcacugaacacccuggucaagcagcuguccuccaacuucggcgccaucagcucugugcugaacgauauccugagcagacuggacaaggucgaggccgaggugcagaucgacagacugaucacaggcagacugcagagccuccagacauacgugacccagcagcugaucagagccgccgagauuagagccucugccaaucuggccgccaccaagaugucugagugugugcugggccagagcaagagaguggacuuuugcggcaagggcuaccaccugaugagcuucccucagucugccccucacggcgugguguuucugcacgugacauaugugcccgcucaagagaagaauuucaccaccgcuccagccaucugccacgacggcaaagcccacuuuccuagagaaggcguguucguguccaacggcacccauugguucgugacacagcggaacuucuacgagccccagaucaucaccaccgacaacaccuucgugucuggcaacugcgacgucgugaucggcauugugaacaauaccguguacgacccucugcagcccgagcuggacagcuucaaagaggaacuggacaaguacuuuaagaaccacacaagccccgacguggaccugggcgauaucagcggaaucaaugccagcgucgugaacauccagaaagagaucgaccggcugaacgagguggccaagaaucugaacgagagccugaucgaccugcaagaacuggggaaguacgagcaguacaucaaguggcccugguacaucuggcugggcuuuaucgccggacugauugccaucgugaucgucacaaucaugcuguguugcaugaccagcugcuguagcugccugaagggcuguuguagcuguggcagcugcugcaaguucgacgaggacgauucugagcccgugcugaagggcgugaaacugcacuacacaugaggacuaguuauaagacugacuagcccgaugggccucccaacgggcccuccuccccuccuugcaccgagauuaauagaucuaaaaaaaaaaaaaaaaaaaaaaaaaaaaaaaaaaaaaaaaaaaaaaaaaaaaaaaaaaaaaaaaaaaaaaaaaaaaaaaaaaaaaaaaaaaaaaaaaaaa

SEQ ID NO: 25709 - RNA, 4011 nt, Artificial Sequence
  SARS-CoV-2/Wuhan/WIV05/2019__EPI_ISL_402128 spike protein mRNA gc mod (1-1273)(H69del_V70del_A222V_Y453F_S477N_D614G_I692V)
aggagaaagcuuaccauguucguguuccuggugcugcugccucugguguccagccagugugugaaccugaccaccagaacacagcugccuccagccuacaccaacagcuuuaccagaggcguguacuaccccgacaagguguucagauccagcgugcugcacucuacccaggaccuguuccugccuuucuucagcaacgugaccugguuccacgccaucuccggcaccaauggcaccaagagauucgacaaccccgugcugcccuucaacgacgggguguacuuugccagcaccgagaaguccaacaucaucagaggcuggaucuucggcaccacacuggacagcaagacccagagccugcugaucgugaacaacgccaccaacguggucaucaaagugugcgaguuccaguucugcaacgaccccuuccugggcgucuacuaccacaagaacaacaagagcuggauggaaagcgaguuccggguguacagcagcgccaacaacugcaccuucgaguacgugucccagccuuuccugauggaccuggaaggcaagcagggcaacuucaagaaccugcgcgaguucguguuuaagaacaucgacggcuacuucaagaucuacagcaagcacaccccuaucaaccucgugcgggaucugccucagggcuucucugugcuggaaccccugguggaucugcccaucggcaucaacaucacccgguuucagacacugcuggcccugcacagaagcuaccugacaccuggcgauagcagcagcggauggacagcuggugccgccgcuuacuaugugggcuaccugcagccuagaaccuuccugcugaaguacaacgagaacggcaccaucaccgacgccguggauugugcucuggauccucugagcgagacaaagugcacccugaaguccuucaccguggaaaagggcaucuaccagaccagcaacuuccgggugcagcccaccgaauccaucgugcgguuccccaauaucaccaaucugugccccuucggcgagguguucaaugccaccagauucgccucuguguacgccuggaaccggaagcggaucagcaauugcguggccgacuacuccgugcuguacaacuccgccagcuucagcaccuucaagugcuacggcguguccccuaccaagcugaacgaccugugcuucacaaacguguacgccgacagcuucgugauccggggagaugaagugcggcagauugccccuggacagacaggcaagaucgccgacuacaacuacaagcugcccgacgacuucaccggcugugugauugccuggaacagcaacaaccuggacuccaaagucggcggcaacuacaauuaccuguuccggcuguuccggaaguccaaucugaagcccuucgagcgggacaucuccaccgagaucuaucaggccggcaacaccccuuguaacggcguggaaggcuucaacugcuacuucccacugcaguccuacggcuuucagcccacaaauggcgugggcuaucagcccuacagagugguggugcugagcuucgaacugcugcaugccccugccacagugugcggcccuaagaaaagcaccaaucucgugaagaacaaaugcgugaacuucaacuucaacggccugaccggcaccggcgugcugacagagagcaacaagaaguuccugccauuccagcaguuuggccgggauaucgccgauaccacagacgccguuagagauccccagacacuggaaauccuggacaucaccccuugcagcuucggcggagugucugugaucaccccuggcaccaacaccagcaaucagguggcagugcuguaccagggcgugaacuguaccgaagugcccguggccauucacgccgaucagcugacaccuacauggcggguguacuccaccggcagcaauguguuucagaccagagccggcugucugaucggagccgagcacgugaacaauagcuacgagugcgacauccccaucggcgcuggaaucugcgccagcuaccagacacagacaaacagcccucggagagccagaagcguggccagccagagcgugauugccuacacaaugucucugggcgccgagaacagcguggccuacuccaacaacucuaucgcuauccccaccaacuucaccaucagcgugaccacagagauccugccuguguccaugaccaagaccagcguggacugcaccauguacaucugcggcgauuccaccgagugcuccaaccugcugcugcaguacggcagcuucugcacccagcugaauagagcccugacagggaucgccguggaacaggacaagaacacccaagagguguucgcccaagugaagcagaucuacaagaccccuccuaucaaggacuucggcggcuucaauuucagccagauucugcccgauccuagcaagcccagcaagcggagcuucaucgaggaccugcuguucaacaaagugacacuggccgacgccggcuucaucaagcaguauggcgauugucugggcgacauugccgccagggaucugauuugcgcccagaaguuuaacggacugacagugcugccuccucugcugaccgaugagaugaucgcccaguacacaucugcccugcuggccggcacaaucacaagcggcuggacauuuggagcaggcgccgcucugcagauccccuuugcuaugcagauggccuaccgguucaacggcaucggagugacccagaaugugcuguacgagaaccagaagcugaucgccaaccaguucaacagcgccaucggcaagauccaggacagccugagcagcacagcaagcgcccugggaaagcugcaggacguggucaaccagaaugcccaggcacugaacacccuggucaagcagcuguccuccaacuucggcgccaucagcucugugcugaacgauauccugagcagacuggacaaggucgaggccgaggugcagaucgacagacugaucacaggcagacugcagagccuccagacauacgugacccagcagcugaucagagccgccgagauuagagccucugccaaucuggccgccaccaagaugucugagugugugcugggccagagcaagagaguggacuuuugcggcaagggcuaccaccugaugagcuucccucagucugccccucacggcgugguguuucugcacgugacauaugugcccgcucaagagaagaauuucaccaccgcuccagccaucugccacgacggcaaagcccacuuuccuagagaaggcguguucguguccaacggcacccauugguucgugacacagcggaacuucuacgagccccagaucaucaccaccgacaacaccuucgugucuggcaacugcgacgucgugaucggcauugugaacaauaccguguacgacccucugcagcccgagcuggacagcuucaaagaggaacuggacaaguacuuuaagaaccacacaagccccgacguggaccugggcgauaucagcggaaucaaugccagcgucgugaacauccagaaagagaucgaccggcugaacgagguggccaagaaucugaacgagagccugaucgaccugcaagaacuggggaaguacgagcaguacaucaaguggcccugguacaucuggcugggcuuuaucgccggacugauugccaucgugauggucacaaucaugcuguguugcaugaccagcugcuguagcugccugaagggcuguuguagcuguggcagcugcugcaaguucgacgaggacgauucugagcccgugcugaagggcgugaaacugcacuacacaugaggacuaguuauaagacugacuagcccgaugggccucccaacgggcccuccuccccuccuugcaccgagauuaauagaucuaaaaaaaaaaaaaaaaaaaaaaaaaaaaaaaaaaaaaaaaaaaaaaaaaaaaaaaaaaaaaaaaaaaaaaaaaaaaaaaaaaaaaaaaaaaaaaaaaaaa

SEQ ID NO: 25710 - RNA, 4011 nt, Artificial Sequence
  SARS-CoV-2/Wuhan/WIV05/2019__EPI_ISL_402128 spike protein mRNA gc mod (1-1273)(H69del_V70del_Y453F_D614G_I692V_M1229I)
aggagaaagcuuaccauguucguguuccuggugcugcugccucugguguccagccagugugugaaccugaccaccagaacacagcugccuccagccuacaccaacagcuuuaccagaggcguguacuaccccgacaagguguucagauccagcgugcugcacucuacccaggaccuguuccugccuuucuucagcaacgugaccugguuccacgccaucuccggcaccaauggcaccaagagauucgacaaccccgugcugcccuucaacgacgggguguacuuugccagcaccgagaaguccaacaucaucagaggcuggaucuucggcaccacacuggacagcaagacccagagccugcugaucgugaacaacgccaccaacguggucaucaaagugugcgaguuccaguucugcaacgaccccuuccugggcgucuacuaccacaagaacaacaagagcuggauggaaagcgaguuccggguguacagcagcgccaacaacugcaccuucgaguacgugucccagccuuuccugauggaccuggaaggcaagcagggcaacuucaagaaccugcgcgaguucguguuuaagaacaucgacggcuacuucaagaucuacagcaagcacaccccuaucaaccucgugcgggaucugccucagggcuucucugcucuggaaccccugguggaucugcccaucggcaucaacaucacccgguuucagacacugcuggcccugcacagaagcuaccugacaccuggcgauagcagcagcggauggacagcuggugccgccgcuuacuaugugggcuaccugcagccuagaaccuuccugcugaaguacaacgagaacggcaccaucaccgacgccguggauugugcucuggauccucugagcgagacaaagugcacccugaaguccuucaccguggaaaagggcaucuaccagaccagcaacuuccgggugcagcccaccgaauccaucgugcgguuccccaauaucaccaaucugugccccuucggcgagguguucaaugccaccagauucgccucuguguacgccuggaaccggaagcggaucagcaauugcguggccgacuacuccgugcuguacaacuccgccagcuucagcaccuucaagugcuacggcguguccccuaccaagcugaacgaccugugcuucacaaacguguacgccgacagcuucgugauccggggagaugaagugcggcagauugccccuggacagacaggcaagaucgccgacuacaacuacaagcugcccgacgacuucaccggcugugugauugccuggaacagcaacaaccuggacuccaaagucggcggcaacuacaauuaccuguuccggcuguuccggaaguccaaucugaagcccuucgagcgggacaucuccaccgagaucuaucaggccggcagcaccccuuguaacggcguggaaggcuucaacugcuacuucccacugcaguccuacggcuuucagcccacaaauggcgugggcuaucagcccuacagagugguggugcugagcuucgaacugcugcaugccccugccacagugugcggcccuaagaaaagcaccaaucucgugaagaacaaaugcgugaacuucaacuucaacggccugaccggcaccggcgugcugacagagagcaacaagaaguuccugccauuccagcaguuuggccgggauaucgccgauaccacagacgccguuagagauccccagacacuggaaauccuggacaucaccccuugcagcuucggcggagugucugugaucaccccuggcaccaacaccagcaaucagguggcagugcuguaccagggcgugaacuguaccgaagugcccguggccauucacgccgaucagcugacaccuacauggcggguguacuccaccggcagcaauguguuucagaccagagccggcugucugaucggagccgagcacgugaacaauagcuacgagugcgacauccccaucggcgcuggaaucugcgccagcuaccagacacagacaaacagcccucggagagccagaagcguggccagccagagcgugauugccuacacaaugucucugggcgccgagaacagcguggccuacuccaacaacucuaucgcuauccccaccaacuucaccaucagcgugaccacagagauccugccuguguccaugaccaagaccagcguggacugcaccauguacaucugcggcgauuccaccgagugcuccaaccugcugcugcaguacggcagcuucugcacccagcugaauagagcccugacagggaucgccguggaacaggacaagaacacccaagagguguucgcccaagugaagcagaucuacaagaccccuccuaucaaggacuucggcggcuucaauuucagccagauucugcccgauccuagcaagcccagcaagcggagcuucaucgaggaccugcuguucaacaaagugacacuggccgacgccggcuucaucaagcaguauggcgauugucugggcgacauugccgccagggaucugauuugcgcccagaaguuuaacggacugacagugcugccuccucugcugaccgaugagaugaucgcccaguacacaucugcccugcuggccggcacaaucacaagcggcuggacauuuggagcaggcgccgcucugcagauccccuuugcuaugcagauggccuaccgguucaacggcaucggagugacccagaaugugcuguacgagaaccagaagcugaucgccaaccaguucaacagcgccaucggcaagauccaggacagccugagcagcacagcaagcgcccugggaaagcugcaggacguggucaaccagaaugcccaggcacugaacacccuggucaagcagcuguccuccaacuucggcgccaucagcucugugcugaacgauauccugagcagacuggacaaggucgaggccgaggugcagaucgacagacugaucacaggcagacugcagagccuccagacauacgugacccagcagcugaucagagccgccgagauuagagccucugccaaucuggccgccaccaagaugucugagugugugcugggccagagcaagagaguggacuuuugcggcaagggcuaccaccugaugagcuucccucagucugccccucacggcgugguguuucugcacgugacauaugugcccgcucaagagaagaauuucaccaccgcuccagccaucugccacgacggcaaagcccacuuuccuagagaaggcguguucguguccaacggcacccauugguucgugacacagcggaacuucuacgagccccagaucaucaccaccgacaacaccuucgugucuggcaacugcgacgucgugaucggcauugugaacaauaccguguacgacccucugcagcccgagcuggacagcuucaaagaggaacuggacaaguacuuuaagaaccacacaagccccgacguggaccugggcgauaucagcggaaucaaugccagcgucgugaacauccagaaagagaucgaccggcugaacgagguggccaagaaucugaacgagagccugaucgaccugcaagaacuggggaaguacgagcaguacaucaaguggcccugguacaucuggcugggcuuuaucgccggacugauugccaucgugaucgucacaaucaugcuguguugcaugaccagcugcuguagcugccugaagggcuguuguagcuguggcagcugcugcaaguucgacgaggacgauucugagcccgugcugaagggcgugaaacugcacuacacaugaggacuaguuauaagacugacuagcccgaugggccucccaacgggcccuccuccccuccuugcaccgagauuaauagaucuaaaaaaaaaaaaaaaaaaaaaaaaaaaaaaaaaaaaaaaaaaaaaaaaaaaaaaaaaaaaaaaaaaaaaaaaaaaaaaaaaaaaaaaaaaaaaaaaaaaa

SEQ ID NO: 25711 - RNA, 4008 nt, Artificial Sequence
  SARS-CoV-2/Wuhan/WIV05/2019__EPI_ISL_402128 spike protein mRNA gc mod (1-1273)(H69del_V70del_Y144del_N501Y_A570D_D614G_P681H_T716I_S982 A_D1118H)
aggagaaagcuuaccauguucguguuccuggugcugcugccucugguguccagccagugugugaaccugaccaccagaacacagcugccuccagccuacaccaacagcuuuaccagaggcguguacuaccccgacaagguguucagauccagcgugcugcacucuacccaggaccuguuccugccuuucuucagcaacgugaccugguuccacgccaucuccggcaccaauggcaccaagagauucgacaaccccgugcugcccuucaacgacgggguguacuuugccagcaccgagaaguccaacaucaucagaggcuggaucuucggcaccacacuggacagcaagacccagagccugcugaucgugaacaacgccaccaacguggucaucaaagugugcgaguuccaguucugcaacgaccccuuccugggcgucuaccacaagaacaacaagagcuggauggaaagcgaguuccggguguacagcagcgccaacaacugcaccuucgaguacgugucccagccuuuccugauggaccuggaaggcaagcagggcaacuucaagaaccugcgcgaguucguguuuaagaacaucgacggcuacuucaagaucuacagcaagcacaccccuaucaaccucgugcgggaucugccucagggcuucucugcucuggaaccccugguggaucugcccaucggcaucaacaucacccgguuucagacacugcuggcccugcacagaagcuaccugacaccuggcgauagcagcagcggauggacagcuggugccgccgcuuacuaugugggcuaccugcagccuagaaccuuccugcugaaguacaacgagaacggcaccaucaccgacgccguggauugugcucuggauccucugagcgagacaaagugcacccugaaguccuucaccguggaaaagggcaucuaccagaccagcaacuuccgggugcagcccaccgaauccaucgugcgguuccccaauaucaccaaucugugccccuucggcgagguguucaaugccaccagauucgccucuguguacgccuggaaccggaagcggaucagcaauugcguggccgacuacuccgugcuguacaacuccgccagcuucagcaccuucaagugcuacggcguguccccuaccaagcugaacgaccugugcuucacaaacguguacgccgacagcuucgugauccggggagaugaagugcggcagauugccccuggacagacaggcaagaucgccgacuacaacuacaagcugcccgacgacuucaccggcugugugauugccuggaacagcaacaaccuggacuccaaagucggcggcaacuacaauuaccuguaccggcuguuccggaaguccaaucugaagcccuucgagcgggacaucuccaccgagaucuaucaggccggcagcaccccuuguaacggcguggaaggcuucaacugcuacuucccacugcaguccuacggcuuucagcccacauacggcgugggcuaucagcccuacagagugguggugcugagcuucgaacugcugcaugccccugccacagugugcggcccuaagaaaagcaccaaucucgugaagaacaaaugcgugaacuucaacuucaacggccugaccggcaccggcgugcugacagagagcaacaagaaguuccugccauuccagcaguuuggccgggauaucgacgauaccacagacgccguuagagauccccagacacuggaaauccuggacaucaccccuugcagcuucggcggagugucugugaucaccccuggcaccaacaccagcaaucagguggcagugcuguaccagggcgugaacuguaccgaagugcccguggccauucacgccgaucagcugacaccuacauggcggguguacuccaccggcagcaauguguuucagaccagagccggcugucugaucggagccgagcacgugaacaauagcuacgagugcgacauccccaucggcgcuggaaucugcgccagcuaccagacacagacaaacagccaccggagagccagaagcguggccagccagagcaucauugccuacacaaugucucugggcgccgagaacagcguggccuacuccaacaacucuaucgcuauccccaucaacuucaccaucagcgugaccacagagauccugccuguguccaugaccaagaccagcguggacugcaccauguacaucugcggcgauuccaccgagugcuccaaccugcugcugcaguacggcagcuucugcacccagcugaauagagcccugacagggaucgccguggaacaggacaagaacacccaagagguguucgcccaagugaagcagaucuacaagaccccuccuaucaaggacuucggcggcuucaauuucagccagauucugcccgauccuagcaagcccagcaagcggagcuucaucgaggaccugcuguucaacaaagugacacuggccgacgccggcuucaucaagcaguauggcgauugucugggcgacauugccgccagggaucugauuugcgcccagaaguuuaacggacugacagugcugccuccucugcugaccgaugagaugaucgcccaguacacaucugcccugcuggccggcacaaucacaagcggcuggacauuuggagcaggcgccgcucugcagauccccuuugcuaugcagauggccuaccgguucaacggcaucggagugacccagaaugugcuguacgagaaccagaagcugaucgccaaccaguucaacagcgccaucggcaagauccaggacagccugagcagcacagcaagcgcccugggaaagcugcaggacguggucaaccagaaugcccaggcacugaacacccuggucaagcagcuguccuccaacuucggcgccaucagcucugugcugaacgauauccuggccagacuggacaaggucgaggccgaggugcagaucgacagacugaucacaggcagacugcagagccuccagacauacgugacccagcagcugaucagagccgccgagauuagagccucugccaaucuggccgccaccaagaugucugagugugugcugggccagagcaagagaguggacuuuugcggcaagggcuaccaccugaugagcuucccucagucugccccucacggcgugguguuucugcacgugacauaugugcccgcucaagagaagaauuucaccaccgcuccagccaucugccacgacggcaaagcccacuuuccuagagaaggcguguucguguccaacggcacccauugguucgugacacagcggaacuucuacgagccccagaucaucaccacccacaacaccuucgugucuggcaacugcgacgucgugaucggcauugugaacaauaccguguacgacccucugcagcccgagcuggacagcuucaaagaggaacuggacaaguacuuuaagaaccacacaagccccgacguggaccugggcgauaucagcggaaucaaugccagcgucgugaacauccagaaagagaucgaccggcugaacgagguggccaagaaucugaacgagagccugaucgaccugcaagaacuggggaaguacgagcaguacaucaaguggcccugguacaucuggcugggcuuuaucgccggacugauugccaucgugauggucacaaucaugcuguguugcaugaccagcugcuguagcugccugaagggcuguuguagcuguggcagcugcugcaaguucgacgaggacgauucugagcccgugcugaagggcgugaaacugcacuacacaugaggacuaguuauaagacugacuagcccgaugggccucccaacgggcccuccuccccuccuugcaccgagauuaauagaucuaaaaaaaaaaaaaaaaaaaaaaaaaaaaaaaaaaaaaaaaaaaaaaaaaaaaaaaaaaaaaaaaaaaaaaaaaaaaaaaaaaaaaaaaaaaaaaaaaaaa

SEQ ID NO: 25712 - RNA, 4017 nt, Artificial Sequence
  SARS-CoV-2/Wuhan/WIV05/2019__EPI_ISL_402128 spike protein mRNA gc mod (1-1273)(K417N_E484K_N501Y_D614G)
aggagaaagcuuaccauguucguguuccuggugcugcugccucugguguccagccagugugugaaccugaccaccagaacacagcugccuccagccuacaccaacagcuuuaccagaggcguguacuaccccgacaagguguucagauccagcgugcugcacucuacccaggaccuguuccugccuuucuucagcaacgugaccugguuccacgccauccacguguccggcaccaauggcaccaagagauucgacaaccccgugcugcccuucaacgacgggguguacuuugccagcaccgagaaguccaacaucaucagaggcuggaucuucggcaccacacuggacagcaagacccagagccugcugaucgugaacaacgccaccaacguggucaucaaagugugcgaguuccaguucugcaacgaccccuuccugggcgucuacuaccacaagaacaacaagagcuggauggaaagcgaguuccggguguacagcagcgccaacaacugcaccuucgaguacgugucccagccuuuccugauggaccuggaaggcaagcagggcaacuucaagaaccugcgcgaguucguguuuaagaacaucgacggcuacuucaagaucuacagcaagcacaccccuaucaaccucgugcgggaucugccucagggcuucucugcucuggaaccccugguggaucugcccaucggcaucaacaucacccgguuucagacacugcuggcccugcacagaagcuaccugacaccuggcgauagcagcagcggauggacagcuggugccgccgcuuacuaugugggcuaccugcagccuagaaccuuccugcugaaguacaacgagaacggcaccaucaccgacgccguggauugugcucuggauccucugagcgagacaaagugcacccugaaguccuucaccguggaaaagggcaucuaccagaccagcaacuuccgggugcagcccaccgaauccaucgugcgguuccccaauaucaccaaucugugccccuucggcgagguguucaaugccaccagauucgccucuguguacgccuggaaccggaagcggaucagcaauugcguggccgacuacuccgugcuguacaacuccgccagcuucagcaccuucaagugcuacggcguguccccuaccaagcugaacgaccugugcuucacaaacguguacgccgacagcuucgugauccggggagaugaagugcggcagauugccccuggacagacaggcaacaucgccgacuacaacuacaagcugcccgacgacuucaccggcugugugauugccuggaacagcaacaaccuggacuccaaagucggcggcaacuacaauuaccuguaccggcuguuccggaaguccaaucugaagcccuucgagcgggacaucuccaccgagaucuaucaggccggcagcaccccuuguaacggcgugaagggcuucaacugcuacuucccacugcaguccuacggcuuucagcccacauacggcgugggcuaucagcccuacagagugguggugcugagcuucgaacugcugcaugccccugccacagugugcggcccuaagaaaagcaccaaucucgugaagaacaaaugcgugaacuucaacuucaacggccugaccggcaccggcgugcugacagagagcaacaagaaguuccugccauuccagcaguuuggccgggauaucgccgauaccacagacgccguuagagauccccagacacuggaaauccuggacaucaccccuugcagcuucggcggagugucugugaucaccccuggcaccaacaccagcaaucagguggcagugcuguaccagggcgugaacuguaccgaagugcccguggccauucacgccgaucagcugacaccuacauggcggguguacuccaccggcagcaauguguuucagaccagagccggcugucugaucggagccgagcacgugaacaauagcuacgagugcgacauccccaucggcgcuggaaucugcgccagcuaccagacacagacaaacagcccucggagagccagaagcguggccagccagagcaucauugccuacacaaugucucugggcgccgagaacagcguggccuacuccaacaacucuaucgcuauccccaccaacuucaccaucagcgugaccacagagauccugccuguguccaugaccaagaccagcguggacugcaccauguacaucugcggcgauuccaccgagugcuccaaccugcugcugcaguacggcagcuucugcacccagcugaauagagcccugacagggaucgccguggaacaggacaagaacacccaagagguguucgcccaagugaagcagaucuacaagaccccuccuaucaaggacuucggcggcuucaauuucagccagauucugcccgauccuagcaagcccagcaagcggagcuucaucgaggaccugcuguucaacaaagugacacuggccgacgccggcuucaucaagcaguauggcgauugucugggcgacauugccgccagggaucugauuugcgcccagaaguuuaacggacugacagugcugccuccucugcugaccgaugagaugaucgcccaguacacaucugcccugcuggccggcacaaucacaagcggcuggacauuuggagcaggcgccgcucugcagauccccuuugcuaugcagauggccuaccgguucaacggcaucggagugacccagaaugugcuguacgagaaccagaagcugaucgccaaccaguucaacagcgccaucggcaagauccaggacagccugagcagcacagcaagcgcccugggaaagcugcaggacguggucaaccagaaugcccaggcacugaacacccuggucaagcagcuguccuccaacuucggcgccaucagcucugugcugaacgauauccugagcagacuggacaaggucgaggccgaggugcagaucgacagacugaucacaggcagacugcagagccuccagacauacgugacccagcagcugaucagagccgccgagauuagagccucugccaaucuggccgccaccaagaugucugagugugugcugggccagagcaagagaguggacuuuugcggcaagggcuaccaccugaugagcuucccucagucugccccucacggcgugguguuucugcacgugacauaugugcccgcucaagagaagaauuucaccaccgcuccagccaucugccacgacggcaaagcccacuuuccuagagaaggcguguucguguccaacggcacccauugguucgugacacagcggaacuucuacgagccccagaucaucaccaccgacaacaccuucgugucuggcaacugcgacgucgugaucggcauugugaacaauaccguguacgacccucugcagcccgagcuggacagcuucaaagaggaacuggacaaguacuuuaagaaccacacaagccccgacguggaccugggcgauaucagcggaaucaaugccagcgucgugaacauccagaaagagaucgaccggcugaacgagguggccaagaaucugaacgagagccugaucgaccugcaagaacuggggaaguacgagcaguacaucaaguggcccugguacaucuggcugggcuuuaucgccggacugauugccaucgugauggucacaaucaugcuguguugcaugaccagcugcuguagcugccugaagggcuguuguagcuguggcagcugcugcaaguucgacgaggacgauucugagcccgugcugaagggcgugaaacugcacuacacaugaggacuaguuauaagacugacuagcccgaugggccucccaacgggcccuccuccccuccuugcaccgagauuaauagaucuaaaaaaaaaaaaaaaaaaaaaaaaaaaaaaaaaaaaaaaaaaaaaaaaaaaaaaaaaaaaaaaaaaaaaaaaaaaaaaaaaaaaaaaaaaaaaaaaaaaa

SEQ ID NO: 25713 - RNA, 4008 nt, Artificial Sequence
  SARS-CoV-2/Wuhan/WIV05/2019__EPI_ISL_402128 spike protein mRNA gc mod (1-1273)(L18F_D80A_D215G_L242del_A243del_L244del_R246I_K417N_E484 K_N501Y_D614G_A701V)
aggagaaagcuuaccauguucguguuccuggugcugcugccucugguguccagccagugugugaacuucaccaccagaacacagcugccuccagccuacaccaacagcuuuaccagaggcguguacuaccccgacaagguguucagauccagcgugcugcacucuacccaggaccuguuccugccuuucuucagcaacgugaccugguuccacgccauccacguguccggcaccaauggcaccaagagauucgccaaccccgugcugcccuucaacgacgggguguacuuugccagcaccgagaaguccaacaucaucagaggcuggaucuucggcaccacacuggacagcaagacccagagccugcugaucgugaacaacgccaccaacguggucaucaaagugugcgaguuccaguucugcaacgaccccuuccugggcgucuacuaccacaagaacaacaagagcuggauggaaagcgaguuccggguguacagcagcgccaacaacugcaccuucgaguacgugucccagccuuuccugauggaccuggaaggcaagcagggcaacuucaagaaccugcgcgaguucguguuuaagaacaucgacggcuacuucaagaucuacagcaagcacaccccuaucaaccucgugcggggccugccucagggcuucucugcucuggaaccccugguggaucugcccaucggcaucaacaucacccgguuucagacacugcacaucagcuaccugacaccuggcgauagcagcagcggauggacagcuggugccgccgcuuacuaugugggcuaccugcagccuagaaccuuccugcugaaguacaacgagaacggcaccaucaccgacgccguggauugugcucuggauccucugagcgagacaaagugcacccugaaguccuucaccguggaaaagggcaucuaccagaccagcaacuuccgggugcagcccaccgaauccaucgugcgguuccccaauaucaccaaucugugccccuucggcgagguguucaaugccaccagauucgccucuguguacgccuggaaccggaagcggaucagcaauugcguggccgacuacuccgugcuguacaacuccgccagcuucagcaccuucaagugcuacggcguguccccuaccaagcugaacgaccugugcuucacaaacguguacgccgacagcuucgugauccggggagaugaagugcggcagauugccccuggacagacaggcaacaucgccgacuacaacuacaagcugcccgacgacuucaccggcugugugauugccuggaacagcaacaaccuggacuccaaagucggcggcaacuacaauuaccuguaccggcuguuccggaaguccaaucugaagcccuucgagcgggacaucuccaccgagaucuaucaggccggcagcaccccuuguaacggcgugaagggcuucaacugcuacuucccacugcaguccuacggcuuucagcccacauacggcgugggcuaucagcccuacagagugguggugcugagcuucgaacugcugcaugccccugccacagugugcggcccuaagaaaagcaccaaucucgugaagaacaaaugcgugaacuucaacuucaacggccugaccggcaccggcgugcugacagagagcaacaagaaguuccugccauuccagcaguuuggccgggauaucgccgauaccacagacgccguuagagauccccagacacuggaaauccuggacaucaccccuugcagcuucggcggagugucugugaucaccccuggcaccaacaccagcaaucagguggcagugcuguaccagggcgugaacuguaccgaagugcccguggccauucacgccgaucagcugacaccuacauggcggguguacuccaccggcagcaauguguuucagaccagagccggcugucugaucggagccgagcacgugaacaauagcuacgagugcgacauccccaucggcgcuggaaucugcgccagcuaccagacacagacaaacagcccucggagagccagaagcguggccagccagagcaucauugccuacacaaugucucugggcguggagaacagcguggccuacuccaacaacucuaucgcuauccccaccaacuucaccaucagcgugaccacagagauccugccuguguccaugaccaagaccagcguggacugcaccauguacaucugcggcgauuccaccgagugcuccaaccugcugcugcaguacggcagcuucugcacccagcugaauagagcccugacagggaucgccguggaacaggacaagaacacccaagagguguucgcccaagugaagcagaucuacaagaccccuccuaucaaggacuucggcggcuucaauuucagccagauucugcccgauccuagcaagcccagcaagcggagcuucaucgaggaccugcuguucaacaaagugacacuggccgacgccggcuucaucaagcaguauggcgauugucugggcgacauugccgccagggaucugauuugcgcccagaaguuuaacggacugacagugcugccuccucugcugaccgaugagaugaucgcccaguacacaucugcccugcuggccggcacaaucacaagcggcuggacauuuggagcaggcgccgcucugcagauccccuuugcuaugcagauggccuaccgguucaacggcaucggagugacccagaaugugcuguacgagaaccagaagcugaucgccaaccaguucaacagcgccaucggcaagauccaggacagccugagcagcacagcaagcgcccugggaaagcugcaggacguggucaaccagaaugcccaggcacugaacacccuggucaagcagcuguccuccaacuucggcgccaucagcucugugcugaacgauauccugagcagacuggacaaggucgaggccgaggugcagaucgacagacugaucacaggcagacugcagagccuccagacauacgugacccagcagcugaucagagccgccgagauuagagccucugccaaucuggccgccaccaagaugucugagugugugcugggccagagcaagagaguggacuuuugcggcaagggcuaccaccugaugagcuucccucagucugccccucacggcgugguguuucugcacgugacauaugugcccgcucaagagaagaauuucaccaccgcuccagccaucugccacgacggcaaagcccacuuuccuagagaaggcguguucguguccaacggcacccauugguucgugacacagcggaacuucuacgagccccagaucaucaccaccgacaacaccuucgugucuggcaacugcgacgucgugaucggcauugugaacaauaccguguacgacccucugcagcccgagcuggacagcuucaaagaggaacuggacaaguacuuuaagaaccacacaagccccgacguggaccugggcgauaucagcggaaucaaugccagcgucgugaacauccagaaagagaucgaccggcugaacgagguggccaagaaucugaacgagagccugaucgaccugcaagaacuggggaaguacgagcaguacaucaaguggcccugguacaucuggcugggcuuuaucgccggacugauugccaucgugauggucacaaucaugcuguguugcaugaccagcugcuguagcugccugaagggcuguuguagcuguggcagcugcugcaaguucgacgaggacgauucugagcccgugcugaagggcgugaaacugcacuacacaugaggacuaguuauaagacugacuagcccgaugggccucccaacgggcccuccuccccuccuugcaccgagauuaauagaucuaaaaaaaaaaaaaaaaaaaaaaaaaaaaaaaaaaaaaaaaaaaaaaaaaaaaaaaaaaaaaaaaaaaaaaaaaaaaaaaaaaaaaaaaaaaaaaaaaaaa

SEQ ID NO: 25714 - RNA, 4017 nt, Artificial Sequence
  SARS-CoV-2/Wuhan/WIV05/2019__EPI_ISL_402128 spike protein mRNA gc mod (1-1273)(E484K_D614G)
aggagaaagcuuaccauguucguguuccuggugcugcugccucugguguccagccagugugugaaccugaccaccagaacacagcugccuccagccuacaccaacagcuuuaccagaggcguguacuaccccgacaagguguucagauccagcgugcugcacucuacccaggaccuguuccugccuuucuucagcaacgugaccugguuccacgccauccacguguccggcaccaauggcaccaagagauucgacaaccccgugcugcccuucaacgacgggguguacuuugccagcaccgagaaguccaacaucaucagaggcuggaucuucggcaccacacuggacagcaagacccagagccugcugaucgugaacaacgccaccaacguggucaucaaagugugcgaguuccaguucugcaacgaccccuuccugggcgucuacuaccacaagaacaacaagagcuggauggaaagcgaguuccggguguacagcagcgccaacaacugcaccuucgaguacgugucccagccuuuccugauggaccuggaaggcaagcagggcaacuucaagaaccugcgcgaguucguguuuaagaacaucgacggcuacuucaagaucuacagcaagcacaccccuaucaaccucgugcgggaucugccucagggcuucucugcucuggaaccccugguggaucugcccaucggcaucaacaucacccgguuucagacacugcuggcccugcacagaagcuaccugacaccuggcgauagcagcagcggauggacagcuggugccgccgcuuacuaugugggcuaccugcagccuagaaccuuccugcugaaguacaacgagaacggcaccaucaccgacgccguggauugugcucuggauccucugagcgagacaaagugcacccugaaguccuucaccguggaaaagggcaucuaccagaccagcaacuuccgggugcagcccaccgaauccaucgugcgguuccccaauaucaccaaucugugccccuucggcgagguguucaaugccaccagauucgccucuguguacgccuggaaccggaagcggaucagcaauugcguggccgacuacuccgugcuguacaacuccgccagcuucagcaccuucaagugcuacggcguguccccuaccaagcugaacgaccugugcuucacaaacguguacgccgacagcuucgugauccggggagaugaagugcggcagauugccccuggacagacaggcaagaucgccgacuacaacuacaagcugcccgacgacuucaccggcugugugauugccuggaacagcaacaaccuggacuccaaagucggcggcaacuacaauuaccuguaccggcuguuccggaaguccaaucugaagcccuucgagcgggacaucuccaccgagaucuaucaggccggcagcaccccuuguaacggcgugaagggcuucaacugcuacuucccacugcaguccuacggcuuucagcccacaaauggcgugggcuaucagcccuacagagugguggugcugagcuucgaacugcugcaugccccugccacagugugcggcccuaagaaaagcaccaaucucgugaagaacaaaugcgugaacuucaacuucaacggccugaccggcaccggcgugcugacagagagcaacaagaaguuccugccauuccagcaguuuggccgggauaucgccgauaccacagacgccguuagagauccccagacacuggaaauccuggacaucaccccuugcagcuucggcggagugucugugaucaccccuggcaccaacaccagcaaucagguggcagugcuguaccagggcgugaacuguaccgaagugcccguggccauucacgccgaucagcugacaccuacauggcggguguacuccaccggcagcaauguguuucagaccagagccggcugucugaucggagccgagcacgugaacaauagcuacgagugcgacauccccaucggcgcuggaaucugcgccagcuaccagacacagacaaacagcccucggagagccagaagcguggccagccagagcaucauugccuacacaaugucucugggcgccgagaacagcguggccuacuccaacaacucuaucgcuauccccaccaacuucaccaucagcgugaccacagagauccugccuguguccaugaccaagaccagcguggacugcaccauguacaucugcggcgauuccaccgagugcuccaaccugcugcugcaguacggcagcuucugcacccagcugaauagagcccugacagggaucgccguggaacaggacaagaacacccaagagguguucgcccaagugaagcagaucuacaagaccccuccuaucaaggacuucggcggcuucaauuucagccagauucugcccgauccuagcaagcccagcaagcggagcuucaucgaggaccugcuguucaacaaagugacacuggccgacgccggcuucaucaagcaguauggcgauugucugggcgacauugccgccagggaucugauuugcgcccagaaguuuaacggacugacagugcugccuccucugcugaccgaugagaugaucgcccaguacacaucugcccugcuggccggcacaaucacaagcggcuggacauuuggagcaggcgccgcucugcagauccccuuugcuaugcagauggccuaccgguucaacggcaucggagugacccagaaugugcuguacgagaaccagaagcugaucgccaaccaguucaacagcgccaucggcaagauccaggacagccugagcagcacagcaagcgcccugggaaagcugcaggacguggucaaccagaaugcccaggcacugaacacccuggucaagcagcuguccuccaacuucggcgccaucagcucugugcugaacgauauccugagcagacuggacaaggucgaggccgaggugcagaucgacagacugaucacaggcagacugcagagccuccagacauacgugacccagcagcugaucagagccgccgagauuagagccucugccaaucuggccgccaccaagaugucugagugugugcugggccagagcaagagaguggacuuuugcggcaagggcuaccaccugaugagcuucccucagucugccccucacggcgugguguuucugcacgugacauaugugcccgcucaagagaagaauuucaccaccgcuccagccaucugccacgacggcaaagcccacuuuccuagagaaggcguguucguguccaacggcacccauugguucgugacacagcggaacuucuacgagccccagaucaucaccaccgacaacaccuucgugucuggcaacugcgacgucgugaucggcauugugaacaauaccguguacgacccucugcagcccgagcuggacagcuucaaagaggaacuggacaaguacuuuaagaaccacacaagccccgacguggaccugggcgauaucagcggaaucaaugccagcgucgugaacauccagaaagagaucgaccggcugaacgagguggccaagaaucugaacgagagccugaucgaccugcaagaacuggggaaguacgagcaguacaucaaguggcccugguacaucuggcugggcuuuaucgccggacugauugccaucgugauggucacaaucaugcuguguugcaugaccagcugcuguagcugccugaagggcuguuguagcuguggcagcugcugcaaguucgacgaggacgauucugagcccgugcugaagggcgugaaacugcacuacacaugaggacuaguuauaagacugacuagcccgaugggccucccaacgggcccuccuccccuccuugcaccgagauuaauagaucuaaaaaaaaaaaaaaaaaaaaaaaaaaaaaaaaaaaaaaaaaaaaaaaaaaaaaaaaaaaaaaaaaaaaaaaaaaaaaaaaaaaaaaaaaaaaaaaaaaaa

SEQ ID NO: 25715 - RNA, 4017 nt, Artificial Sequence
  SARS-CoV-2/Wuhan/WIV05/2019__EPI_ISL_402128 spike protein mRNA gc mod (1-1273)(L18F_T20N_P26S_D138Y_R190S_K417T_E484K_N501Y_D614G_H655Y _T1027I)
aggagaaagcuuaccauguucguguuccuggugcugcugccucugguguccagccagugugugaacuucaccaacagaacacagcugccuagcgccuacaccaacagcuuuaccagaggcguguacuaccccgacaagguguucagauccagcgugcugcacucuacccaggaccuguuccugccuuucuucagcaacgugaccugguuccacgccauccacguguccggcaccaauggcaccaagagauucgacaaccccgugcugcccuucaacgacgggguguacuuugccagcaccgagaaguccaacaucaucagaggcuggaucuucggcaccacacuggacagcaagacccagagccugcugaucgugaacaacgccaccaacguggucaucaaagugugcgaguuccaguucugcaacuaccccuuccugggcgucuacuaccacaagaacaacaagagcuggauggaaagcgaguuccggguguacagcagcgccaacaacugcaccuucgaguacgugucccagccuuuccugauggaccuggaaggcaagcagggcaacuucaagaaccugagcgaguucguguuuaagaacaucgacggcuacuucaagaucuacagcaagcacaccccuaucaaccucgugcgggaucugccucagggcuucucugcucuggaaccccugguggaucugcccaucggcaucaacaucacccgguuucagacacugcuggcccugcacagaagcuaccugacaccuggcgauagcagcagcggauggacagcuggugccgccgcuuacuaugugggcuaccugcagccuagaaccuuccugcugaaguacaacgagaacggcaccaucaccgacgccguggauugugcucuggauccucugagcgagacaaagugcacccugaaguccuucaccguggaaaagggcaucuaccagaccagcaacuuccgggugcagcccaccgaauccaucgugcgguuccccaauaucaccaaucugugccccuucggcgagguguucaaugccaccagauucgccucuguguacgccuggaaccggaagcggaucagcaauugcguggccgacuacuccgugcuguacaacuccgccagcuucagcaccuucaagugcuacggcguguccccuaccaagcugaacgaccugugcuucacaaacguguacgccgacagcuucgugauccggggagaugaagugcggcagauugccccuggacagacaggcaccaucgccgacuacaacuacaagcugcccgacgacuucaccggcugugugauugccuggaacagcaacaaccuggacuccaaagucggcggcaacuacaauuaccuguaccggcuguuccggaaguccaaucugaagcccuucgagcgggacaucuccaccgagaucuaucaggccggcagcaccccuuguaacggcgugaagggcuucaacugcuacuucccacugcaguccuacggcuuucagcccacauacggcgugggcuaucagcccuacagagugguggugcugagcuucgaacugcugcaugccccugccacagugugcggcccuaagaaaagcaccaaucucgugaagaacaaaugcgugaacuucaacuucaacggccugaccggcaccggcgugcugacagagagcaacaagaaguuccugccauuccagcaguuuggccgggauaucgccgauaccacagacgccguuagagauccccagacacuggaaauccuggacaucaccccuugcagcuucggcggagugucugugaucaccccuggcaccaacaccagcaaucagguggcagugcuguaccagggcgugaacuguaccgaagugcccguggccauucacgccgaucagcugacaccuacauggcggguguacuccaccggcagcaauguguuucagaccagagccggcugucugaucggagccgaguacgugaacaauagcuacgagugcgacauccccaucggcgcuggaaucugcgccagcuaccagacacagacaaacagcccucggagagccagaagcguggccagccagagcaucauugccuacacaaugucucugggcgccgagaacagcguggccuacuccaacaacucuaucgcuauccccaccaacuucaccaucagcgugaccacagagauccugccuguguccaugaccaagaccagcguggacugcaccauguacaucugcggcgauuccaccgagugcuccaaccugcugcugcaguacggcagcuucugcacccagcugaauagagcccugacagggaucgccguggaacaggacaagaacacccaagagguguucgcccaagugaagcagaucuacaagaccccuccuaucaaggacuucggcggcuucaauuucagccagauucugcccgauccuagcaagcccagcaagcggagcuucaucgaggaccugcuguucaacaaagugacacuggccgacgccggcuucaucaagcaguauggcgauugucugggcgacauugccgccagggaucugauuugcgcccagaaguuuaacggacugacagugcugccuccucugcugaccgaugagaugaucgcccaguacacaucugcccugcuggccggcacaaucacaagcggcuggacauuuggagcaggcgccgcucugcagauccccuuugcuaugcagauggccuaccgguucaacggcaucggagugacccagaaugugcuguacgagaaccagaagcugaucgccaaccaguucaacagcgccaucggcaagauccaggacagccugagcagcacagcaagcgcccugggaaagcugcaggacguggucaaccagaaugcccaggcacugaacacccuggucaagcagcuguccuccaacuucggcgccaucagcucugugcugaacgauauccugagcagacuggacaaggucgaggccgaggugcagaucgacagacugaucacaggcagacugcagagccuccagacauacgugacccagcagcugaucagagccgccgagauuagagccucugccaaucuggccgccaucaagaugucugagugugugcugggccagagcaagagaguggacuuuugcggcaagggcuaccaccugaugagcuucccucagucugccccucacggcgugguguuucugcacgugacauaugugcccgcucaagagaagaauuucaccaccgcuccagccaucugccacgacggcaaagcccacuuuccuagagaaggcguguucguguccaacggcacccauugguucgugacacagcggaacuucuacgagccccagaucaucaccaccgacaacaccuucgugucuggcaacugcgacgucgugaucggcauugugaacaauaccguguacgacccucugcagcccgagcuggacagcuucaaagaggaacuggacaaguacuuuaagaaccacacaagccccgacguggaccugggcgauaucagcggaaucaaugccagcgucgugaacauccagaaagagaucgaccggcugaacgagguggccaagaaucugaacgagagccugaucgaccugcaagaacuggggaaguacgagcaguacaucaaguggcccugguacaucuggcugggcuuuaucgccggacugauugccaucgugauggucacaaucaugcuguguugcaugaccagcugcuguagcugccugaagggcuguuguagcuguggcagcugcugcaaguucgacgaggacgauucugagcccgugcugaagggcgugaaacugcacuacacaugaggacuaguuauaagacugacuagcccgaugggccucccaacgggcccuccuccccuccuugcaccgagauuaauagaucuaaaaaaaaaaaaaaaaaaaaaaaaaaaaaaaaaaaaaaaaaaaaaaaaaaaaaaaaaaaaaaaaaaaaaaaaaaaaaaaaaaaaaaaaaaaaaaaaaaaa

SEQ ID NO: 25716 - RNA, 4017 nt, Artificial Sequence
  SARS-CoV-2/Wuhan/WIV05/2019__EPI_ISL_402128 spike protein mRNA gc mod (1-1273)(S13I_W152C_L452R_D614G)
aggagaaagcuuaccauguucguguuccuggugcugcugccucugguguccauccagugugugaaccugaccaccagaacacagcugccuccagccuacaccaacagcuuuaccagaggcguguacuaccccgacaagguguucagauccagcgugcugcacucuacccaggaccuguuccugccuuucuucagcaacgugaccugguuccacgccauccacguguccggcaccaauggcaccaagagauucgacaaccccgugcugcccuucaacgacgggguguacuuugccagcaccgagaaguccaacaucaucagaggcuggaucuucggcaccacacuggacagcaagacccagagccugcugaucgugaacaacgccaccaacguggucaucaaagugugcgaguuccaguucugcaacgaccccuuccugggcgucuacuaccacaagaacaacaagagcugcauggaaagcgaguuccggguguacagcagcgccaacaacugcaccuucgaguacgugucccagccuuuccugauggaccuggaaggcaagcagggcaacuucaagaaccugcgcgaguucguguuuaagaacaucgacggcuacuucaagaucuacagcaagcacaccccuaucaaccucgugcgggaucugccucagggcuucucugcucuggaaccccugguggaucugcccaucggcaucaacaucacccgguuucagacacugcuggcccugcacagaagcuaccugacaccuggcgauagcagcagcggauggacagcuggugccgccgcuuacuaugugggcuaccugcagccuagaaccuuccugcugaaguacaacgagaacggcaccaucaccgacgccguggauugugcucuggauccucugagcgagacaaagugcacccugaaguccuucaccguggaaaagggcaucuaccagaccagcaacuuccgggugcagcccaccgaauccaucgugcgguuccccaauaucaccaaucugugccccuucggcgagguguucaaugccaccagauucgccucuguguacgccuggaaccggaagcggaucagcaauugcguggccgacuacuccgugcuguacaacuccgccagcuucagcaccuucaagugcuacggcguguccccuaccaagcugaacgaccugugcuucacaaacguguacgccgacagcuucgugauccggggagaugaagugcggcagauugccccuggacagacaggcaagaucgccgacuacaacuacaagcugcccgacgacuucaccggcugugugauugccuggaacagcaacaaccuggacuccaaagucggcggcaacuacaauuaccgcuaccggcuguuccggaaguccaaucugaagcccuucgagcgggacaucuccaccgagaucuaucaggccggcagcaccccuuguaacggcguggaaggcuucaacugcuacuucccacugcaguccuacggcuuucagcccacaaauggcgugggcuaucagcccuacagagugguggugcugagcuucgaacugcugcaugccccugccacagugugcggcccuaagaaaagcaccaaucucgugaagaacaaaugcgugaacuucaacuucaacggccugaccggcaccggcgugcugacagagagcaacaagaaguuccugccauuccagcaguuuggccgggauaucgccgauaccacagacgccguuagagauccccagacacuggaaauccuggacaucaccccuugcagcuucggcggagugucugugaucaccccuggcaccaacaccagcaaucagguggcagugcuguaccagggcgugaacuguaccgaagugcccguggccauucacgccgaucagcugacaccuacauggcggguguacuccaccggcagcaauguguuucagaccagagccggcugucugaucggagccgagcacgugaacaauagcuacgagugcgacauccccaucggcgcuggaaucugcgccagcuaccagacacagacaaacagcccucggagagccagaagcguggccagccagagcaucauugccuacacaaugucucugggcgccgagaacagcguggccuacuccaacaacucuaucgcuauccccaccaacuucaccaucagcgugaccacagagauccugccuguguccaugaccaagaccagcguggacugcaccauguacaucugcggcgauuccaccgagugcuccaaccugcugcugcaguacggcagcuucugcacccagcugaauagagcccugacagggaucgccguggaacaggacaagaacacccaagagguguucgcccaagugaagcagaucuacaagaccccuccuaucaaggacuucggcggcuucaauuucagccagauucugcccgauccuagcaagcccagcaagcggagcuucaucgaggaccugcuguucaacaaagugacacuggccgacgccggcuucaucaagcaguauggcgauugucugggcgacauugccgccagggaucugauuugcgcccagaaguuuaacggacugacagugcugccuccucugcugaccgaugagaugaucgcccaguacacaucugcccugcuggccggcacaaucacaagcggcuggacauuuggagcaggcgccgcucugcagauccccuuugcuaugcagauggccuaccgguucaacggcaucggagugacccagaaugugcuguacgagaaccagaagcugaucgccaaccaguucaacagcgccaucggcaagauccaggacagccugagcagcacagcaagcgcccugggaaagcugcaggacguggucaaccagaaugcccaggcacugaacacccuggucaagcagcuguccuccaacuucggcgccaucagcucugugcugaacgauauccugagcagacuggacaaggucgaggccgaggugcagaucgacagacugaucacaggcagacugcagagccuccagacauacgugacccagcagcugaucagagccgccgagauuagagccucugccaaucuggccgccaccaagaugucugagugugugcugggccagagcaagagaguggacuuuugcggcaagggcuaccaccugaugagcuucccucagucugccccucacggcgugguguuucugcacgugacauaugugcccgcucaagagaagaauuucaccaccgcuccagccaucugccacgacggcaaagcccacuuuccuagagaaggcguguucguguccaacggcacccauugguucgugacacagcggaacuucuacgagccccagaucaucaccaccgacaacaccuucgugucuggcaacugcgacgucgugaucggcauugugaacaauaccguguacgacccucugcagcccgagcuggacagcuucaaagaggaacuggacaaguacuuuaagaaccacacaagccccgacguggaccugggcgauaucagcggaaucaaugccagcgucgugaacauccagaaagagaucgaccggcugaacgagguggccaagaaucugaacgagagccugaucgaccugcaagaacuggggaaguacgagcaguacaucaaguggcccugguacaucuggcugggcuuuaucgccggacugauugccaucgugauggucacaaucaugcuguguugcaugaccagcugcuguagcugccugaagggcuguuguagcuguggcagcugcugcaaguucgacgaggacgauucugagcccgugcugaagggcgugaaacugcacuacacaugaggacuaguuauaagacugacuagcccgaugggccucccaacgggcccuccuccccuccuugcaccgagauuaauagaucuaaaaaaaaaaaaaaaaaaaaaaaaaaaaaaaaaaaaaaaaaaaaaaaaaaaaaaaaaaaaaaaaaaaaaaaaaaaaaaaaaaaaaaaaaaaaaaaaaaaa

SEQ ID NO: 25717 - RNA, 4017 nt, Artificial Sequence
  SARS-CoV-2/Wuhan/WIV05/2019__EPI_ISL_402128 spike protein mRNA gc (1-1273)(K986P_V987P) R10154
aggagaaagcuuaccauguucguguuccugguccuccugccccuggugagcucccagugcgugaaccucaccacccgcacgcagcugccgcccgccuacaccaacagcuucacccggggcgucuacuaccccgacaagguguuccgcuccagcgugcugcacuccacccaggaccucuuccugcccuucuucagcaacgucacgugguuccacgccauccacguguccgggaccaacggcaccaagcgguucgacaacccggugcugcccuucaacgacggggucuacuucgcgagcaccgagaaguccaacaucauccgcggcuggaucuucgggacgacccucgacagcaagacccagucccugcugaucgugaacaacgccaccaacguggucaucaaggugugcgaguuccaguucugcaacgaccccuuccucggcguguacuaccacaagaacaacaagagcuggauggaguccgaguuccgggucuacagcuccgccaacaacugcacguucgaguacgugagccagcccuuccugauggaccuggagggcaagcaggggaacuucaagaaccuccgcgaguucguguucaagaacaucgacggcuacuucaagaucuacuccaagcacaccccgaucaaccugguccgggaccugccccagggguucagcgcccucgagccccugguggaccugcccaucggcaucaacaucacccgcuuccagacccuccuggcccugcaccgguccuaccucacgccgggggacagcagcuccggcuggaccgcgggcgccgccgccuacuacgugggguaccugcagccccgcaccuuccugcucaaguacaacgagaacggcaccaucacggacgcggucgacugcgcccuggacccccugagcgagaccaagugcacccucaaguccuucaccguggagaaggggaucuaccagacgagcaacuuccgggugcagcccaccgaguccaucguccgcuucccgaacaucaccaaccugugccccuucggcgagguguucaacgccacccgguucgccagcgucuacgccuggaaccgcaagcggaucuccaacugcguggcggacuacagcgugcuguacaacuccgccagcuucuccacguucaagugcuacggcgucagccccaccaagcucaacgaccugugcuucaccaacguguacgccgacuccuucgugauccgcggggacgagguccggcagaucgcccccggccagaccgggaagaucgccgacuacaacuacaagcugccggacgacuucacgggcugcgugaucgcguggaacagcaacaaccucgacuccaaggucgggggcaacuacaacuaccuguaccgccuguuccgcaagagcaaccucaagcccuucgagcgggacaucuccaccgagaucuaccaggccggcagcacccccugcaacgggguggagggcuucaacugcuacuucccccugcaguccuacggguuccagccgaccaacggcgugggguaccagcccuaccggguggucgugcugagcuucgagcuccugcacgcccccgccacggugugcggccccaagaaguccaccaaccuggucaagaacaagugcgugaacuucaacuucaacggccucaccgggaccggcgugcugaccgagagcaacaagaaguuccugccguuccagcaguucgggcgcgacaucgccgacacgaccgacgcgguccgcgacccccagacccuggagauccucgacaucacccccugcagcuucggcgggguguccgugaucacgccgggcaccaacaccagcaaccaggucgccgugcuguaccaggacgugaacugcaccgagguccccguggccauccacgccgaccagcugacgcccaccuggcggguguacuccaccggcagcaacgucuuccagacccgcgccgggugccucaucggcgcggagcacgugaacaacuccuacgagugcgacauccccaucggggccggcaucugcgccagcuaccagacgcagaccaacuccccgcggcgcgcccggagcguggcgucccagagcaucaucgccuacaccaugucccugggcgccgagaacagcgucgccuacuccaacaacagcaucgccauccccaccaacuucacgaucuccgugaccaccgagauccugcccgugagcaugaccaagacgagcgucgacugcaccauguacaucugcggggacuccaccgagugcagcaaccuccugcugcaguacggcuccuucugcacccagcucaaccgcgcgcugacggggaucgccguggagcaggacaagaacacccaggagguguucgcccaggucaagcagaucuacaagacgcccccgaucaaggacuucggcggguucaacuucagccagauccugcccgaccccuccaagcccagcaagcgguccuucaucgaggaccuccuguucaacaaggugacccuggccgacgccggcuucaucaagcaguacggcgacugccucggggacaucgcggcccgcgaccugaucugcgcccagaaguucaacggccugaccgugcucccgccccugcugaccgacgagaugaucgcccaguacaccagcgcccuccuggcggggaccaucacguccggcuggaccuucggggccggcgccgcccugcagauccccuucgcgaugcagauggccuaccgguucaacggcaucggggucacccagaacgugcucuacgagaaccagaagcugaucgccaaccaguucaacagcgccaucggcaagauccaggacucccugagcuccaccgccagcgcgcucgggaagcugcaggacguggucaaccagaacgcccaggcccugaacacgcucgugaagcagcuguccagcaacuucggcgccaucuccagcgugcugaacgacauccucucccgccuggacccgcccgaggccgaggugcagaucgaccggcugaucaccgggcgccuccagagccugcagaccuacgugacccagcagcugauccgggcggccgagauccgcgccagcgccaaccucgccgcgaccaagauguccgagugcguccugggccagagcaagcggguggacuucugcggcaagggguaccaccugauguccuucccccagagcgccccgcacggcguggucuuccuccacgugacguacguccccgcccaggagaagaacuucaccaccgcccccgcgaucugccacgacgggaaggcccacuucccccgcgagggcguguucguguccaacgggacccacugguucgucacgcagcggaacuucuacgagccgcagaucaucaccaccgacaacaccuucgugagcggcaacugcgacguggucaucggcaucgugaacaacacgguguacgacccccugcagcccgagcuggacuccuucaaggaggagcucgacaaguacuucaagaaccacaccagccccgacgucgaccugggggacaucuccggcaucaacgccagcguggugaacauccagaaggagaucgaccgccugaacgaggucgccaagaaccucaacgagucccugaucgaccugcaggagcucgggaaguacgagcaguacaucaaguggccgugguacaucuggcugggcuucaucgccggccugaucgcgaucgugauggugaccaucaugcucugcugcaugaccagcugcugcuccugccugaaggggugcugcagcugcggcuccugcugcaaguucgacgaggacgacagcgagcccguccugaagggggugaagcuccacuacacgugaggacuaguuauaagacugacuagcccgaugggccucccaacgggcccuccuccccuccuugcaccgagauuaauagaucuaaaaaaaaaaaaaaaaaaaaaaaaaaaaaaaaaaaaaaaaaaaaaaaaaaaaaaaaaaaaaaaaaaaaaaaaaaaaaaaaaaaaaaaaaaaaaaaaaaaa

SEQ ID NO: 25718 - RNA, 4017 nt, Artificial Sequence
  SARS-CoV-2/Wuhan/WIV05/2019__EPI_ISL_402128 spike protein mRNA gc (1-1273)(K986P_V987P_ D614G)
aggagaaagcuuaccauguucguguuccugguccuccugccccuggugagcucccagugcgugaaccucaccacccgcacgcagcugccgcccgccuacaccaacagcuucacccggggcgucuacuaccccgacaagguguuccgcuccagcgugcugcacuccacccaggaccucuuccugcccuucuucagcaacgucacgugguuccacgccauccacguguccgggaccaacggcaccaagcgguucgacaacccggugcugcccuucaacgacggggucuacuucgcgagcaccgagaaguccaacaucauccgcggcuggaucuucgggacgacccucgacagcaagacccagucccugcugaucgugaacaacgccaccaacguggucaucaaggugugcgaguuccaguucugcaacgaccccuuccucggcguguacuaccacaagaacaacaagagcuggauggaguccgaguuccgggucuacagcuccgccaacaacugcacguucgaguacgugagccagcccuuccugauggaccuggagggcaagcaggggaacuucaagaaccuccgcgaguucguguucaagaacaucgacggcuacuucaagaucuacuccaagcacaccccgaucaaccugguccgggaccugccccagggguucagcgcccucgagccccugguggaccugcccaucggcaucaacaucacccgcuuccagacccuccuggcccugcaccgguccuaccucacgccgggggacagcagcuccggcuggaccgcgggcgccgccgccuacuacgugggguaccugcagccccgcaccuuccugcucaaguacaacgagaacggcaccaucacggacgcggucgacugcgcccuggacccccugagcgagaccaagugcacccucaaguccuucaccguggagaaggggaucuaccagacgagcaacuuccgggugcagcccaccgaguccaucguccgcuucccgaacaucaccaaccugugccccuucggcgagguguucaacgccacccgguucgccagcgucuacgccuggaaccgcaagcggaucuccaacugcguggcggacuacagcgugcuguacaacuccgccagcuucuccacguucaagugcuacggcgucagccccaccaagcucaacgaccugugcuucaccaacguguacgccgacuccuucgugauccgcggggacgagguccggcagaucgcccccggccagaccgggaagaucgccgacuacaacuacaagcugccggacgacuucacgggcugcgugaucgcguggaacagcaacaaccucgacuccaaggucgggggcaacuacaacuaccuguaccgccuguuccgcaagagcaaccucaagcccuucgagcgggacaucuccaccgagaucuaccaggccggcagcacccccugcaacgggguggagggcuucaacugcuacuucccccugcaguccuacggguuccagccgaccaacggcgugggguaccagcccuaccggguggucgugcugagcuucgagcuccugcacgcccccgccacggugugcggccccaagaaguccaccaaccuggucaagaacaagugcgugaacuucaacuucaacggccucaccgggaccggcgugcugaccgagagcaacaagaaguuccugccguuccagcaguucgggcgcgacaucgccgacacgaccgacgcgguccgcgacccccagacccuggagauccucgacaucacccccugcagcuucggcgggguguccgugaucacgccgggcaccaacaccagcaaccaggucgccgugcuguaccagggcgugaacugcaccgagguccccguggccauccacgccgaccagcugacgcccaccuggcggguguacuccaccggcagcaacgucuuccagacccgcgccgggugccucaucggcgcggagcacgugaacaacuccuacgagugcgacauccccaucggggccggcaucugcgccagcuaccagacgcagaccaacuccccgcggcgcgcccggagcguggcgucccagagcaucaucgccuacaccaugucccugggcgccgagaacagcgucgccuacuccaacaacagcaucgccauccccaccaacuucacgaucuccgugaccaccgagauccugcccgugagcaugaccaagacgagcgucgacugcaccauguacaucugcggggacuccaccgagugcagcaaccuccugcugcaguacggcuccuucugcacccagcucaaccgcgcgcugacggggaucgccguggagcaggacaagaacacccaggagguguucgcccaggucaagcagaucuacaagacgcccccgaucaaggacuucggcggguucaacuucagccagauccugcccgaccccuccaagcccagcaagcgguccuucaucgaggaccuccuguucaacaaggugacccuggccgacgccggcuucaucaagcaguacggcgacugccucggggacaucgcggcccgcgaccugaucugcgcccagaaguucaacggccugaccgugcucccgccccugcugaccgacgagaugaucgcccaguacaccagcgcccuccuggcggggaccaucacguccggcuggaccuucggggccggcgccgcccugcagauccccuucgcgaugcagauggccuaccgguucaacggcaucggggucacccagaacgugcucuacgagaaccagaagcugaucgccaaccaguucaacagcgccaucggcaagauccaggacucccugagcuccaccgccagcgcgcucgggaagcugcaggacguggucaaccagaacgcccaggcccugaacacgcucgugaagcagcuguccagcaacuucggcgccaucuccagcgugcugaacgacauccucucccgccuggacccgcccgaggccgaggugcagaucgaccggcugaucaccgggcgccuccagagccugcagaccuacgugacccagcagcugauccgggcggccgagauccgcgccagcgccaaccucgccgcgaccaagauguccgagugcguccugggccagagcaagcggguggacuucugcggcaagggguaccaccugauguccuucccccagagcgccccgcacggcguggucuuccuccacgugacguacguccccgcccaggagaagaacuucaccaccgcccccgcgaucugccacgacgggaaggcccacuucccccgcgagggcguguucguguccaacgggacccacugguucgucacgcagcggaacuucuacgagccgcagaucaucaccaccgacaacaccuucgugagcggcaacugcgacguggucaucggcaucgugaacaacacgguguacgacccccugcagcccgagcuggacuccuucaaggaggagcucgacaaguacuucaagaaccacaccagccccgacgucgaccugggggacaucuccggcaucaacgccagcguggugaacauccagaaggagaucgaccgccugaacgaggucgccaagaaccucaacgagucccugaucgaccugcaggagcucgggaaguacgagcaguacaucaaguggccgugguacaucuggcugggcuucaucgccggccugaucgcgaucgugauggugaccaucaugcucugcugcaugaccagcugcugcuccugccugaaggggugcugcagcugcggcuccugcugcaaguucgacgaggacgacagcgagcccguccugaagggggugaagcuccacuacacgugaggacuaguuauaagacugacuagcccgaugggccucccaacgggcccuccuccccuccuugcaccgagauuaauagaucuaaaaaaaaaaaaaaaaaaaaaaaaaaaaaaaaaaaaaaaaaaaaaaaaaaaaaaaaaaaaaaaaaaaaaaaaaaaaaaaaaaaaaaaaaaaaaaaaaaaa

SEQ ID NO: 25719 - RNA, 4017 nt, Artificial Sequence
  SARS-CoV-2/Wuhan/WIV05/2019__EPI_ISL_402128 spike protein mRNA gc (1-1273)(K986P_V987P_A222V_D614G)
aggagaaagcuuaccauguucguguuccugguccuccugccccuggugagcucccagugcgugaaccucaccacccgcacgcagcugccgcccgccuacaccaacagcuucacccggggcgucuacuaccccgacaagguguuccgcuccagcgugcugcacuccacccaggaccucuuccugcccuucuucagcaacgucacgugguuccacgccauccacguguccgggaccaacggcaccaagcgguucgacaacccggugcugcccuucaacgacggggucuacuucgcgagcaccgagaaguccaacaucauccgcggcuggaucuucgggacgacccucgacagcaagacccagucccugcugaucgugaacaacgccaccaacguggucaucaaggugugcgaguuccaguucugcaacgaccccuuccucggcguguacuaccacaagaacaacaagagcuggauggaguccgaguuccgggucuacagcuccgccaacaacugcacguucgaguacgugagccagcccuuccugauggaccuggagggcaagcaggggaacuucaagaaccuccgcgaguucguguucaagaacaucgacggcuacuucaagaucuacuccaagcacaccccgaucaaccugguccgggaccugccccagggguucagcguccucgagccccugguggaccugcccaucggcaucaacaucacccgcuuccagacccuccuggcccugcaccgguccuaccucacgccgggggacagcagcuccggcuggaccgcgggcgccgccgccuacuacgugggguaccugcagccccgcaccuuccugcucaaguacaacgagaacggcaccaucacggacgcggucgacugcgcccuggacccccugagcgagaccaagugcacccucaaguccuucaccguggagaaggggaucuaccagacgagcaacuuccgggugcagcccaccgaguccaucguccgcuucccgaacaucaccaaccugugccccuucggcgagguguucaacgccacccgguucgccagcgucuacgccuggaaccgcaagcggaucuccaacugcguggcggacuacagcgugcuguacaacuccgccagcuucuccacguucaagugcuacggcgucagccccaccaagcucaacgaccugugcuucaccaacguguacgccgacuccuucgugauccgcggggacgagguccggcagaucgcccccggccagaccgggaagaucgccgacuacaacuacaagcugccggacgacuucacgggcugcgugaucgcguggaacagcaacaaccucgacuccaaggucgggggcaacuacaacuaccuguaccgccuguuccgcaagagcaaccucaagcccuucgagcgggacaucuccaccgagaucuaccaggccggcagcacccccugcaacgggguggagggcuucaacugcuacuucccccugcaguccuacggguuccagccgaccaacggcgugggguaccagcccuaccggguggucgugcugagcuucgagcuccugcacgcccccgccacggugugcggccccaagaaguccaccaaccuggucaagaacaagugcgugaacuucaacuucaacggccucaccgggaccggcgugcugaccgagagcaacaagaaguuccugccguuccagcaguucgggcgcgacaucgccgacacgaccgacgcgguccgcgacccccagacccuggagauccucgacaucacccccugcagcuucggcgggguguccgugaucacgccgggcaccaacaccagcaaccaggucgccgugcuguaccagggcgugaacugcaccgagguccccguggccauccacgccgaccagcugacgcccaccuggcggguguacuccaccggcagcaacgucuuccagacccgcgccgggugccucaucggcgcggagcacgugaacaacuccuacgagugcgacauccccaucggggccggcaucugcgccagcuaccagacgcagaccaacuccccgcggcgcgcccggagcguggcgucccagagcaucaucgccuacaccaugucccugggcgccgagaacagcgucgccuacuccaacaacagcaucgccauccccaccaacuucacgaucuccgugaccaccgagauccugcccgugagcaugaccaagacgagcgucgacugcaccauguacaucugcggggacuccaccgagugcagcaaccuccugcugcaguacggcuccuucugcacccagcucaaccgcgcgcugacggggaucgccguggagcaggacaagaacacccaggagguguucgcccaggucaagcagaucuacaagacgcccccgaucaaggacuucggcggguucaacuucagccagauccugcccgaccccuccaagcccagcaagcgguccuucaucgaggaccuccuguucaacaaggugacccuggccgacgccggcuucaucaagcaguacggcgacugccucggggacaucgcggcccgcgaccugaucugcgcccagaaguucaacggccugaccgugcucccgccccugcugaccgacgagaugaucgcccaguacaccagcgcccuccuggcggggaccaucacguccggcuggaccuucggggccggcgccgcccugcagauccccuucgcgaugcagauggccuaccgguucaacggcaucggggucacccagaacgugcucuacgagaaccagaagcugaucgccaaccaguucaacagcgccaucggcaagauccaggacucccugagcuccaccgccagcgcgcucgggaagcugcaggacguggucaaccagaacgcccaggcccugaacacgcucgugaagcagcuguccagcaacuucggcgccaucuccagcgugcugaacgacauccucucccgccuggacccgcccgaggccgaggugcagaucgaccggcugaucaccgggcgccuccagagccugcagaccuacgugacccagcagcugauccgggcggccgagauccgcgccagcgccaaccucgccgcgaccaagauguccgagugcguccugggccagagcaagcggguggacuucugcggcaagggguaccaccugauguccuucccccagagcgccccgcacggcguggucuuccuccacgugacguacguccccgcccaggagaagaacuucaccaccgcccccgcgaucugccacgacgggaaggcccacuucccccgcgagggcguguucguguccaacgggacccacugguucgucacgcagcggaacuucuacgagccgcagaucaucaccaccgacaacaccuucgugagcggcaacugcgacguggucaucggcaucgugaacaacacgguguacgacccccugcagcccgagcuggacuccuucaaggaggagcucgacaaguacuucaagaaccacaccagccccgacgucgaccugggggacaucuccggcaucaacgccagcguggugaacauccagaaggagaucgaccgccugaacgaggucgccaagaaccucaacgagucccugaucgaccugcaggagcucgggaaguacgagcaguacaucaaguggccgugguacaucuggcugggcuucaucgccggccugaucgcgaucgugauggugaccaucaugcucugcugcaugaccagcugcugcuccugccugaaggggugcugcagcugcggcuccugcugcaaguucgacgaggacgacagcgagcccguccugaagggggugaagcuccacuacacgugaggacuaguuauaagacugacuagcccgaugggccucccaacgggcccuccuccccuccuugcaccgagauuaauagaucuaaaaaaaaaaaaaaaaaaaaaaaaaaaaaaaaaaaaaaaaaaaaaaaaaaaaaaaaaaaaaaaaaaaaaaaaaaaaaaaaaaaaaaaaaaaaaaaaaaaa

SEQ ID NO: 25720 - RNA, 4017 nt, Artificial Sequence
  SARS-CoV-2/Wuhan/WIV05/2019__EPI_ISL_402128 spike protein mRNA gc (1-1273)(K986P_V987P_N439K_D614G)
aggagaaagcuuaccauguucguguuccugguccuccugccccuggugagcucccagugcgugaaccucaccacccgcacgcagcugccgcccgccuacaccaacagcuucacccggggcgucuacuaccccgacaagguguuccgcuccagcgugcugcacuccacccaggaccucuuccugcccuucuucagcaacgucacgugguuccacgccauccacguguccgggaccaacggcaccaagcgguucgacaacccggugcugcccuucaacgacggggucuacuucgcgagcaccgagaaguccaacaucauccgcggcuggaucuucgggacgacccucgacagcaagacccagucccugcugaucgugaacaacgccaccaacguggucaucaaggugugcgaguuccaguucugcaacgaccccuuccucggcguguacuaccacaagaacaacaagagcuggauggaguccgaguuccgggucuacagcuccgccaacaacugcacguucgaguacgugagccagcccuuccugauggaccuggagggcaagcaggggaacuucaagaaccuccgcgaguucguguucaagaacaucgacggcuacuucaagaucuacuccaagcacaccccgaucaaccugguccgggaccugccccagggguucagcgcccucgagccccugguggaccugcccaucggcaucaacaucacccgcuuccagacccuccuggcccugcaccgguccuaccucacgccgggggacagcagcuccggcuggaccgcgggcgccgccgccuacuacgugggguaccugcagccccgcaccuuccugcucaaguacaacgagaacggcaccaucacggacgcggucgacugcgcccuggacccccugagcgagaccaagugcacccucaaguccuucaccguggagaaggggaucuaccagacgagcaacuuccgggugcagcccaccgaguccaucguccgcuucccgaacaucaccaaccugugccccuucggcgagguguucaacgccacccgguucgccagcgucuacgccuggaaccgcaagcggaucuccaacugcguggcggacuacagcgugcuguacaacuccgccagcuucuccacguucaagugcuacggcgucagccccaccaagcucaacgaccugugcuucaccaacguguacgccgacuccuucgugauccgcggggacgagguccggcagaucgcccccggccagaccgggaagaucgccgacuacaacuacaagcugccggacgacuucacgggcugcgugaucgcguggaacagcaagaaccucgacuccaaggucgggggcaacuacaacuaccuguaccgccuguuccgcaagagcaaccucaagcccuucgagcgggacaucuccaccgagaucuaccaggccggcagcacccccugcaacgggguggagggcuucaacugcuacuucccccugcaguccuacggguuccagccgaccaacggcgugggguaccagcccuaccggguggucgugcugagcuucgagcuccugcacgcccccgccacggugugcggccccaagaaguccaccaaccuggucaagaacaagugcgugaacuucaacuucaacggccucaccgggaccggcgugcugaccgagagcaacaagaaguuccugccguuccagcaguucgggcgcgacaucgccgacacgaccgacgcgguccgcgacccccagacccuggagauccucgacaucacccccugcagcuucggcgggguguccgugaucacgccgggcaccaacaccagcaaccaggucgccgugcuguaccagggcgugaacugcaccgagguccccguggccauccacgccgaccagcugacgcccaccuggcggguguacuccaccggcagcaacgucuuccagacccgcgccgggugccucaucggcgcggagcacgugaacaacuccuacgagugcgacauccccaucggggccggcaucugcgccagcuaccagacgcagaccaacuccccgcggcgcgcccggagcguggcgucccagagcaucaucgccuacaccaugucccugggcgccgagaacagcgucgccuacuccaacaacagcaucgccauccccaccaacuucacgaucuccgugaccaccgagauccugcccgugagcaugaccaagacgagcgucgacugcaccauguacaucugcggggacuccaccgagugcagcaaccuccugcugcaguacggcuccuucugcacccagcucaaccgcgcgcugacggggaucgccguggagcaggacaagaacacccaggagguguucgcccaggucaagcagaucuacaagacgcccccgaucaaggacuucggcggguucaacuucagccagauccugcccgaccccuccaagcccagcaagcgguccuucaucgaggaccuccuguucaacaaggugacccuggccgacgccggcuucaucaagcaguacggcgacugccucggggacaucgcggcccgcgaccugaucugcgcccagaaguucaacggccugaccgugcucccgccccugcugaccgacgagaugaucgcccaguacaccagcgcccuccuggcggggaccaucacguccggcuggaccuucggggccggcgccgcccugcagauccccuucgcgaugcagauggccuaccgguucaacggcaucggggucacccagaacgugcucuacgagaaccagaagcugaucgccaaccaguucaacagcgccaucggcaagauccaggacucccugagcuccaccgccagcgcgcucgggaagcugcaggacguggucaaccagaacgcccaggcccugaacacgcucgugaagcagcuguccagcaacuucggcgccaucuccagcgugcugaacgacauccucucccgccuggacccgcccgaggccgaggugcagaucgaccggcugaucaccgggcgccuccagagccugcagaccuacgugacccagcagcugauccgggcggccgagauccgcgccagcgccaaccucgccgcgaccaagauguccgagugcguccugggccagagcaagcggguggacuucugcggcaagggguaccaccugauguccuucccccagagcgccccgcacggcguggucuuccuccacgugacguacguccccgcccaggagaagaacuucaccaccgcccccgcgaucugccacgacgggaaggcccacuucccccgcgagggcguguucguguccaacgggacccacugguucgucacgcagcggaacuucuacgagccgcagaucaucaccaccgacaacaccuucgugagcggcaacugcgacguggucaucggcaucgugaacaacacgguguacgacccccugcagcccgagcuggacuccuucaaggaggagcucgacaaguacuucaagaaccacaccagccccgacgucgaccugggggacaucuccggcaucaacgccagcguggugaacauccagaaggagaucgaccgccugaacgaggucgccaagaaccucaacgagucccugaucgaccugcaggagcucgggaaguacgagcaguacaucaaguggccgugguacaucuggcugggcuucaucgccggccugaucgcgaucgugauggugaccaucaugcucugcugcaugaccagcugcugcuccugccugaaggggugcugcagcugcggcuccugcugcaaguucgacgaggacgacagcgagcccguccugaagggggugaagcuccacuacacgugaggacuaguuauaagacugacuagcccgaugggccucccaacgggcccuccuccccuccuugcaccgagauuaauagaucuaaaaaaaaaaaaaaaaaaaaaaaaaaaaaaaaaaaaaaaaaaaaaaaaaaaaaaaaaaaaaaaaaaaaaaaaaaaaaaaaaaaaaaaaaaaaaaaaaaaa

SEQ ID NO: 25721 - RNA, 4017 nt, Artificial Sequence
  SARS-CoV-2/Wuhan/WIV05/2019__EPI_ISL_402128 spike protein mRNA gc (1-1273)(K986P_V987P_S477N_D614G)
aggagaaagcuuaccauguucguguuccugguccuccugccccuggugagcucccagugcgugaaccucaccacccgcacgcagcugccgcccgccuacaccaacagcuucacccggggcgucuacuaccccgacaagguguuccgcuccagcgugcugcacuccacccaggaccucuuccugcccuucuucagcaacgucacgugguuccacgccauccacguguccgggaccaacggcaccaagcgguucgacaacccggugcugcccuucaacgacggggucuacuucgcgagcaccgagaaguccaacaucauccgcggcuggaucuucgggacgacccucgacagcaagacccagucccugcugaucgugaacaacgccaccaacguggucaucaaggugugcgaguuccaguucugcaacgaccccuuccucggcguguacuaccacaagaacaacaagagcuggauggaguccgaguuccgggucuacagcuccgccaacaacugcacguucgaguacgugagccagcccuuccugauggaccuggagggcaagcaggggaacuucaagaaccuccgcgaguucguguucaagaacaucgacggcuacuucaagaucuacuccaagcacaccccgaucaaccugguccgggaccugccccagggguucagcgcccucgagccccugguggaccugcccaucggcaucaacaucacccgcuuccagacccuccuggcccugcaccgguccuaccucacgccgggggacagcagcuccggcuggaccgcgggcgccgccgccuacuacgugggguaccugcagccccgcaccuuccugcucaaguacaacgagaacggcaccaucacggacgcggucgacugcgcccuggacccccugagcgagaccaagugcacccucaaguccuucaccguggagaaggggaucuaccagacgagcaacuuccgggugcagcccaccgaguccaucguccgcuucccgaacaucaccaaccugugccccuucggcgagguguucaacgccacccgguucgccagcgucuacgccuggaaccgcaagcggaucuccaacugcguggcggacuacagcgugcuguacaacuccgccagcuucuccacguucaagugcuacggcgucagccccaccaagcucaacgaccugugcuucaccaacguguacgccgacuccuucgugauccgcggggacgagguccggcagaucgcccccggccagaccgggaagaucgccgacuacaacuacaagcugccggacgacuucacgggcugcgugaucgcguggaacagcaacaaccucgacuccaaggucgggggcaacuacaacuaccuguaccgccuguuccgcaagagcaaccucaagcccuucgagcgggacaucuccaccgagaucuaccaggccggcaacacccccugcaacgggguggagggcuucaacugcuacuucccccugcaguccuacggguuccagccgaccaacggcgugggguaccagcccuaccggguggucgugcugagcuucgagcuccugcacgcccccgccacggugugcggccccaagaaguccaccaaccuggucaagaacaagugcgugaacuucaacuucaacggccucaccgggaccggcgugcugaccgagagcaacaagaaguuccugccguuccagcaguucgggcgcgacaucgccgacacgaccgacgcgguccgcgacccccagacccuggagauccucgacaucacccccugcagcuucggcgggguguccgugaucacgccgggcaccaacaccagcaaccaggucgccgugcuguaccagggcgugaacugcaccgagguccccguggccauccacgccgaccagcugacgcccaccuggcggguguacuccaccggcagcaacgucuuccagacccgcgccgggugccucaucggcgcggagcacgugaacaacuccuacgagugcgacauccccaucggggccggcaucugcgccagcuaccagacgcagaccaacuccccgcggcgcgcccggagcguggcgucccagagcaucaucgccuacaccaugucccugggcgccgagaacagcgucgccuacuccaacaacagcaucgccauccccaccaacuucacgaucuccgugaccaccgagauccugcccgugagcaugaccaagacgagcgucgacugcaccauguacaucugcggggacuccaccgagugcagcaaccuccugcugcaguacggcuccuucugcacccagcucaaccgcgcgcugacggggaucgccguggagcaggacaagaacacccaggagguguucgcccaggucaagcagaucuacaagacgcccccgaucaaggacuucggcggguucaacuucagccagauccugcccgaccccuccaagcccagcaagcgguccuucaucgaggaccuccuguucaacaaggugacccuggccgacgccggcuucaucaagcaguacggcgacugccucggggacaucgcggcccgcgaccugaucugcgcccagaaguucaacggccugaccgugcucccgccccugcugaccgacgagaugaucgcccaguacaccagcgcccuccuggcggggaccaucacguccggcuggaccuucggggccggcgccgcccugcagauccccuucgcgaugcagauggccuaccgguucaacggcaucggggucacccagaacgugcucuacgagaaccagaagcugaucgccaaccaguucaacagcgccaucggcaagauccaggacucccugagcuccaccgccagcgcgcucgggaagcugcaggacguggucaaccagaacgcccaggcccugaacacgcucgugaagcagcuguccagcaacuucggcgccaucuccagcgugcugaacgacauccucucccgccuggacccgcccgaggccgaggugcagaucgaccggcugaucaccgggcgccuccagagccugcagaccuacgugacccagcagcugauccgggcggccgagauccgcgccagcgccaaccucgccgcgaccaagauguccgagugcguccugggccagagcaagcggguggacuucugcggcaagggguaccaccugauguccuucccccagagcgccccgcacggcguggucuuccuccacgugacguacguccccgcccaggagaagaacuucaccaccgcccccgcgaucugccacgacgggaaggcccacuucccccgcgagggcguguucguguccaacgggacccacugguucgucacgcagcggaacuucuacgagccgcagaucaucaccaccgacaacaccuucgugagcggcaacugcgacguggucaucggcaucgugaacaacacgguguacgacccccugcagcccgagcuggacuccuucaaggaggagcucgacaaguacuucaagaaccacaccagccccgacgucgaccugggggacaucuccggcaucaacgccagcguggugaacauccagaaggagaucgaccgccugaacgaggucgccaagaaccucaacgagucccugaucgaccugcaggagcucgggaaguacgagcaguacaucaaguggccgugguacaucuggcugggcuucaucgccggccugaucgcgaucgugauggugaccaucaugcucugcugcaugaccagcugcugcuccugccugaaggggugcugcagcugcggcuccugcugcaaguucgacgaggacgacagcgagcccguccugaagggggugaagcuccacuacacgugaggacuaguuauaagacugacuagcccgaugggccucccaacgggcccuccuccccuccuugcaccgagauuaauagaucuaaaaaaaaaaaaaaaaaaaaaaaaaaaaaaaaaaaaaaaaaaaaaaaaaaaaaaaaaaaaaaaaaaaaaaaaaaaaaaaaaaaaaaaaaaaaaaaaaaaa

SEQ ID NO: 25722 - RNA, 4017 nt, Artificial Sequence
  SARS-CoV-2/Wuhan/WIV05/2019__EPI_ISL_402128 spike protein mRNA gc (1-1273)(K986P_V987P_N501Y_D614G)
aggagaaagcuuaccauguucguguuccugguccuccugccccuggugagcucccagugcgugaaccucaccacccgcacgcagcugccgcccgccuacaccaacagcuucacccggggcgucuacuaccccgacaagguguuccgcuccagcgugcugcacuccacccaggaccucuuccugcccuucuucagcaacgucacgugguuccacgccauccacguguccgggaccaacggcaccaagcgguucgacaacccggugcugcccuucaacgacggggucuacuucgcgagcaccgagaaguccaacaucauccgcggcuggaucuucgggacgacccucgacagcaagacccagucccugcugaucgugaacaacgccaccaacguggucaucaaggugugcgaguuccaguucugcaacgaccccuuccucggcguguacuaccacaagaacaacaagagcuggauggaguccgaguuccgggucuacagcuccgccaacaacugcacguucgaguacgugagccagcccuuccugauggaccuggagggcaagcaggggaacuucaagaaccuccgcgaguucguguucaagaacaucgacggcuacuucaagaucuacuccaagcacaccccgaucaaccugguccgggaccugccccagggguucagcgcccucgagccccugguggaccugcccaucggcaucaacaucacccgcuuccagacccuccuggcccugcaccgguccuaccucacgccgggggacagcagcuccggcuggaccgcgggcgccgccgccuacuacgugggguaccugcagccccgcaccuuccugcucaaguacaacgagaacggcaccaucacggacgcggucgacugcgcccuggacccccugagcgagaccaagugcacccucaaguccuucaccguggagaaggggaucuaccagacgagcaacuuccgggugcagcccaccgaguccaucguccgcuucccgaacaucaccaaccugugccccuucggcgagguguucaacgccacccgguucgccagcgucuacgccuggaaccgcaagcggaucuccaacugcguggcggacuacagcgugcuguacaacuccgccagcuucuccacguucaagugcuacggcgucagccccaccaagcucaacgaccugugcuucaccaacguguacgccgacuccuucgugauccgcggggacgagguccggcagaucgcccccggccagaccgggaagaucgccgacuacaacuacaagcugccggacgacuucacgggcugcgugaucgcguggaacagcaacaaccucgacuccaaggucgggggcaacuacaacuaccuguaccgccuguuccgcaagagcaaccucaagcccuucgagcgggacaucuccaccgagaucuaccaggccggcagcacccccugcaacgggguggagggcuucaacugcuacuucccccugcaguccuacggguuccagccgaccuacggcgugggguaccagcccuaccggguggucgugcugagcuucgagcuccugcacgcccccgccacggugugcggccccaagaaguccaccaaccuggucaagaacaagugcgugaacuucaacuucaacggccucaccgggaccggcgugcugaccgagagcaacaagaaguuccugccguuccagcaguucgggcgcgacaucgccgacacgaccgacgcgguccgcgacccccagacccuggagauccucgacaucacccccugcagcuucggcgggguguccgugaucacgccgggcaccaacaccagcaaccaggucgccgugcuguaccagggcgugaacugcaccgagguccccguggccauccacgccgaccagcugacgcccaccuggcggguguacuccaccggcagcaacgucuuccagacccgcgccgggugccucaucggcgcggagcacgugaacaacuccuacgagugcgacauccccaucggggccggcaucugcgccagcuaccagacgcagaccaacuccccgcggcgcgcccggagcguggcgucccagagcaucaucgccuacaccaugucccugggcgccgagaacagcgucgccuacuccaacaacagcaucgccauccccaccaacuucacgaucuccgugaccaccgagauccugcccgugagcaugaccaagacgagcgucgacugcaccauguacaucugcggggacuccaccgagugcagcaaccuccugcugcaguacggcuccuucugcacccagcucaaccgcgcgcugacggggaucgccguggagcaggacaagaacacccaggagguguucgcccaggucaagcagaucuacaagacgcccccgaucaaggacuucggcggguucaacuucagccagauccugcccgaccccuccaagcccagcaagcgguccuucaucgaggaccuccuguucaacaaggugacccuggccgacgccggcuucaucaagcaguacggcgacugccucggggacaucgcggcccgcgaccugaucugcgcccagaaguucaacggccugaccgugcucccgccccugcugaccgacgagaugaucgcccaguacaccagcgcccuccuggcggggaccaucacguccggcuggaccuucggggccggcgccgcccugcagauccccuucgcgaugcagauggccuaccgguucaacggcaucggggucacccagaacgugcucuacgagaaccagaagcugaucgccaaccaguucaacagcgccaucggcaagauccaggacucccugagcuccaccgccagcgcgcucgggaagcugcaggacguggucaaccagaacgcccaggcccugaacacgcucgugaagcagcuguccagcaacuucggcgccaucuccagcgugcugaacgacauccucucccgccuggacccgcccgaggccgaggugcagaucgaccggcugaucaccgggcgccuccagagccugcagaccuacgugacccagcagcugauccgggcggccgagauccgcgccagcgccaaccucgccgcgaccaagauguccgagugcguccugggccagagcaagcggguggacuucugcggcaagggguaccaccugauguccuucccccagagcgccccgcacggcguggucuuccuccacgugacguacguccccgcccaggagaagaacuucaccaccgcccccgcgaucugccacgacgggaaggcccacuucccccgcgagggcguguucguguccaacgggacccacugguucgucacgcagcggaacuucuacgagccgcagaucaucaccaccgacaacaccuucgugagcggcaacugcgacguggucaucggcaucgugaacaacacgguguacgacccccugcagcccgagcuggacuccuucaaggaggagcucgacaaguacuucaagaaccacaccagccccgacgucgaccugggggacaucuccggcaucaacgccagcguggugaacauccagaaggagaucgaccgccugaacgaggucgccaagaaccucaacgagucccugaucgaccugcaggagcucgggaaguacgagcaguacaucaaguggccgugguacaucuggcugggcuucaucgccggccugaucgcgaucgugauggugaccaucaugcucugcugcaugaccagcugcugcuccugccugaaggggugcugcagcugcggcuccugcugcaaguucgacgaggacgacagcgagcccguccugaagggggugaagcuccacuacacgugaggacuaguuauaagacugacuagcccgaugggccucccaacgggcccuccuccccuccuugcaccgagauuaauagaucuaaaaaaaaaaaaaaaaaaaaaaaaaaaaaaaaaaaaaaaaaaaaaaaaaaaaaaaaaaaaaaaaaaaaaaaaaaaaaaaaaaaaaaaaaaaaaaaaaaaa

SEQ ID NO: 25723 - RNA, 4011 nt, Artificial Sequence
  SARS-CoV-2/Wuhan/WIV05/2019__EPI_ISL_402128 spike protein mRNA gc (1-1273)(K986P_V987P_H69del_V70del_D614G)
aggagaaagcuuaccauguucguguuccugguccuccugccccuggugagcucccagugcgugaaccucaccacccgcacgcagcugccgcccgccuacaccaacagcuucacccggggcgucuacuaccccgacaagguguuccgcuccagcgugcugcacuccacccaggaccucuuccugcccuucuucagcaacgucacgugguuccacgccaucuccgggaccaacggcaccaagcgguucgacaacccggugcugcccuucaacgacggggucuacuucgcgagcaccgagaaguccaacaucauccgcggcuggaucuucgggacgacccucgacagcaagacccagucccugcugaucgugaacaacgccaccaacguggucaucaaggugugcgaguuccaguucugcaacgaccccuuccucggcguguacuaccacaagaacaacaagagcuggauggaguccgaguuccgggucuacagcuccgccaacaacugcacguucgaguacgugagccagcccuuccugauggaccuggagggcaagcaggggaacuucaagaaccuccgcgaguucguguucaagaacaucgacggcuacuucaagaucuacuccaagcacaccccgaucaaccugguccgggaccugccccagggguucagcgcccucgagccccugguggaccugcccaucggcaucaacaucacccgcuuccagacccuccuggcccugcaccgguccuaccucacgccgggggacagcagcuccggcuggaccgcgggcgccgccgccuacuacgugggguaccugcagccccgcaccuuccugcucaaguacaacgagaacggcaccaucacggacgcggucgacugcgcccuggacccccugagcgagaccaagugcacccucaaguccuucaccguggagaaggggaucuaccagacgagcaacuuccgggugcagcccaccgaguccaucguccgcuucccgaacaucaccaaccugugccccuucggcgagguguucaacgccacccgguucgccagcgucuacgccuggaaccgcaagcggaucuccaacugcguggcggacuacagcgugcuguacaacuccgccagcuucuccacguucaagugcuacggcgucagccccaccaagcucaacgaccugugcuucaccaacguguacgccgacuccuucgugauccgcggggacgagguccggcagaucgcccccggccagaccgggaagaucgccgacuacaacuacaagcugccggacgacuucacgggcugcgugaucgcguggaacagcaacaaccucgacuccaaggucgggggcaacuacaacuaccuguaccgccuguuccgcaagagcaaccucaagcccuucgagcgggacaucuccaccgagaucuaccaggccggcagcacccccugcaacgggguggagggcuucaacugcuacuucccccugcaguccuacggguuccagccgaccaacggcgugggguaccagcccuaccggguggucgugcugagcuucgagcuccugcacgcccccgccacggugugcggccccaagaaguccaccaaccuggucaagaacaagugcgugaacuucaacuucaacggccucaccgggaccggcgugcugaccgagagcaacaagaaguuccugccguuccagcaguucgggcgcgacaucgccgacacgaccgacgcgguccgcgacccccagacccuggagauccucgacaucacccccugcagcuucggcgggguguccgugaucacgccgggcaccaacaccagcaaccaggucgccgugcuguaccagggcgugaacugcaccgagguccccguggccauccacgccgaccagcugacgcccaccuggcggguguacuccaccggcagcaacgucuuccagacccgcgccgggugccucaucggcgcggagcacgugaacaacuccuacgagugcgacauccccaucggggccggcaucugcgccagcuaccagacgcagaccaacuccccgcggcgcgcccggagcguggcgucccagagcaucaucgccuacaccaugucccugggcgccgagaacagcgucgccuacuccaacaacagcaucgccauccccaccaacuucacgaucuccgugaccaccgagauccugcccgugagcaugaccaagacgagcgucgacugcaccauguacaucugcggggacuccaccgagugcagcaaccuccugcugcaguacggcuccuucugcacccagcucaaccgcgcgcugacggggaucgccguggagcaggacaagaacacccaggagguguucgcccaggucaagcagaucuacaagacgcccccgaucaaggacuucggcggguucaacuucagccagauccugcccgaccccuccaagcccagcaagcgguccuucaucgaggaccuccuguucaacaaggugacccuggccgacgccggcuucaucaagcaguacggcgacugccucggggacaucgcggcccgcgaccugaucugcgcccagaaguucaacggccugaccgugcucccgccccugcugaccgacgagaugaucgcccaguacaccagcgcccuccuggcggggaccaucacguccggcuggaccuucggggccggcgccgcccugcagauccccuucgcgaugcagauggccuaccgguucaacggcaucggggucacccagaacgugcucuacgagaaccagaagcugaucgccaaccaguucaacagcgccaucggcaagauccaggacucccugagcuccaccgccagcgcgcucgggaagcugcaggacguggucaaccagaacgcccaggcccugaacacgcucgugaagcagcuguccagcaacuucggcgccaucuccagcgugcugaacgacauccucucccgccuggacccgcccgaggccgaggugcagaucgaccggcugaucaccgggcgccuccagagccugcagaccuacgugacccagcagcugauccgggcggccgagauccgcgccagcgccaaccucgccgcgaccaagauguccgagugcguccugggccagagcaagcggguggacuucugcggcaagggguaccaccugauguccuucccccagagcgccccgcacggcguggucuuccuccacgugacguacguccccgcccaggagaagaacuucaccaccgcccccgcgaucugccacgacgggaaggcccacuucccccgcgagggcguguucguguccaacgggacccacugguucgucacgcagcggaacuucuacgagccgcagaucaucaccaccgacaacaccuucgugagcggcaacugcgacguggucaucggcaucgugaacaacacgguguacgacccccugcagcccgagcuggacuccuucaaggaggagcucgacaaguacuucaagaaccacaccagccccgacgucgaccugggggacaucuccggcaucaacgccagcguggugaacauccagaaggagaucgaccgccugaacgaggucgccaagaaccucaacgagucccugaucgaccugcaggagcucgggaaguacgagcaguacaucaaguggccgugguacaucuggcugggcuucaucgccggccugaucgcgaucgugauggugaccaucaugcucugcugcaugaccagcugcugcuccugccugaaggggugcugcagcugcggcuccugcugcaaguucgacgaggacgacagcgagcccguccugaagggggugaagcuccacuacacgugaggacuaguuauaagacugacuagcccgaugggccucccaacgggcccuccuccccuccuugcaccgagauuaauagaucuaaaaaaaaaaaaaaaaaaaaaaaaaaaaaaaaaaaaaaaaaaaaaaaaaaaaaaaaaaaaaaaaaaaaaaaaaaaaaaaaaaaaaaaaaaaaaaaaaaaa

SEQ ID NO: 25724 - RNA, 4017 nt, Artificial Sequence
  SARS-CoV-2/Wuhan/WIV05/2019__EPI_ISL_402128 spike protein mRNA gc (1-1273)(K986P_V987P_Y453F_D614G)
aggagaaagcuuaccauguucguguuccugguccuccugccccuggugagcucccagugcgugaaccucaccacccgcacgcagcugccgcccgccuacaccaacagcuucacccggggcgucuacuaccccgacaagguguuccgcuccagcgugcugcacuccacccaggaccucuuccugcccuucuucagcaacgucacgugguuccacgccauccacguguccgggaccaacggcaccaagcgguucgacaacccggugcugcccuucaacgacggggucuacuucgcgagcaccgagaaguccaacaucauccgcggcuggaucuucgggacgacccucgacagcaagacccagucccugcugaucgugaacaacgccaccaacguggucaucaaggugugcgaguuccaguucugcaacgaccccuuccucggcguguacuaccacaagaacaacaagagcuggauggaguccgaguuccgggucuacagcuccgccaacaacugcacguucgaguacgugagccagcccuuccugauggaccuggagggcaagcaggggaacuucaagaaccuccgcgaguucguguucaagaacaucgacggcuacuucaagaucuacuccaagcacaccccgaucaaccugguccgggaccugccccagggguucagcgcccucgagccccugguggaccugcccaucggcaucaacaucacccgcuuccagacccuccuggcccugcaccgguccuaccucacgccgggggacagcagcuccggcuggaccgcgggcgccgccgccuacuacgugggguaccugcagccccgcaccuuccugcucaaguacaacgagaacggcaccaucacggacgcggucgacugcgcccuggacccccugagcgagaccaagugcacccucaaguccuucaccguggagaaggggaucuaccagacgagcaacuuccgggugcagcccaccgaguccaucguccgcuucccgaacaucaccaaccugugccccuucggcgagguguucaacgccacccgguucgccagcgucuacgccuggaaccgcaagcggaucuccaacugcguggcggacuacagcgugcuguacaacuccgccagcuucuccacguucaagugcuacggcgucagccccaccaagcucaacgaccugugcuucaccaacguguacgccgacuccuucgugauccgcggggacgagguccggcagaucgcccccggccagaccgggaagaucgccgacuacaacuacaagcugccggacgacuucacgggcugcgugaucgcguggaacagcaacaaccucgacuccaaggucgggggcaacuacaacuaccuguuccgccuguuccgcaagagcaaccucaagcccuucgagcgggacaucuccaccgagaucuaccaggccggcagcacccccugcaacgggguggagggcuucaacugcuacuucccccugcaguccuacggguuccagccgaccaacggcgugggguaccagcccuaccggguggucgugcugagcuucgagcuccugcacgcccccgccacggugugcggccccaagaaguccaccaaccuggucaagaacaagugcgugaacuucaacuucaacggccucaccgggaccggcgugcugaccgagagcaacaagaaguuccugccguuccagcaguucgggcgcgacaucgccgacacgaccgacgcgguccgcgacccccagacccuggagauccucgacaucacccccugcagcuucggcgggguguccgugaucacgccgggcaccaacaccagcaaccaggucgccgugcuguaccagggcgugaacugcaccgagguccccguggccauccacgccgaccagcugacgcccaccuggcggguguacuccaccggcagcaacgucuuccagacccgcgccgggugccucaucggcgcggagcacgugaacaacuccuacgagugcgacauccccaucggggccggcaucugcgccagcuaccagacgcagaccaacuccccgcggcgcgcccggagcguggcgucccagagcaucaucgccuacaccaugucccugggcgccgagaacagcgucgccuacuccaacaacagcaucgccauccccaccaacuucacgaucuccgugaccaccgagauccugcccgugagcaugaccaagacgagcgucgacugcaccauguacaucugcggggacuccaccgagugcagcaaccuccugcugcaguacggcuccuucugcacccagcucaaccgcgcgcugacggggaucgccguggagcaggacaagaacacccaggagguguucgcccaggucaagcagaucuacaagacgcccccgaucaaggacuucggcggguucaacuucagccagauccugcccgaccccuccaagcccagcaagcgguccuucaucgaggaccuccuguucaacaaggugacccuggccgacgccggcuucaucaagcaguacggcgacugccucggggacaucgcggcccgcgaccugaucugcgcccagaaguucaacggccugaccgugcucccgccccugcugaccgacgagaugaucgcccaguacaccagcgcccuccuggcggggaccaucacguccggcuggaccuucggggccggcgccgcccugcagauccccuucgcgaugcagauggccuaccgguucaacggcaucggggucacccagaacgugcucuacgagaaccagaagcugaucgccaaccaguucaacagcgccaucggcaagauccaggacucccugagcuccaccgccagcgcgcucgggaagcugcaggacguggucaaccagaacgcccaggcccugaacacgcucgugaagcagcuguccagcaacuucggcgccaucuccagcgugcugaacgacauccucucccgccuggacccgcccgaggccgaggugcagaucgaccggcugaucaccgggcgccuccagagccugcagaccuacgugacccagcagcugauccgggcggccgagauccgcgccagcgccaaccucgccgcgaccaagauguccgagugcguccugggccagagcaagcggguggacuucugcggcaagggguaccaccugauguccuucccccagagcgccccgcacggcguggucuuccuccacgugacguacguccccgcccaggagaagaacuucaccaccgcccccgcgaucugccacgacgggaaggcccacuucccccgcgagggcguguucguguccaacgggacccacugguucgucacgcagcggaacuucuacgagccgcagaucaucaccaccgacaacaccuucgugagcggcaacugcgacguggucaucggcaucgugaacaacacgguguacgacccccugcagcccgagcuggacuccuucaaggaggagcucgacaaguacuucaagaaccacaccagccccgacgucgaccugggggacaucuccggcaucaacgccagcguggugaacauccagaaggagaucgaccgccugaacgaggucgccaagaaccucaacgagucccugaucgaccugcaggagcucgggaaguacgagcaguacaucaaguggccgugguacaucuggcugggcuucaucgccggccugaucgcgaucgugauggugaccaucaugcucugcugcaugaccagcugcugcuccugccugaaggggugcugcagcugcggcuccugcugcaaguucgacgaggacgacagcgagcccguccugaagggggugaagcuccacuacacgugaggacuaguuauaagacugacuagcccgaugggccucccaacgggcccuccuccccuccuugcaccgagauuaauagaucuaaaaaaaaaaaaaaaaaaaaaaaaaaaaaaaaaaaaaaaaaaaaaaaaaaaaaaaaaaaaaaaaaaaaaaaaaaaaaaaaaaaaaaaaaaaaaaaaaaaa

SEQ ID NO: 25725 - RNA, 4017 nt, Artificial Sequence
  SARS-CoV-2/Wuhan/WIV05/2019__EPI_ISL_402128 spike protein mRNA gc (1-1273)(K986P_V987P_D614G_I692V)
aggagaaagcuuaccauguucguguuccugguccuccugccccuggugagcucccagugcgugaaccucaccacccgcacgcagcugccgcccgccuacaccaacagcuucacccggggcgucuacuaccccgacaagguguuccgcuccagcgugcugcacuccacccaggaccucuuccugcccuucuucagcaacgucacgugguuccacgccauccacguguccgggaccaacggcaccaagcgguucgacaacccggugcugcccuucaacgacggggucuacuucgcgagcaccgagaaguccaacaucauccgcggcuggaucuucgggacgacccucgacagcaagacccagucccugcugaucgugaacaacgccaccaacguggucaucaaggugugcgaguuccaguucugcaacgaccccuuccucggcguguacuaccacaagaacaacaagagcuggauggaguccgaguuccgggucuacagcuccgccaacaacugcacguucgaguacgugagccagcccuuccugauggaccuggagggcaagcaggggaacuucaagaaccuccgcgaguucguguucaagaacaucgacggcuacuucaagaucuacuccaagcacaccccgaucaaccugguccgggaccugccccagggguucagcgcccucgagccccugguggaccugcccaucggcaucaacaucacccgcuuccagacccuccuggcccugcaccgguccuaccucacgccgggggacagcagcuccggcuggaccgcgggcgccgccgccuacuacgugggguaccugcagccccgcaccuuccugcucaaguacaacgagaacggcaccaucacggacgcggucgacugcgcccuggacccccugagcgagaccaagugcacccucaaguccuucaccguggagaaggggaucuaccagacgagcaacuuccgggugcagcccaccgaguccaucguccgcuucccgaacaucaccaaccugugccccuucggcgagguguucaacgccacccgguucgccagcgucuacgccuggaaccgcaagcggaucuccaacugcguggcggacuacagcgugcuguacaacuccgccagcuucuccacguucaagugcuacggcgucagccccaccaagcucaacgaccugugcuucaccaacguguacgccgacuccuucgugauccgcggggacgagguccggcagaucgcccccggccagaccgggaagaucgccgacuacaacuacaagcugccggacgacuucacgggcugcgugaucgcguggaacagcaacaaccucgacuccaaggucgggggcaacuacaacuaccuguaccgccuguuccgcaagagcaaccucaagcccuucgagcgggacaucuccaccgagaucuaccaggccggcagcacccccugcaacgggguggagggcuucaacugcuacuucccccugcaguccuacggguuccagccgaccaacggcgugggguaccagcccuaccggguggucgugcugagcuucgagcuccugcacgcccccgccacggugugcggccccaagaaguccaccaaccuggucaagaacaagugcgugaacuucaacuucaacggccucaccgggaccggcgugcugaccgagagcaacaagaaguuccugccguuccagcaguucgggcgcgacaucgccgacacgaccgacgcgguccgcgacccccagacccuggagauccucgacaucacccccugcagcuucggcgggguguccgugaucacgccgggcaccaacaccagcaaccaggucgccgugcuguaccagggcgugaacugcaccgagguccccguggccauccacgccgaccagcugacgcccaccuggcggguguacuccaccggcagcaacgucuuccagacccgcgccgggugccucaucggcgcggagcacgugaacaacuccuacgagugcgacauccccaucggggccggcaucugcgccagcuaccagacgcagaccaacuccccgcggcgcgcccggagcguggcgucccagagcgucaucgccuacaccaugucccugggcgccgagaacagcgucgccuacuccaacaacagcaucgccauccccaccaacuucacgaucuccgugaccaccgagauccugcccgugagcaugaccaagacgagcgucgacugcaccauguacaucugcggggacuccaccgagugcagcaaccuccugcugcaguacggcuccuucugcacccagcucaaccgcgcgcugacggggaucgccguggagcaggacaagaacacccaggagguguucgcccaggucaagcagaucuacaagacgcccccgaucaaggacuucggcggguucaacuucagccagauccugcccgaccccuccaagcccagcaagcgguccuucaucgaggaccuccuguucaacaaggugacccuggccgacgccggcuucaucaagcaguacggcgacugccucggggacaucgcggcccgcgaccugaucugcgcccagaaguucaacggccugaccgugcucccgccccugcugaccgacgagaugaucgcccaguacaccagcgcccuccuggcggggaccaucacguccggcuggaccuucggggccggcgccgcccugcagauccccuucgcgaugcagauggccuaccgguucaacggcaucggggucacccagaacgugcucuacgagaaccagaagcugaucgccaaccaguucaacagcgccaucggcaagauccaggacucccugagcuccaccgccagcgcgcucgggaagcugcaggacguggucaaccagaacgcccaggcccugaacacgcucgugaagcagcuguccagcaacuucggcgccaucuccagcgugcugaacgacauccucucccgccuggacccgcccgaggccgaggugcagaucgaccggcugaucaccgggcgccuccagagccugcagaccuacgugacccagcagcugauccgggcggccgagauccgcgccagcgccaaccucgccgcgaccaagauguccgagugcguccugggccagagcaagcggguggacuucugcggcaagggguaccaccugauguccuucccccagagcgccccgcacggcguggucuuccuccacgugacguacguccccgcccaggagaagaacuucaccaccgcccccgcgaucugccacgacgggaaggcccacuucccccgcgagggcguguucguguccaacgggacccacugguucgucacgcagcggaacuucuacgagccgcagaucaucaccaccgacaacaccuucgugagcggcaacugcgacguggucaucggcaucgugaacaacacgguguacgacccccugcagcccgagcuggacuccuucaaggaggagcucgacaaguacuucaagaaccacaccagccccgacgucgaccugggggacaucuccggcaucaacgccagcguggugaacauccagaaggagaucgaccgccugaacgaggucgccaagaaccucaacgagucccugaucgaccugcaggagcucgggaaguacgagcaguacaucaaguggccgugguacaucuggcugggcuucaucgccggccugaucgcgaucgugauggugaccaucaugcucugcugcaugaccagcugcugcuccugccugaaggggugcugcagcugcggcuccugcugcaaguucgacgaggacgacagcgagcccguccugaagggggugaagcuccacuacacgugaggacuaguuauaagacugacuagcccgaugggccucccaacgggcccuccuccccuccuugcaccgagauuaauagaucuaaaaaaaaaaaaaaaaaaaaaaaaaaaaaaaaaaaaaaaaaaaaaaaaaaaaaaaaaaaaaaaaaaaaaaaaaaaaaaaaaaaaaaaaaaaaaaaaaaaa

SEQ ID NO: 25726 - RNA, 4017 nt, Artificial Sequence
  SARS-CoV-2/Wuhan/WIV05/2019__EPI_ISL_402128 spike protein mRNA gc (1-1273)(K986P_V987P_D614G_M1229I)
aggagaaagcuuaccauguucguguuccugguccuccugccccuggugagcucccagugcgugaaccucaccacccgcacgcagcugccgcccgccuacaccaacagcuucacccggggcgucuacuaccccgacaagguguuccgcuccagcgugcugcacuccacccaggaccucuuccugcccuucuucagcaacgucacgugguuccacgccauccacguguccgggaccaacggcaccaagcgguucgacaacccggugcugcccuucaacgacggggucuacuucgcgagcaccgagaaguccaacaucauccgcggcuggaucuucgggacgacccucgacagcaagacccagucccugcugaucgugaacaacgccaccaacguggucaucaaggugugcgaguuccaguucugcaacgaccccuuccucggcguguacuaccacaagaacaacaagagcuggauggaguccgaguuccgggucuacagcuccgccaacaacugcacguucgaguacgugagccagcccuuccugauggaccuggagggcaagcaggggaacuucaagaaccuccgcgaguucguguucaagaacaucgacggcuacuucaagaucuacuccaagcacaccccgaucaaccugguccgggaccugccccagggguucagcgcccucgagccccugguggaccugcccaucggcaucaacaucacccgcuuccagacccuccuggcccugcaccgguccuaccucacgccgggggacagcagcuccggcuggaccgcgggcgccgccgccuacuacgugggguaccugcagccccgcaccuuccugcucaaguacaacgagaacggcaccaucacggacgcggucgacugcgcccuggacccccugagcgagaccaagugcacccucaaguccuucaccguggagaaggggaucuaccagacgagcaacuuccgggugcagcccaccgaguccaucguccgcuucccgaacaucaccaaccugugccccuucggcgagguguucaacgccacccgguucgccagcgucuacgccuggaaccgcaagcggaucuccaacugcguggcggacuacagcgugcuguacaacuccgccagcuucuccacguucaagugcuacggcgucagccccaccaagcucaacgaccugugcuucaccaacguguacgccgacuccuucgugauccgcggggacgagguccggcagaucgcccccggccagaccgggaagaucgccgacuacaacuacaagcugccggacgacuucacgggcugcgugaucgcguggaacagcaacaaccucgacuccaaggucgggggcaacuacaacuaccuguaccgccuguuccgcaagagcaaccucaagcccuucgagcgggacaucuccaccgagaucuaccaggccggcagcacccccugcaacgggguggagggcuucaacugcuacuucccccugcaguccuacggguuccagccgaccaacggcgugggguaccagcccuaccggguggucgugcugagcuucgagcuccugcacgcccccgccacggugugcggccccaagaaguccaccaaccuggucaagaacaagugcgugaacuucaacuucaacggccucaccgggaccggcgugcugaccgagagcaacaagaaguuccugccguuccagcaguucgggcgcgacaucgccgacacgaccgacgcgguccgcgacccccagacccuggagauccucgacaucacccccugcagcuucggcgggguguccgugaucacgccgggcaccaacaccagcaaccaggucgccgugcuguaccagggcgugaacugcaccgagguccccguggccauccacgccgaccagcugacgcccaccuggcggguguacuccaccggcagcaacgucuuccagacccgcgccgggugccucaucggcgcggagcacgugaacaacuccuacgagugcgacauccccaucggggccggcaucugcgccagcuaccagacgcagaccaacuccccgcggcgcgcccggagcguggcgucccagagcaucaucgccuacaccaugucccugggcgccgagaacagcgucgccuacuccaacaacagcaucgccauccccaccaacuucacgaucuccgugaccaccgagauccugcccgugagcaugaccaagacgagcgucgacugcaccauguacaucugcggggacuccaccgagugcagcaaccuccugcugcaguacggcuccuucugcacccagcucaaccgcgcgcugacggggaucgccguggagcaggacaagaacacccaggagguguucgcccaggucaagcagaucuacaagacgcccccgaucaaggacuucggcggguucaacuucagccagauccugcccgaccccuccaagcccagcaagcgguccuucaucgaggaccuccuguucaacaaggugacccuggccgacgccggcuucaucaagcaguacggcgacugccucggggacaucgcggcccgcgaccugaucugcgcccagaaguucaacggccugaccgugcucccgccccugcugaccgacgagaugaucgcccaguacaccagcgcccuccuggcggggaccaucacguccggcuggaccuucggggccggcgccgcccugcagauccccuucgcgaugcagauggccuaccgguucaacggcaucggggucacccagaacgugcucuacgagaaccagaagcugaucgccaaccaguucaacagcgccaucggcaagauccaggacucccugagcuccaccgccagcgcgcucgggaagcugcaggacguggucaaccagaacgcccaggcccugaacacgcucgugaagcagcuguccagcaacuucggcgccaucuccagcgugcugaacgacauccucucccgccuggacccgcccgaggccgaggugcagaucgaccggcugaucaccgggcgccuccagagccugcagaccuacgugacccagcagcugauccgggcggccgagauccgcgccagcgccaaccucgccgcgaccaagauguccgagugcguccugggccagagcaagcggguggacuucugcggcaagggguaccaccugauguccuucccccagagcgccccgcacggcguggucuuccuccacgugacguacguccccgcccaggagaagaacuucaccaccgcccccgcgaucugccacgacgggaaggcccacuucccccgcgagggcguguucguguccaacgggacccacugguucgucacgcagcggaacuucuacgagccgcagaucaucaccaccgacaacaccuucgugagcggcaacugcgacguggucaucggcaucgugaacaacacgguguacgacccccugcagcccgagcuggacuccuucaaggaggagcucgacaaguacuucaagaaccacaccagccccgacgucgaccugggggacaucuccggcaucaacgccagcguggugaacauccagaaggagaucgaccgccugaacgaggucgccaagaaccucaacgagucccugaucgaccugcaggagcucgggaaguacgagcaguacaucaaguggccgugguacaucuggcugggcuucaucgccggccugaucgcgaucgugaucgugaccaucaugcucugcugcaugaccagcugcugcuccugccugaaggggugcugcagcugcggcuccugcugcaaguucgacgaggacgacagcgagcccguccugaagggggugaagcuccacuacacgugaggacuaguuauaagacugacuagcccgaugggccucccaacgggcccuccuccccuccuugcaccgagauuaauagaucuaaaaaaaaaaaaaaaaaaaaaaaaaaaaaaaaaaaaaaaaaaaaaaaaaaaaaaaaaaaaaaaaaaaaaaaaaaaaaaaaaaaaaaaaaaaaaaaaaaaa

SEQ ID NO: 25727 - RNA, 4011 nt, Artificial Sequence
  SARS-CoV-2/Wuhan/WIV05/2019__EPI_ISL_402128 spike protein mRNA gc (1-1273)(K986P_V987P_H69del_V70del_A222V_Y453F_S477N_D614G_I692V)
aggagaaagcuuaccauguucguguuccugguccuccugccccuggugagcucccagugcgugaaccucaccacccgcacgcagcugccgcccgccuacaccaacagcuucacccggggcgucuacuaccccgacaagguguuccgcuccagcgugcugcacuccacccaggaccucuuccugcccuucuucagcaacgucacgugguuccacgccaucuccgggaccaacggcaccaagcgguucgacaacccggugcugcccuucaacgacggggucuacuucgcgagcaccgagaaguccaacaucauccgcggcuggaucuucgggacgacccucgacagcaagacccagucccugcugaucgugaacaacgccaccaacguggucaucaaggugugcgaguuccaguucugcaacgaccccuuccucggcguguacuaccacaagaacaacaagagcuggauggaguccgaguuccgggucuacagcuccgccaacaacugcacguucgaguacgugagccagcccuuccugauggaccuggagggcaagcaggggaacuucaagaaccuccgcgaguucguguucaagaacaucgacggcuacuucaagaucuacuccaagcacaccccgaucaaccugguccgggaccugccccagggguucagcguccucgagccccugguggaccugcccaucggcaucaacaucacccgcuuccagacccuccuggcccugcaccgguccuaccucacgccgggggacagcagcuccggcuggaccgcgggcgccgccgccuacuacgugggguaccugcagccccgcaccuuccugcucaaguacaacgagaacggcaccaucacggacgcggucgacugcgcccuggacccccugagcgagaccaagugcacccucaaguccuucaccguggagaaggggaucuaccagacgagcaacuuccgggugcagcccaccgaguccaucguccgcuucccgaacaucaccaaccugugccccuucggcgagguguucaacgccacccgguucgccagcgucuacgccuggaaccgcaagcggaucuccaacugcguggcggacuacagcgugcuguacaacuccgccagcuucuccacguucaagugcuacggcgucagccccaccaagcucaacgaccugugcuucaccaacguguacgccgacuccuucgugauccgcggggacgagguccggcagaucgcccccggccagaccgggaagaucgccgacuacaacuacaagcugccggacgacuucacgggcugcgugaucgcguggaacagcaacaaccucgacuccaaggucgggggcaacuacaacuaccuguuccgccuguuccgcaagagcaaccucaagcccuucgagcgggacaucuccaccgagaucuaccaggccggcaacacccccugcaacgggguggagggcuucaacugcuacuucccccugcaguccuacggguuccagccgaccaacggcgugggguaccagcccuaccggguggucgugcugagcuucgagcuccugcacgcccccgccacggugugcggccccaagaaguccaccaaccuggucaagaacaagugcgugaacuucaacuucaacggccucaccgggaccggcgugcugaccgagagcaacaagaaguuccugccguuccagcaguucgggcgcgacaucgccgacacgaccgacgcgguccgcgacccccagacccuggagauccucgacaucacccccugcagcuucggcgggguguccgugaucacgccgggcaccaacaccagcaaccaggucgccgugcuguaccagggcgugaacugcaccgagguccccguggccauccacgccgaccagcugacgcccaccuggcggguguacuccaccggcagcaacgucuuccagacccgcgccgggugccucaucggcgcggagcacgugaacaacuccuacgagugcgacauccccaucggggccggcaucugcgccagcuaccagacgcagaccaacuccccgcggcgcgcccggagcguggcgucccagagcgucaucgccuacaccaugucccugggcgccgagaacagcgucgccuacuccaacaacagcaucgccauccccaccaacuucacgaucuccgugaccaccgagauccugcccgugagcaugaccaagacgagcgucgacugcaccauguacaucugcggggacuccaccgagugcagcaaccuccugcugcaguacggcuccuucugcacccagcucaaccgcgcgcugacggggaucgccguggagcaggacaagaacacccaggagguguucgcccaggucaagcagaucuacaagacgcccccgaucaaggacuucggcggguucaacuucagccagauccugcccgaccccuccaagcccagcaagcgguccuucaucgaggaccuccuguucaacaaggugacccuggccgacgccggcuucaucaagcaguacggcgacugccucggggacaucgcggcccgcgaccugaucugcgcccagaaguucaacggccugaccgugcucccgccccugcugaccgacgagaugaucgcccaguacaccagcgcccuccuggcggggaccaucacguccggcuggaccuucggggccggcgccgcccugcagauccccuucgcgaugcagauggccuaccgguucaacggcaucggggucacccagaacgugcucuacgagaaccagaagcugaucgccaaccaguucaacagcgccaucggcaagauccaggacucccugagcuccaccgccagcgcgcucgggaagcugcaggacguggucaaccagaacgcccaggcccugaacacgcucgugaagcagcuguccagcaacuucggcgccaucuccagcgugcugaacgacauccucucccgccuggacccgcccgaggccgaggugcagaucgaccggcugaucaccgggcgccuccagagccugcagaccuacgugacccagcagcugauccgggcggccgagauccgcgccagcgccaaccucgccgcgaccaagauguccgagugcguccugggccagagcaagcggguggacuucugcggcaagggguaccaccugauguccuucccccagagcgccccgcacggcguggucuuccuccacgugacguacguccccgcccaggagaagaacuucaccaccgcccccgcgaucugccacgacgggaaggcccacuucccccgcgagggcguguucguguccaacgggacccacugguucgucacgcagcggaacuucuacgagccgcagaucaucaccaccgacaacaccuucgugagcggcaacugcgacguggucaucggcaucgugaacaacacgguguacgacccccugcagcccgagcuggacuccuucaaggaggagcucgacaaguacuucaagaaccacaccagccccgacgucgaccugggggacaucuccggcaucaacgccagcguggugaacauccagaaggagaucgaccgccugaacgaggucgccaagaaccucaacgagucccugaucgaccugcaggagcucgggaaguacgagcaguacaucaaguggccgugguacaucuggcugggcuucaucgccggccugaucgcgaucgugauggugaccaucaugcucugcugcaugaccagcugcugcuccugccugaaggggugcugcagcugcggcuccugcugcaaguucgacgaggacgacagcgagcccguccugaagggggugaagcuccacuacacgugaggacuaguuauaagacugacuagcccgaugggccucccaacgggcccuccuccccuccuugcaccgagauuaauagaucuaaaaaaaaaaaaaaaaaaaaaaaaaaaaaaaaaaaaaaaaaaaaaaaaaaaaaaaaaaaaaaaaaaaaaaaaaaaaaaaaaaaaaaaaaaaaaaaaaaaa

SEQ ID NO: 25728 - RNA, 4011 nt, Artificial Sequence
  SARS-CoV-2/Wuhan/WIV05/2019__EPI_ISL_402128 spike protein mRNA gc (1-1273)(K986P_V987P_H69del_V70del_Y453F_D614G_I692V_M1229I)
aggagaaagcuuaccauguucguguuccugguccuccugccccuggugagcucccagugcgugaaccucaccacccgcacgcagcugccgcccgccuacaccaacagcuucacccggggcgucuacuaccccgacaagguguuccgcuccagcgugcugcacuccacccaggaccucuuccugcccuucuucagcaacgucacgugguuccacgccaucuccgggaccaacggcaccaagcgguucgacaacccggugcugcccuucaacgacggggucuacuucgcgagcaccgagaaguccaacaucauccgcggcuggaucuucgggacgacccucgacagcaagacccagucccugcugaucgugaacaacgccaccaacguggucaucaaggugugcgaguuccaguucugcaacgaccccuuccucggcguguacuaccacaagaacaacaagagcuggauggaguccgaguuccgggucuacagcuccgccaacaacugcacguucgaguacgugagccagcccuuccugauggaccuggagggcaagcaggggaacuucaagaaccuccgcgaguucguguucaagaacaucgacggcuacuucaagaucuacuccaagcacaccccgaucaaccugguccgggaccugccccagggguucagcgcccucgagccccugguggaccugcccaucggcaucaacaucacccgcuuccagacccuccuggcccugcaccgguccuaccucacgccgggggacagcagcuccggcuggaccgcgggcgccgccgccuacuacgugggguaccugcagccccgcaccuuccugcucaaguacaacgagaacggcaccaucacggacgcggucgacugcgcccuggacccccugagcgagaccaagugcacccucaaguccuucaccguggagaaggggaucuaccagacgagcaacuuccgggugcagcccaccgaguccaucguccgcuucccgaacaucaccaaccugugccccuucggcgagguguucaacgccacccgguucgccagcgucuacgccuggaaccgcaagcggaucuccaacugcguggcggacuacagcgugcuguacaacuccgccagcuucuccacguucaagugcuacggcgucagccccaccaagcucaacgaccugugcuucaccaacguguacgccgacuccuucgugauccgcggggacgagguccggcagaucgcccccggccagaccgggaagaucgccgacuacaacuacaagcugccggacgacuucacgggcugcgugaucgcguggaacagcaacaaccucgacuccaaggucgggggcaacuacaacuaccuguuccgccuguuccgcaagagcaaccucaagcccuucgagcgggacaucuccaccgagaucuaccaggccggcagcacccccugcaacgggguggagggcuucaacugcuacuucccccugcaguccuacggguuccagccgaccaacggcgugggguaccagcccuaccggguggucgugcugagcuucgagcuccugcacgcccccgccacggugugcggccccaagaaguccaccaaccuggucaagaacaagugcgugaacuucaacuucaacggccucaccgggaccggcgugcugaccgagagcaacaagaaguuccugccguuccagcaguucgggcgcgacaucgccgacacgaccgacgcgguccgcgacccccagacccuggagauccucgacaucacccccugcagcuucggcgggguguccgugaucacgccgggcaccaacaccagcaaccaggucgccgugcuguaccagggcgugaacugcaccgagguccccguggccauccacgccgaccagcugacgcccaccuggcggguguacuccaccggcagcaacgucuuccagacccgcgccgggugccucaucggcgcggagcacgugaacaacuccuacgagugcgacauccccaucggggccggcaucugcgccagcuaccagacgcagaccaacuccccgcggcgcgcccggagcguggcgucccagagcgugaucgccuacaccaugucccugggcgccgagaacagcgucgccuacuccaacaacagcaucgccauccccaccaacuucacgaucuccgugaccaccgagauccugcccgugagcaugaccaagacgagcgucgacugcaccauguacaucugcggggacuccaccgagugcagcaaccuccugcugcaguacggcuccuucugcacccagcucaaccgcgcgcugacggggaucgccguggagcaggacaagaacacccaggagguguucgcccaggucaagcagaucuacaagacgcccccgaucaaggacuucggcggguucaacuucagccagauccugcccgaccccuccaagcccagcaagcgguccuucaucgaggaccuccuguucaacaaggugacccuggccgacgccggcuucaucaagcaguacggcgacugccucggggacaucgcggcccgcgaccugaucugcgcccagaaguucaacggccugaccgugcucccgccccugcugaccgacgagaugaucgcccaguacaccagcgcccuccuggcggggaccaucacguccggcuggaccuucggggccggcgccgcccugcagauccccuucgcgaugcagauggccuaccgguucaacggcaucggggucacccagaacgugcucuacgagaaccagaagcugaucgccaaccaguucaacagcgccaucggcaagauccaggacucccugagcuccaccgccagcgcgcucgggaagcugcaggacguggucaaccagaacgcccaggcccugaacacgcucgugaagcagcuguccagcaacuucggcgccaucuccagcgugcugaacgacauccucucccgccuggacccgcccgaggccgaggugcagaucgaccggcugaucaccgggcgccuccagagccugcagaccuacgugacccagcagcugauccgggcggccgagauccgcgccagcgccaaccucgccgcgaccaagauguccgagugcguccugggccagagcaagcggguggacuucugcggcaagggguaccaccugauguccuucccccagagcgccccgcacggcguggucuuccuccacgugacguacguccccgcccaggagaagaacuucaccaccgcccccgcgaucugccacgacgggaaggcccacuucccccgcgagggcguguucguguccaacgggacccacugguucgucacgcagcggaacuucuacgagccgcagaucaucaccaccgacaacaccuucgugagcggcaacugcgacguggucaucggcaucgugaacaacacgguguacgacccccugcagcccgagcuggacuccuucaaggaggagcucgacaaguacuucaagaaccacaccagccccgacgucgaccugggggacaucuccggcaucaacgccagcguggugaacauccagaaggagaucgaccgccugaacgaggucgccaagaaccucaacgagucccugaucgaccugcaggagcucgggaaguacgagcaguacaucaaguggccgugguacaucuggcugggcuucaucgccggccugaucgcgaucgugaucgugaccaucaugcucugcugcaugaccagcugcugcuccugccugaaggggugcugcagcugcggcuccugcugcaaguucgacgaggacgacagcgagcccguccugaagggggugaagcuccacuacacgugaggacuaguuauaagacugacuagcccgaugggccucccaacgggcccuccuccccuccuugcaccgagauuaauagaucuaaaaaaaaaaaaaaaaaaaaaaaaaaaaaaaaaaaaaaaaaaaaaaaaaaaaaaaaaaaaaaaaaaaaaaaaaaaaaaaaaaaaaaaaaaaaaaaaaaaa

SEQ ID NO: 25729 - RNA, 4008 nt, Artificial Sequence
  SARS-CoV-2/Wuhan/WIV05/2019__EPI_ISL_402128 spike protein mRNA gc (1-1273)(K986P_V987P_K986P_V987P_H69del_V70del_Y144del_N501Y_A570 D_D614G_P681H_T716I_S982A_D1118H)
aggagaaagcuuaccauguucguguuccugguccuccugccccuggugagcucccagugcgugaaccucaccacccgcacgcagcugccgcccgccuacaccaacagcuucacccggggcgucuacuaccccgacaagguguuccgcuccagcgugcugcacuccacccaggaccucuuccugcccuucuucagcaacgucacgugguuccacgccaucuccgggaccaacggcaccaagcgguucgacaacccggugcugcccuucaacgacggggucuacuucgcgagcaccgagaaguccaacaucauccgcggcuggaucuucgggacgacccucgacagcaagacccagucccugcugaucgugaacaacgccaccaacguggucaucaaggugugcgaguuccaguucugcaacgaccccuuccucggcguguaccacaagaacaacaagagcuggauggaguccgaguuccgggucuacagcuccgccaacaacugcacguucgaguacgugagccagcccuuccugauggaccuggagggcaagcaggggaacuucaagaaccuccgcgaguucguguucaagaacaucgacggcuacuucaagaucuacuccaagcacaccccgaucaaccugguccgggaccugccccagggguucagcgcccucgagccccugguggaccugcccaucggcaucaacaucacccgcuuccagacccuccuggcccugcaccgguccuaccucacgccgggggacagcagcuccggcuggaccgcgggcgccgccgccuacuacgugggguaccugcagccccgcaccuuccugcucaaguacaacgagaacggcaccaucacggacgcggucgacugcgcccuggacccccugagcgagaccaagugcacccucaaguccuucaccguggagaaggggaucuaccagacgagcaacuuccgggugcagcccaccgaguccaucguccgcuucccgaacaucaccaaccugugccccuucggcgagguguucaacgccacccgguucgccagcgucuacgccuggaaccgcaagcggaucuccaacugcguggcggacuacagcgugcuguacaacuccgccagcuucuccacguucaagugcuacggcgucagccccaccaagcucaacgaccugugcuucaccaacguguacgccgacuccuucgugauccgcggggacgagguccggcagaucgcccccggccagaccgggaagaucgccgacuacaacuacaagcugccggacgacuucacgggcugcgugaucgcguggaacagcaacaaccucgacuccaaggucgggggcaacuacaacuaccuguaccgccuguuccgcaagagcaaccucaagcccuucgagcgggacaucuccaccgagaucuaccaggccggcagcacccccugcaacgggguggagggcuucaacugcuacuucccccugcaguccuacggguuccagccgaccuacggcgugggguaccagcccuaccggguggucgugcugagcuucgagcuccugcacgcccccgccacggugugcggccccaagaaguccaccaaccuggucaagaacaagugcgugaacuucaacuucaacggccucaccgggaccggcgugcugaccgagagcaacaagaaguuccugccguuccagcaguucgggcgcgacaucgacgacacgaccgacgcgguccgcgacccccagacccuggagauccucgacaucacccccugcagcuucggcgggguguccgugaucacgccgggcaccaacaccagcaaccaggucgccgugcuguaccagggcgugaacugcaccgagguccccguggccauccacgccgaccagcugacgcccaccuggcggguguacuccaccggcagcaacgucuuccagacccgcgccgggugccucaucggcgcggagcacgugaacaacuccuacgagugcgacauccccaucggggccggcaucugcgccagcuaccagacgcagaccaacucccaccggcgcgcccggagcguggcgucccagagcaucaucgccuacaccaugucccugggcgccgagaacagcgucgccuacuccaacaacagcaucgccauccccaucaacuucacgaucuccgugaccaccgagauccugcccgugagcaugaccaagacgagcgucgacugcaccauguacaucugcggggacuccaccgagugcagcaaccuccugcugcaguacggcuccuucugcacccagcucaaccgcgcgcugacggggaucgccguggagcaggacaagaacacccaggagguguucgcccaggucaagcagaucuacaagacgcccccgaucaaggacuucggcggguucaacuucagccagauccugcccgaccccuccaagcccagcaagcgguccuucaucgaggaccuccuguucaacaaggugacccuggccgacgccggcuucaucaagcaguacggcgacugccucggggacaucgcggcccgcgaccugaucugcgcccagaaguucaacggccugaccgugcucccgccccugcugaccgacgagaugaucgcccaguacaccagcgcccuccuggcggggaccaucacguccggcuggaccuucggggccggcgccgcccugcagauccccuucgcgaugcagauggccuaccgguucaacggcaucggggucacccagaacgugcucuacgagaaccagaagcugaucgccaaccaguucaacagcgccaucggcaagauccaggacucccugagcuccaccgccagcgcgcucgggaagcugcaggacguggucaaccagaacgcccaggcccugaacacgcucgugaagcagcuguccagcaacuucggcgccaucuccagcgugcugaacgacauccucgcccgccuggacccgcccgaggccgaggugcagaucgaccggcugaucaccgggcgccuccagagccugcagaccuacgugacccagcagcugauccgggcggccgagauccgcgccagcgccaaccucgccgcgaccaagauguccgagugcguccugggccagagcaagcggguggacuucugcggcaagggguaccaccugauguccuucccccagagcgccccgcacggcguggucuuccuccacgugacguacguccccgcccaggagaagaacuucaccaccgcccccgcgaucugccacgacgggaaggcccacuucccccgcgagggcguguucguguccaacgggacccacugguucgucacgcagcggaacuucuacgagccgcagaucaucaccacccacaacaccuucgugagcggcaacugcgacguggucaucggcaucgugaacaacacgguguacgacccccugcagcccgagcuggacuccuucaaggaggagcucgacaaguacuucaagaaccacaccagccccgacgucgaccugggggacaucuccggcaucaacgccagcguggugaacauccagaaggagaucgaccgccugaacgaggucgccaagaaccucaacgagucccugaucgaccugcaggagcucgggaaguacgagcaguacaucaaguggccgugguacaucuggcugggcuucaucgccggccugaucgcgaucgugauggugaccaucaugcucugcugcaugaccagcugcugcuccugccugaaggggugcugcagcugcggcuccugcugcaaguucgacgaggacgacagcgagcccguccugaagggggugaagcuccacuacacgugaggacuaguuauaagacugacuagcccgaugggccucccaacgggcccuccuccccuccuugcaccgagauuaauagaucuaaaaaaaaaaaaaaaaaaaaaaaaaaaaaaaaaaaaaaaaaaaaaaaaaaaaaaaaaaaaaaaaaaaaaaaaaaaaaaaaaaaaaaaaaaaaaaaaaaaa

SEQ ID NO: 25730 - RNA, 4017 nt, Artificial Sequence
  SARS-CoV-2/Wuhan/WIV05/2019__EPI_ISL_402128 spike protein mRNA gc (1-1273)(K986P_V987P_K986P_V987P_K417N_E484K_N501Y_D614G)
aggagaaagcuuaccauguucguguuccugguccuccugccccuggugagcucccagugcgugaaccucaccacccgcacgcagcugccgcccgccuacaccaacagcuucacccggggcgucuacuaccccgacaagguguuccgcuccagcgugcugcacuccacccaggaccucuuccugcccuucuucagcaacgucacgugguuccacgccauccacguguccgggaccaacggcaccaagcgguucgacaacccggugcugcccuucaacgacggggucuacuucgcgagcaccgagaaguccaacaucauccgcggcuggaucuucgggacgacccucgacagcaagacccagucccugcugaucgugaacaacgccaccaacguggucaucaaggugugcgaguuccaguucugcaacgaccccuuccucggcguguacuaccacaagaacaacaagagcuggauggaguccgaguuccgggucuacagcuccgccaacaacugcacguucgaguacgugagccagcccuuccugauggaccuggagggcaagcaggggaacuucaagaaccuccgcgaguucguguucaagaacaucgacggcuacuucaagaucuacuccaagcacaccccgaucaaccugguccgggaccugccccagggguucagcgcccucgagccccugguggaccugcccaucggcaucaacaucacccgcuuccagacccuccuggcccugcaccgguccuaccucacgccgggggacagcagcuccggcuggaccgcgggcgccgccgccuacuacgugggguaccugcagccccgcaccuuccugcucaaguacaacgagaacggcaccaucacggacgcggucgacugcgcccuggacccccugagcgagaccaagugcacccucaaguccuucaccguggagaaggggaucuaccagacgagcaacuuccgggugcagcccaccgaguccaucguccgcuucccgaacaucaccaaccugugccccuucggcgagguguucaacgccacccgguucgccagcgucuacgccuggaaccgcaagcggaucuccaacugcguggcggacuacagcgugcuguacaacuccgccagcuucuccacguucaagugcuacggcgucagccccaccaagcucaacgaccugugcuucaccaacguguacgccgacuccuucgugauccgcggggacgagguccggcagaucgcccccggccagaccgggaacaucgccgacuacaacuacaagcugccggacgacuucacgggcugcgugaucgcguggaacagcaacaaccucgacuccaaggucgggggcaacuacaacuaccuguaccgccuguuccgcaagagcaaccucaagcccuucgagcgggacaucuccaccgagaucuaccaggccggcagcacccccugcaacggggugaagggcuucaacugcuacuucccccugcaguccuacggguuccagccgaccuacggcgugggguaccagcccuaccggguggucgugcugagcuucgagcuccugcacgcccccgccacggugugcggccccaagaaguccaccaaccuggucaagaacaagugcgugaacuucaacuucaacggccucaccgggaccggcgugcugaccgagagcaacaagaaguuccugccguuccagcaguucgggcgcgacaucgccgacacgaccgacgcgguccgcgacccccagacccuggagauccucgacaucacccccugcagcuucggcgggguguccgugaucacgccgggcaccaacaccagcaaccaggucgccgugcuguaccagggcgugaacugcaccgagguccccguggccauccacgccgaccagcugacgcccaccuggcggguguacuccaccggcagcaacgucuuccagacccgcgccgggugccucaucggcgcggagcacgugaacaacuccuacgagugcgacauccccaucggggccggcaucugcgccagcuaccagacgcagaccaacuccccgcggcgcgcccggagcguggcgucccagagcaucaucgccuacaccaugucccugggcgccgagaacagcgucgccuacuccaacaacagcaucgccauccccaccaacuucacgaucuccgugaccaccgagauccugcccgugagcaugaccaagacgagcgucgacugcaccauguacaucugcggggacuccaccgagugcagcaaccuccugcugcaguacggcuccuucugcacccagcucaaccgcgcgcugacggggaucgccguggagcaggacaagaacacccaggagguguucgcccaggucaagcagaucuacaagacgcccccgaucaaggacuucggcggguucaacuucagccagauccugcccgaccccuccaagcccagcaagcgguccuucaucgaggaccuccuguucaacaaggugacccuggccgacgccggcuucaucaagcaguacggcgacugccucggggacaucgcggcccgcgaccugaucugcgcccagaaguucaacggccugaccgugcucccgccccugcugaccgacgagaugaucgcccaguacaccagcgcccuccuggcggggaccaucacguccggcuggaccuucggggccggcgccgcccugcagauccccuucgcgaugcagauggccuaccgguucaacggcaucggggucacccagaacgugcucuacgagaaccagaagcugaucgccaaccaguucaacagcgccaucggcaagauccaggacucccugagcuccaccgccagcgcgcucgggaagcugcaggacguggucaaccagaacgcccaggcccugaacacgcucgugaagcagcuguccagcaacuucggcgccaucuccagcgugcugaacgacauccucucccgccuggacccgcccgaggccgaggugcagaucgaccggcugaucaccgggcgccuccagagccugcagaccuacgugacccagcagcugauccgggcggccgagauccgcgccagcgccaaccucgccgcgaccaagauguccgagugcguccugggccagagcaagcggguggacuucugcggcaagggguaccaccugauguccuucccccagagcgccccgcacggcguggucuuccuccacgugacguacguccccgcccaggagaagaacuucaccaccgcccccgcgaucugccacgacgggaaggcccacuucccccgcgagggcguguucguguccaacgggacccacugguucgucacgcagcggaacuucuacgagccgcagaucaucaccaccgacaacaccuucgugagcggcaacugcgacguggucaucggcaucgugaacaacacgguguacgacccccugcagcccgagcuggacuccuucaaggaggagcucgacaaguacuucaagaaccacaccagccccgacgucgaccugggggacaucuccggcaucaacgccagcguggugaacauccagaaggagaucgaccgccugaacgaggucgccaagaaccucaacgagucccugaucgaccugcaggagcucgggaaguacgagcaguacaucaaguggccgugguacaucuggcugggcuucaucgccggccugaucgcgaucgugauggugaccaucaugcucugcugcaugaccagcugcugcuccugccugaaggggugcugcagcugcggcuccugcugcaaguucgacgaggacgacagcgagcccguccugaagggggugaagcuccacuacacgugaggacuaguuauaagacugacuagcccgaugggccucccaacgggcccuccuccccuccuugcaccgagauuaauagaucuaaaaaaaaaaaaaaaaaaaaaaaaaaaaaaaaaaaaaaaaaaaaaaaaaaaaaaaaaaaaaaaaaaaaaaaaaaaaaaaaaaaaaaaaaaaaaaaaaaaa

SEQ ID NO: 25731 - RNA, 4008 nt, Artificial Sequence
  SARS-CoV-2/Wuhan/WIV05/2019__EPI_ISL_402128 spike protein mRNA gc (1-1273)(K986P_V987P_K986P_V987P_L18F_D80A_D215G_L242del_A243del_ L244del_R246I_K417N_E484K_N501Y_D614G_A701V)
aggagaaagcuuaccauguucguguuccugguccuccugccccuggugagcucccagugcgugaacuucaccacccgcacgcagcugccgcccgccuacaccaacagcuucacccggggcgucuacuaccccgacaagguguuccgcuccagcgugcugcacuccacccaggaccucuuccugcccuucuucagcaacgucacgugguuccacgccauccacguguccgggaccaacggcaccaagcgguucgccaacccggugcugcccuucaacgacggggucuacuucgcgagcaccgagaaguccaacaucauccgcggcuggaucuucgggacgacccucgacagcaagacccagucccugcugaucgugaacaacgccaccaacguggucaucaaggugugcgaguuccaguucugcaacgaccccuuccucggcguguacuaccacaagaacaacaagagcuggauggaguccgaguuccgggucuacagcuccgccaacaacugcacguucgaguacgugagccagcccuuccugauggaccuggagggcaagcaggggaacuucaagaaccuccgcgaguucguguucaagaacaucgacggcuacuucaagaucuacuccaagcacaccccgaucaaccugguccggggccugccccagggguucagcgcccucgagccccugguggaccugcccaucggcaucaacaucacccgcuuccagacccuccacaucuccuaccucacgccgggggacagcagcuccggcuggaccgcgggcgccgccgccuacuacgugggguaccugcagccccgcaccuuccugcucaaguacaacgagaacggcaccaucacggacgcggucgacugcgcccuggacccccugagcgagaccaagugcacccucaaguccuucaccguggagaaggggaucuaccagacgagcaacuuccgggugcagcccaccgaguccaucguccgcuucccgaacaucaccaaccugugccccuucggcgagguguucaacgccacccgguucgccagcgucuacgccuggaaccgcaagcggaucuccaacugcguggcggacuacagcgugcuguacaacuccgccagcuucuccacguucaagugcuacggcgucagccccaccaagcucaacgaccugugcuucaccaacguguacgccgacuccuucgugauccgcggggacgagguccggcagaucgcccccggccagaccgggaacaucgccgacuacaacuacaagcugccggacgacuucacgggcugcgugaucgcguggaacagcaacaaccucgacuccaaggucgggggcaacuacaacuaccuguaccgccuguuccgcaagagcaaccucaagcccuucgagcgggacaucuccaccgagaucuaccaggccggcagcacccccugcaacggggugaagggcuucaacugcuacuucccccugcaguccuacggguuccagccgaccuacggcgugggguaccagcccuaccggguggucgugcugagcuucgagcuccugcacgcccccgccacggugugcggccccaagaaguccaccaaccuggucaagaacaagugcgugaacuucaacuucaacggccucaccgggaccggcgugcugaccgagagcaacaagaaguuccugccguuccagcaguucgggcgcgacaucgccgacacgaccgacgcgguccgcgacccccagacccuggagauccucgacaucacccccugcagcuucggcgggguguccgugaucacgccgggcaccaacaccagcaaccaggucgccgugcuguaccagggcgugaacugcaccgagguccccguggccauccacgccgaccagcugacgcccaccuggcggguguacuccaccggcagcaacgucuuccagacccgcgccgggugccucaucggcgcggagcacgugaacaacuccuacgagugcgacauccccaucggggccggcaucugcgccagcuaccagacgcagaccaacuccccgcggcgcgcccggagcguggcgucccagagcaucaucgccuacaccaugucccugggcguggagaacagcgucgccuacuccaacaacagcaucgccauccccaccaacuucacgaucuccgugaccaccgagauccugcccgugagcaugaccaagacgagcgucgacugcaccauguacaucugcggggacuccaccgagugcagcaaccuccugcugcaguacggcuccuucugcacccagcucaaccgcgcgcugacggggaucgccguggagcaggacaagaacacccaggagguguucgcccaggucaagcagaucuacaagacgcccccgaucaaggacuucggcggguucaacuucagccagauccugcccgaccccuccaagcccagcaagcgguccuucaucgaggaccuccuguucaacaaggugacccuggccgacgccggcuucaucaagcaguacggcgacugccucggggacaucgcggcccgcgaccugaucugcgcccagaaguucaacggccugaccgugcucccgccccugcugaccgacgagaugaucgcccaguacaccagcgcccuccuggcggggaccaucacguccggcuggaccuucggggccggcgccgcccugcagauccccuucgcgaugcagauggccuaccgguucaacggcaucggggucacccagaacgugcucuacgagaaccagaagcugaucgccaaccaguucaacagcgccaucggcaagauccaggacucccugagcuccaccgccagcgcgcucgggaagcugcaggacguggucaaccagaacgcccaggcccugaacacgcucgugaagcagcuguccagcaacuucggcgccaucuccagcgugcugaacgacauccucucccgccuggacccgcccgaggccgaggugcagaucgaccggcugaucaccgggcgccuccagagccugcagaccuacgugacccagcagcugauccgggcggccgagauccgcgccagcgccaaccucgccgcgaccaagauguccgagugcguccugggccagagcaagcggguggacuucugcggcaagggguaccaccugauguccuucccccagagcgccccgcacggcguggucuuccuccacgugacguacguccccgcccaggagaagaacuucaccaccgcccccgcgaucugccacgacgggaaggcccacuucccccgcgagggcguguucguguccaacgggacccacugguucgucacgcagcggaacuucuacgagccgcagaucaucaccaccgacaacaccuucgugagcggcaacugcgacguggucaucggcaucgugaacaacacgguguacgacccccugcagcccgagcuggacuccuucaaggaggagcucgacaaguacuucaagaaccacaccagccccgacgucgaccugggggacaucuccggcaucaacgccagcguggugaacauccagaaggagaucgaccgccugaacgaggucgccaagaaccucaacgagucccugaucgaccugcaggagcucgggaaguacgagcaguacaucaaguggccgugguacaucuggcugggcuucaucgccggccugaucgcgaucgugauggugaccaucaugcucugcugcaugaccagcugcugcuccugccugaaggggugcugcagcugcggcuccugcugcaaguucgacgaggacgacagcgagcccguccugaagggggugaagcuccacuacacgugaggacuaguuauaagacugacuagcccgaugggccucccaacgggcccuccuccccuccuugcaccgagauuaauagaucuaaaaaaaaaaaaaaaaaaaaaaaaaaaaaaaaaaaaaaaaaaaaaaaaaaaaaaaaaaaaaaaaaaaaaaaaaaaaaaaaaaaaaaaaaaaaaaaaaaaa

SEQ ID NO: 25732 - RNA, 4017 nt, Artificial Sequence
  SARS-CoV-2/Wuhan/WIV05/2019__EPI_ISL_402128 spike protein mRNA gc (1-1273)(K986P_V987P_K986P_V987P_E484K_D614G)
aggagaaagcuuaccauguucguguuccugguccuccugccccuggugagcucccagugcgugaaccucaccacccgcacgcagcugccgcccgccuacaccaacagcuucacccggggcgucuacuaccccgacaagguguuccgcuccagcgugcugcacuccacccaggaccucuuccugcccuucuucagcaacgucacgugguuccacgccauccacguguccgggaccaacggcaccaagcgguucgacaacccggugcugcccuucaacgacggggucuacuucgcgagcaccgagaaguccaacaucauccgcggcuggaucuucgggacgacccucgacagcaagacccagucccugcugaucgugaacaacgccaccaacguggucaucaaggugugcgaguuccaguucugcaacgaccccuuccucggcguguacuaccacaagaacaacaagagcuggauggaguccgaguuccgggucuacagcuccgccaacaacugcacguucgaguacgugagccagcccuuccugauggaccuggagggcaagcaggggaacuucaagaaccuccgcgaguucguguucaagaacaucgacggcuacuucaagaucuacuccaagcacaccccgaucaaccugguccgggaccugccccagggguucagcgcccucgagccccugguggaccugcccaucggcaucaacaucacccgcuuccagacccuccuggcccugcaccgguccuaccucacgccgggggacagcagcuccggcuggaccgcgggcgccgccgccuacuacgugggguaccugcagccccgcaccuuccugcucaaguacaacgagaacggcaccaucacggacgcggucgacugcgcccuggacccccugagcgagaccaagugcacccucaaguccuucaccguggagaaggggaucuaccagacgagcaacuuccgggugcagcccaccgaguccaucguccgcuucccgaacaucaccaaccugugccccuucggcgagguguucaacgccacccgguucgccagcgucuacgccuggaaccgcaagcggaucuccaacugcguggcggacuacagcgugcuguacaacuccgccagcuucuccacguucaagugcuacggcgucagccccaccaagcucaacgaccugugcuucaccaacguguacgccgacuccuucgugauccgcggggacgagguccggcagaucgcccccggccagaccgggaagaucgccgacuacaacuacaagcugccggacgacuucacgggcugcgugaucgcguggaacagcaacaaccucgacuccaaggucgggggcaacuacaacuaccuguaccgccuguuccgcaagagcaaccucaagcccuucgagcgggacaucuccaccgagaucuaccaggccggcagcacccccugcaacggggugaagggcuucaacugcuacuucccccugcaguccuacggguuccagccgaccaacggcgugggguaccagcccuaccggguggucgugcugagcuucgagcuccugcacgcccccgccacggugugcggccccaagaaguccaccaaccuggucaagaacaagugcgugaacuucaacuucaacggccucaccgggaccggcgugcugaccgagagcaacaagaaguuccugccguuccagcaguucgggcgcgacaucgccgacacgaccgacgcgguccgcgacccccagacccuggagauccucgacaucacccccugcagcuucggcgggguguccgugaucacgccgggcaccaacaccagcaaccaggucgccgugcuguaccagggcgugaacugcaccgagguccccguggccauccacgccgaccagcugacgcccaccuggcggguguacuccaccggcagcaacgucuuccagacccgcgccgggugccucaucggcgcggagcacgugaacaacuccuacgagugcgacauccccaucggggccggcaucugcgccagcuaccagacgcagaccaacuccccgcggcgcgcccggagcguggcgucccagagcaucaucgccuacaccaugucccugggcgccgagaacagcgucgccuacuccaacaacagcaucgccauccccaccaacuucacgaucuccgugaccaccgagauccugcccgugagcaugaccaagacgagcgucgacugcaccauguacaucugcggggacuccaccgagugcagcaaccuccugcugcaguacggcuccuucugcacccagcucaaccgcgcgcugacggggaucgccguggagcaggacaagaacacccaggagguguucgcccaggucaagcagaucuacaagacgcccccgaucaaggacuucggcggguucaacuucagccagauccugcccgaccccuccaagcccagcaagcgguccuucaucgaggaccuccuguucaacaaggugacccuggccgacgccggcuucaucaagcaguacggcgacugccucggggacaucgcggcccgcgaccugaucugcgcccagaaguucaacggccugaccgugcucccgccccugcugaccgacgagaugaucgcccaguacaccagcgcccuccuggcggggaccaucacguccggcuggaccuucggggccggcgccgcccugcagauccccuucgcgaugcagauggccuaccgguucaacggcaucggggucacccagaacgugcucuacgagaaccagaagcugaucgccaaccaguucaacagcgccaucggcaagauccaggacucccugagcuccaccgccagcgcgcucgggaagcugcaggacguggucaaccagaacgcccaggcccugaacacgcucgugaagcagcuguccagcaacuucggcgccaucuccagcgugcugaacgacauccucucccgccuggacccgcccgaggccgaggugcagaucgaccggcugaucaccgggcgccuccagagccugcagaccuacgugacccagcagcugauccgggcggccgagauccgcgccagcgccaaccucgccgcgaccaagauguccgagugcguccugggccagagcaagcggguggacuucugcggcaagggguaccaccugauguccuucccccagagcgccccgcacggcguggucuuccuccacgugacguacguccccgcccaggagaagaacuucaccaccgcccccgcgaucugccacgacgggaaggcccacuucccccgcgagggcguguucguguccaacgggacccacugguucgucacgcagcggaacuucuacgagccgcagaucaucaccaccgacaacaccuucgugagcggcaacugcgacguggucaucggcaucgugaacaacacgguguacgacccccugcagcccgagcuggacuccuucaaggaggagcucgacaaguacuucaagaaccacaccagccccgacgucgaccugggggacaucuccggcaucaacgccagcguggugaacauccagaaggagaucgaccgccugaacgaggucgccaagaaccucaacgagucccugaucgaccugcaggagcucgggaaguacgagcaguacaucaaguggccgugguacaucuggcugggcuucaucgccggccugaucgcgaucgugauggugaccaucaugcucugcugcaugaccagcugcugcuccugccugaaggggugcugcagcugcggcuccugcugcaaguucgacgaggacgacagcgagcccguccugaagggggugaagcuccacuacacgugaggacuaguuauaagacugacuagcccgaugggccucccaacgggcccuccuccccuccuugcaccgagauuaauagaucuaaaaaaaaaaaaaaaaaaaaaaaaaaaaaaaaaaaaaaaaaaaaaaaaaaaaaaaaaaaaaaaaaaaaaaaaaaaaaaaaaaaaaaaaaaaaaaaaaaaa

SEQ ID NO: 25733 - RNA, 4017 nt, Artificial Sequence
  SARS-CoV-2/Wuhan/WIV05/2019__EPI_ISL_402128 spike protein mRNA gc (1-1273)(K986P_V987P_K986P_V987P_L18F_T20N_P26S_D138Y_R190S_K417T _E484K_N501Y_D614G_H655Y_T1027I)
aggagaaagcuuaccauguucguguuccugguccuccugccccuggugagcucccagugcgugaacuucaccaaccgcacgcagcugccgagcgccuacaccaacagcuucacccggggcgucuacuaccccgacaagguguuccgcuccagcgugcugcacuccacccaggaccucuuccugcccuucuucagcaacgucacgugguuccacgccauccacguguccgggaccaacggcaccaagcgguucgacaacccggugcugcccuucaacgacggggucuacuucgcgagcaccgagaaguccaacaucauccgcggcuggaucuucgggacgacccucgacagcaagacccagucccugcugaucgugaacaacgccaccaacguggucaucaaggugugcgaguuccaguucugcaacuaccccuuccucggcguguacuaccacaagaacaacaagagcuggauggaguccgaguuccgggucuacagcuccgccaacaacugcacguucgaguacgugagccagcccuuccugauggaccuggagggcaagcaggggaacuucaagaaccucagcgaguucguguucaagaacaucgacggcuacuucaagaucuacuccaagcacaccccgaucaaccugguccgggaccugccccagggguucagcgcccucgagccccugguggaccugcccaucggcaucaacaucacccgcuuccagacccuccuggcccugcaccgguccuaccucacgccgggggacagcagcuccggcuggaccgcgggcgccgccgccuacuacgugggguaccugcagccccgcaccuuccugcucaaguacaacgagaacggcaccaucacggacgcggucgacugcgcccuggacccccugagcgagaccaagugcacccucaaguccuucaccguggagaaggggaucuaccagacgagcaacuuccgggugcagcccaccgaguccaucguccgcuucccgaacaucaccaaccugugccccuucggcgagguguucaacgccacccgguucgccagcgucuacgccuggaaccgcaagcggaucuccaacugcguggcggacuacagcgugcuguacaacuccgccagcuucuccacguucaagugcuacggcgucagccccaccaagcucaacgaccugugcuucaccaacguguacgccgacuccuucgugauccgcggggacgagguccggcagaucgcccccggccagaccgggaccaucgccgacuacaacuacaagcugccggacgacuucacgggcugcgugaucgcguggaacagcaacaaccucgacuccaaggucgggggcaacuacaacuaccuguaccgccuguuccgcaagagcaaccucaagcccuucgagcgggacaucuccaccgagaucuaccaggccggcagcacccccugcaacggggugaagggcuucaacugcuacuucccccugcaguccuacggguuccagccgaccuacggcgugggguaccagcccuaccggguggucgugcugagcuucgagcuccugcacgcccccgccacggugugcggccccaagaaguccaccaaccuggucaagaacaagugcgugaacuucaacuucaacggccucaccgggaccggcgugcugaccgagagcaacaagaaguuccugccguuccagcaguucgggcgcgacaucgccgacacgaccgacgcgguccgcgacccccagacccuggagauccucgacaucacccccugcagcuucggcgggguguccgugaucacgccgggcaccaacaccagcaaccaggucgccgugcuguaccagggcgugaacugcaccgagguccccguggccauccacgccgaccagcugacgcccaccuggcggguguacuccaccggcagcaacgucuuccagacccgcgccgggugccucaucggcgcggaguacgugaacaacuccuacgagugcgacauccccaucggggccggcaucugcgccagcuaccagacgcagaccaacuccccgcggcgcgcccggagcguggcgucccagagcaucaucgccuacaccaugucccugggcgccgagaacagcgucgccuacuccaacaacagcaucgccauccccaccaacuucacgaucuccgugaccaccgagauccugcccgugagcaugaccaagacgagcgucgacugcaccauguacaucugcggggacuccaccgagugcagcaaccuccugcugcaguacggcuccuucugcacccagcucaaccgcgcgcugacggggaucgccguggagcaggacaagaacacccaggagguguucgcccaggucaagcagaucuacaagacgcccccgaucaaggacuucggcggguucaacuucagccagauccugcccgaccccuccaagcccagcaagcgguccuucaucgaggaccuccuguucaacaaggugacccuggccgacgccggcuucaucaagcaguacggcgacugccucggggacaucgcggcccgcgaccugaucugcgcccagaaguucaacggccugaccgugcucccgccccugcugaccgacgagaugaucgcccaguacaccagcgcccuccuggcggggaccaucacguccggcuggaccuucggggccggcgccgcccugcagauccccuucgcgaugcagauggccuaccgguucaacggcaucggggucacccagaacgugcucuacgagaaccagaagcugaucgccaaccaguucaacagcgccaucggcaagauccaggacucccugagcuccaccgccagcgcgcucgggaagcugcaggacguggucaaccagaacgcccaggcccugaacacgcucgugaagcagcuguccagcaacuucggcgccaucuccagcgugcugaacgacauccucucccgccuggacccgcccgaggccgaggugcagaucgaccggcugaucaccgggcgccuccagagccugcagaccuacgugacccagcagcugauccgggcggccgagauccgcgccagcgccaaccucgccgcgaucaagauguccgagugcguccugggccagagcaagcggguggacuucugcggcaagggguaccaccugauguccuucccccagagcgccccgcacggcguggucuuccuccacgugacguacguccccgcccaggagaagaacuucaccaccgcccccgcgaucugccacgacgggaaggcccacuucccccgcgagggcguguucguguccaacgggacccacugguucgucacgcagcggaacuucuacgagccgcagaucaucaccaccgacaacaccuucgugagcggcaacugcgacguggucaucggcaucgugaacaacacgguguacgacccccugcagcccgagcuggacuccuucaaggaggagcucgacaaguacuucaagaaccacaccagccccgacgucgaccugggggacaucuccggcaucaacgccagcguggugaacauccagaaggagaucgaccgccugaacgaggucgccaagaaccucaacgagucccugaucgaccugcaggagcucgggaaguacgagcaguacaucaaguggccgugguacaucuggcugggcuucaucgccggccugaucgcgaucgugauggugaccaucaugcucugcugcaugaccagcugcugcuccugccugaaggggugcugcagcugcggcuccugcugcaaguucgacgaggacgacagcgagcccguccugaagggggugaagcuccacuacacgugaggacuaguuauaagacugacuagcccgaugggccucccaacgggcccuccuccccuccuugcaccgagauuaauagaucuaaaaaaaaaaaaaaaaaaaaaaaaaaaaaaaaaaaaaaaaaaaaaaaaaaaaaaaaaaaaaaaaaaaaaaaaaaaaaaaaaaaaaaaaaaaaaaaaaaaa

SEQ ID NO: 25734 - RNA, 4017 nt, Artificial Sequence
  SARS-CoV-2/Wuhan/WIV05/2019__EPI_ISL_402128 spike protein mRNA gc (1-1273)(K986P_V987P_K986P_V987P_S13I_W152C_L452R_D614G)
aggagaaagcuuaccauguucguguuccugguccuccugccccuggugagcauccagugcgugaaccucaccacccgcacgcagcugccgcccgccuacaccaacagcuucacccggggcgucuacuaccccgacaagguguuccgcuccagcgugcugcacuccacccaggaccucuuccugcccuucuucagcaacgucacgugguuccacgccauccacguguccgggaccaacggcaccaagcgguucgacaacccggugcugcccuucaacgacggggucuacuucgcgagcaccgagaaguccaacaucauccgcggcuggaucuucgggacgacccucgacagcaagacccagucccugcugaucgugaacaacgccaccaacguggucaucaaggugugcgaguuccaguucugcaacgaccccuuccucggcguguacuaccacaagaacaacaagagcugcauggaguccgaguuccgggucuacagcuccgccaacaacugcacguucgaguacgugagccagcccuuccugauggaccuggagggcaagcaggggaacuucaagaaccuccgcgaguucguguucaagaacaucgacggcuacuucaagaucuacuccaagcacaccccgaucaaccugguccgggaccugccccagggguucagcgcccucgagccccugguggaccugcccaucggcaucaacaucacccgcuuccagacccuccuggcccugcaccgguccuaccucacgccgggggacagcagcuccggcuggaccgcgggcgccgccgccuacuacgugggguaccugcagccccgcaccuuccugcucaaguacaacgagaacggcaccaucacggacgcggucgacugcgcccuggacccccugagcgagaccaagugcacccucaaguccuucaccguggagaaggggaucuaccagacgagcaacuuccgggugcagcccaccgaguccaucguccgcuucccgaacaucaccaaccugugccccuucggcgagguguucaacgccacccgguucgccagcgucuacgccuggaaccgcaagcggaucuccaacugcguggcggacuacagcgugcuguacaacuccgccagcuucuccacguucaagugcuacggcgucagccccaccaagcucaacgaccugugcuucaccaacguguacgccgacuccuucgugauccgcggggacgagguccggcagaucgcccccggccagaccgggaagaucgccgacuacaacuacaagcugccggacgacuucacgggcugcgugaucgcguggaacagcaacaaccucgacuccaaggucgggggcaacuacaacuaccgcuaccgccuguuccgcaagagcaaccucaagcccuucgagcgggacaucuccaccgagaucuaccaggccggcagcacccccugcaacgggguggagggcuucaacugcuacuucccccugcaguccuacggguuccagccgaccaacggcgugggguaccagcccuaccggguggucgugcugagcuucgagcuccugcacgcccccgccacggugugcggccccaagaaguccaccaaccuggucaagaacaagugcgugaacuucaacuucaacggccucaccgggaccggcgugcugaccgagagcaacaagaaguuccugccguuccagcaguucgggcgcgacaucgccgacacgaccgacgcgguccgcgacccccagacccuggagauccucgacaucacccccugcagcuucggcgggguguccgugaucacgccgggcaccaacaccagcaaccaggucgccgugcuguaccagggcgugaacugcaccgagguccccguggccauccacgccgaccagcugacgcccaccuggcggguguacuccaccggcagcaacgucuuccagacccgcgccgggugccucaucggcgcggagcacgugaacaacuccuacgagugcgacauccccaucggggccggcaucugcgccagcuaccagacgcagaccaacuccccgcggcgcgcccggagcguggcgucccagagcaucaucgccuacaccaugucccugggcgccgagaacagcgucgccuacuccaacaacagcaucgccauccccaccaacuucacgaucuccgugaccaccgagauccugcccgugagcaugaccaagacgagcgucgacugcaccauguacaucugcggggacuccaccgagugcagcaaccuccugcugcaguacggcuccuucugcacccagcucaaccgcgcgcugacggggaucgccguggagcaggacaagaacacccaggagguguucgcccaggucaagcagaucuacaagacgcccccgaucaaggacuucggcggguucaacuucagccagauccugcccgaccccuccaagcccagcaagcgguccuucaucgaggaccuccuguucaacaaggugacccuggccgacgccggcuucaucaagcaguacggcgacugccucggggacaucgcggcccgcgaccugaucugcgcccagaaguucaacggccugaccgugcucccgccccugcugaccgacgagaugaucgcccaguacaccagcgcccuccuggcggggaccaucacguccggcuggaccuucggggccggcgccgcccugcagauccccuucgcgaugcagauggccuaccgguucaacggcaucggggucacccagaacgugcucuacgagaaccagaagcugaucgccaaccaguucaacagcgccaucggcaagauccaggacucccugagcuccaccgccagcgcgcucgggaagcugcaggacguggucaaccagaacgcccaggcccugaacacgcucgugaagcagcuguccagcaacuucggcgccaucuccagcgugcugaacgacauccucucccgccuggacccgcccgaggccgaggugcagaucgaccggcugaucaccgggcgccuccagagccugcagaccuacgugacccagcagcugauccgggcggccgagauccgcgccagcgccaaccucgccgcgaccaagauguccgagugcguccugggccagagcaagcggguggacuucugcggcaagggguaccaccugauguccuucccccagagcgccccgcacggcguggucuuccuccacgugacguacguccccgcccaggagaagaacuucaccaccgcccccgcgaucugccacgacgggaaggcccacuucccccgcgagggcguguucguguccaacgggacccacugguucgucacgcagcggaacuucuacgagccgcagaucaucaccaccgacaacaccuucgugagcggcaacugcgacguggucaucggcaucgugaacaacacgguguacgacccccugcagcccgagcuggacuccuucaaggaggagcucgacaaguacuucaagaaccacaccagccccgacgucgaccugggggacaucuccggcaucaacgccagcguggugaacauccagaaggagaucgaccgccugaacgaggucgccaagaaccucaacgagucccugaucgaccugcaggagcucgggaaguacgagcaguacaucaaguggccgugguacaucuggcugggcuucaucgccggccugaucgcgaucgugauggugaccaucaugcucugcugcaugaccagcugcugcuccugccugaaggggugcugcagcugcggcuccugcugcaaguucgacgaggacgacagcgagcccguccugaagggggugaagcuccacuacacgugaggacuaguuauaagacugacuagcccgaugggccucccaacgggcccuccuccccuccuugcaccgagauuaauagaucuaaaaaaaaaaaaaaaaaaaaaaaaaaaaaaaaaaaaaaaaaaaaaaaaaaaaaaaaaaaaaaaaaaaaaaaaaaaaaaaaaaaaaaaaaaaaaaaaaaaa

SEQ ID NO: 25735 - RNA, 4017 nt, Artificial Sequence
  SARS-CoV-2/Wuhan/WIV05/2019__EPI_ISL_402128 spike protein mRNA gc (1-1273)(K986P_V987P)
aggagaaagcuuaccauguucguguuccugguccuccugccccuggugagcucccagugcgugaaccucaccacccgcacgcagcugccgcccgccuacaccaacagcuucacccggggcgucuacuaccccgacaagguguuccgcuccagcgugcugcacuccacccaggaccucuuccugcccuucuucagcaacgucacgugguuccacgccauccacguguccgggaccaacggcaccaagcgguucgacaacccggugcugcccuucaacgacggggucuacuucgcgagcaccgagaaguccaacaucauccgcggcuggaucuucgggacgacccucgacagcaagacccagucccugcugaucgugaacaacgccaccaacguggucaucaaggugugcgaguuccaguucugcaacgaccccuuccucggcguguacuaccacaagaacaacaagagcuggauggaguccgaguuccgggucuacagcuccgccaacaacugcacguucgaguacgugagccagcccuuccugauggaccuggagggcaagcaggggaacuucaagaaccuccgcgaguucguguucaagaacaucgacggcuacuucaagaucuacuccaagcacaccccgaucaaccugguccgggaccugccccagggguucagcgcccucgagccccugguggaccugcccaucggcaucaacaucacccgcuuccagacccuccuggcccugcaccgguccuaccucacgccgggggacagcagcuccggcuggaccgcgggcgccgccgccuacuacgugggguaccugcagccccgcaccuuccugcucaaguacaacgagaacggcaccaucacggacgcggucgacugcgcccuggacccccugagcgagaccaagugcacccucaaguccuucaccguggagaaggggaucuaccagacgagcaacuuccgggugcagcccaccgaguccaucguccgcuucccgaacaucaccaaccugugccccuucggcgagguguucaacgccacccgguucgccagcgucuacgccuggaaccgcaagcggaucuccaacugcguggcggacuacagcgugcuguacaacuccgccagcuucuccacguucaagugcuacggcgucagccccaccaagcucaacgaccugugcuucaccaacguguacgccgacuccuucgugauccgcggggacgagguccggcagaucgcccccggccagaccgggaagaucgccgacuacaacuacaagcugccggacgacuucacgggcugcgugaucgcguggaacagcaacaaccucgacuccaaggucgggggcaacuacaacuaccuguaccgccuguuccgcaagagcaaccucaagcccuucgagcgggacaucuccaccgagaucuaccaggccggcagcacccccugcaacgggguggagggcuucaacugcuacuucccccugcaguccuacggguuccagccgaccaacggcgugggguaccagcccuaccggguggucgugcugagcuucgagcuccugcacgcccccgccacggugugcggccccaagaaguccaccaaccuggucaagaacaagugcgugaacuucaacuucaacggccucaccgggaccggcgugcugaccgagagcaacaagaaguuccugccguuccagcaguucgggcgcgacaucgccgacacgaccgacgcgguccgcgacccccagacccuggagauccucgacaucacccccugcagcuucggcgggguguccgugaucacgccgggcaccaacaccagcaaccaggucgccgugcuguaccaggacgugaacugcaccgagguccccguggccauccacgccgaccagcugacgcccaccuggcggguguacuccaccggcagcaacgucuuccagacccgcgccgggugccucaucggcgcggagcacgugaacaacuccuacgagugcgacauccccaucggggccggcaucugcgccagcuaccagacgcagaccaacuccccgcggcgcgcccggagcguggcgucccagagcaucaucgccuacaccaugucccugggcgccgagaacagcgucgccuacuccaacaacagcaucgccauccccaccaacuucacgaucuccgugaccaccgagauccugcccgugagcaugaccaagacgagcgucgacugcaccauguacaucugcggggacuccaccgagugcagcaaccuccugcugcaguacggcuccuucugcacccagcucaaccgcgcgcugacggggaucgccguggagcaggacaagaacacccaggagguguucgcccaggucaagcagaucuacaagacgcccccgaucaaggacuucggcggguucaacuucagccagauccugcccgaccccuccaagcccagcaagcgguccuucaucgaggaccuccuguucaacaaggugacccuggccgacgccggcuucaucaagcaguacggcgacugccucggggacaucgcggcccgcgaccugaucugcgcccagaaguucaacggccugaccgugcucccgccccugcugaccgacgagaugaucgcccaguacaccagcgcccuccuggcggggaccaucacguccggcuggaccuucggggccggcgccgcccugcagauccccuucgcgaugcagauggccuaccgguucaacggcaucggggucacccagaacgugcucuacgagaaccagaagcugaucgccaaccaguucaacagcgccaucggcaagauccaggacucccugagcuccaccgccagcgcgcucgggaagcugcaggacguggucaaccagaacgcccaggcccugaacacgcucgugaagcagcuguccagcaacuucggcgccaucuccagcgugcugaacgacauccucucccgccuggacccgcccgaggccgagguccagaucgaccggcugaucaccgggcgccuccagagccugcagaccuacgugacccagcagcugauccgggcggccgagauccgcgccagcgccaaccucgccgcgaccaagauguccgagugcgugcugggccagagcaagcgggucgacuucugcggcaagggguaccaccugauguccuucccccagagcgcgccccacggcgugguguuccuccacgucacguacgugcccgcccaggagaagaacuucaccaccgccccggccaucugccacgacgggaaggcccacuucccccgcgagggcgucuucguguccaacgggacccacugguucgugacgcagcggaacuucuacgagccccagaucaucaccaccgacaacaccuucgucagcggcaacugcgacguggugaucggcaucgucaacaacacgguguacgacccccugcagccggagcuggacuccuucaaggaggagcucgacaaguacuucaagaaccacaccagccccgacguggaccugggggacaucuccggcaucaacgccagcgucgugaacauccagaaggagaucgaccgccugaacgagguggccaagaaccucaacgagucccugaucgaccugcaggagcucgggaaguacgagcaguacaucaaguggcccugguacaucuggcugggcuucaucgccggccugaucgcgaucgucauggugaccaucaugcucugcugcaugaccagcugcugcuccugccugaaggggugcugcagcugcggcuccugcugcaaguucgacgaggacgacagcgagccggugcugaagggggucaagcuccacuacacgugaggacuaguuauaagacugacuagcccgaugggccucccaacgggcccuccuccccuccuugcaccgagauuaauagaucuaaaaaaaaaaaaaaaaaaaaaaaaaaaaaaaaaaaaaaaaaaaaaaaaaaaaaaaaaaaaaaaaaaaaaaaaaaaaaaaaaaaaaaaaaaaaaaaaaaaa

SEQ ID NO: 25736 - RNA, 4017 nt, Artificial Sequence
  SARS-CoV-2/Wuhan/WIV05/2019__EPI_ISL_402128 spike protein mRNA gc (1-1273)(K986P_V987P_ D614G)
aggagaaagcuuaccauguucguguuccugguccuccugccccuggugagcucccagugcgugaaccucaccacccgcacgcagcugccgcccgccuacaccaacagcuucacccggggcgucuacuaccccgacaagguguuccgcuccagcgugcugcacuccacccaggaccucuuccugcccuucuucagcaacgucacgugguuccacgccauccacguguccgggaccaacggcaccaagcgguucgacaacccggugcugcccuucaacgacggggucuacuucgcgagcaccgagaaguccaacaucauccgcggcuggaucuucgggacgacccucgacagcaagacccagucccugcugaucgugaacaacgccaccaacguggucaucaaggugugcgaguuccaguucugcaacgaccccuuccucggcguguacuaccacaagaacaacaagagcuggauggaguccgaguuccgggucuacagcuccgccaacaacugcacguucgaguacgugagccagcccuuccugauggaccuggagggcaagcaggggaacuucaagaaccuccgcgaguucguguucaagaacaucgacggcuacuucaagaucuacuccaagcacaccccgaucaaccugguccgggaccugccccagggguucagcgcccucgagccccugguggaccugcccaucggcaucaacaucacccgcuuccagacccuccuggcccugcaccgguccuaccucacgccgggggacagcagcuccggcuggaccgcgggcgccgccgccuacuacgugggguaccugcagccccgcaccuuccugcucaaguacaacgagaacggcaccaucacggacgcggucgacugcgcccuggacccccugagcgagaccaagugcacccucaaguccuucaccguggagaaggggaucuaccagacgagcaacuuccgggugcagcccaccgaguccaucguccgcuucccgaacaucaccaaccugugccccuucggcgagguguucaacgccacccgguucgccagcgucuacgccuggaaccgcaagcggaucuccaacugcguggcggacuacagcgugcuguacaacuccgccagcuucuccacguucaagugcuacggcgucagccccaccaagcucaacgaccugugcuucaccaacguguacgccgacuccuucgugauccgcggggacgagguccggcagaucgcccccggccagaccgggaagaucgccgacuacaacuacaagcugccggacgacuucacgggcugcgugaucgcguggaacagcaacaaccucgacuccaaggucgggggcaacuacaacuaccuguaccgccuguuccgcaagagcaaccucaagcccuucgagcgggacaucuccaccgagaucuaccaggccggcagcacccccugcaacgggguggagggcuucaacugcuacuucccccugcaguccuacggguuccagccgaccaacggcgugggguaccagcccuaccggguggucgugcugagcuucgagcuccugcacgcccccgccacggugugcggccccaagaaguccaccaaccuggucaagaacaagugcgugaacuucaacuucaacggccucaccgggaccggcgugcugaccgagagcaacaagaaguuccugccguuccagcaguucgggcgcgacaucgccgacacgaccgacgcgguccgcgacccccagacccuggagauccucgacaucacccccugcagcuucggcgggguguccgugaucacgccgggcaccaacaccagcaaccaggucgccgugcuguaccagggcgugaacugcaccgagguccccguggccauccacgccgaccagcugacgcccaccuggcggguguacuccaccgggagcaacgucuuccagacccgcgccggcugccucaucggggcggagcacgugaacaacuccuacgagugcgacauccccaucggcgccggcaucugcgccagcuaccagacgcagaccaacuccccgcggcgcgcccggagcguggcgucccagagcaucaucgccuacaccaugucccugggggccgagaacagcgucgccuacuccaacaacagcaucgccauccccaccaacuucacgaucuccgugaccaccgagauccugcccgugagcaugaccaagacgagcgucgacugcaccauguacaucugcggcgacuccaccgagugcagcaaccuccugcugcaguacggguccuucugcacccagcucaaccgcgcgcugacgggcaucgccguggagcaggacaagaacacccaggagguguucgcccaggucaagcagaucuacaagacgcccccgaucaaggacuucgggggcuucaacuucagccagauccugcccgaccccuccaagcccagcaagcgguccuucaucgaggaccuccuguucaacaaggugacccuggccgacgccggcuucaucaagcaguacggggacugccucggcgacaucgcggcccgcgaccugaucugcgcccagaaguucaacgggcugaccgugcucccgccccugcugaccgacgagaugaucgcccaguacaccagcgcccuccuggcgggcaccaucacguccggguggaccuucggcgccggcgccgcccugcagauccccuucgcgaugcagauggccuaccgguucaacgggaucggcgucacccagaacgugcucuacgagaaccagaagcugaucgccaaccaguucaacagcgccaucgggaagauccaggacucccugagcuccaccgccagcgcgcucggcaagcugcaggacguggucaaccagaacgcccaggcccugaacacgcucgugaagcagcuguccagcaacuucggggccaucuccagcgugcugaacgacauccucucccgccuggacccgcccgaggccgagguccagaucgaccggcugaucaccggccgccuccagagccugcagaccuacgugacccagcagcugauccgggcggccgagauccgcgccagcgccaaccucgccgcgaccaagauguccgagugcgugcugggccagagcaagcgggucgacuucugcgggaagggcuaccaccugauguccuucccccagagcgcgccccacggggugguguuccuccacgucacguacgugcccgcccaggagaagaacuucaccaccgccccggccaucugccacgacggcaaggcccacuucccccgcgagggggucuucguguccaacggcacccacugguucgugacgcagcggaacuucuacgagccccagaucaucaccaccgacaacaccuucgucagcggcaacugcgacguggugaucgggaucgucaacaacacgguguacgacccccugcagccggagcuggacuccuucaaggaggagcucgacaaguacuucaagaaccacaccagccccgacguggaccugggcgacaucuccgggaucaacgccagcgucgugaacauccagaaggagaucgaccgccugaacgagguggccaagaaccucaacgagucccugaucgaccugcaggagcucggcaaguacgagcaguacaucaaguggcccugguacaucuggcugggcuucaucgccgggcugaucgcgaucgucauggugaccaucaugcucugcugcaugaccagcugcugcuccugccugaagggcugcugcagcugcggguccugcugcaaguucgacgaggacgacagcgagccggugcugaagggcgucaagcuccacuacacgugaggacuaguuauaagacugacuagcccgaugggccucccaacgggcccuccuccccuccuugcaccgagauuaauagaucuaaaaaaaaaaaaaaaaaaaaaaaaaaaaaaaaaaaaaaaaaaaaaaaaaaaaaaaaaaaaaaaaaaaaaaaaaaaaaaaaaaaaaaaaaaaaaaaaaaaa

SEQ ID NO: 25737 - RNA, 4017 nt, Artificial Sequence
  SARS-CoV-2/Wuhan/WIV05/2019__EPI_ISL_402128 spike protein mRNA gc (1-1273)(K986P_V987P_A222V_D614G)
aggagaaagcuuaccauguucguguuccugguccuccugccccuggugagcucccagugcgugaaccucaccacccgcacgcagcugccgcccgccuacaccaacagcuucacccggggcgucuacuaccccgacaagguguuccgcuccagcgugcugcacuccacccaggaccucuuccugcccuucuucagcaacgucacgugguuccacgccauccacguguccgggaccaacggcaccaagcgguucgacaacccggugcugcccuucaacgacggggucuacuucgcgagcaccgagaaguccaacaucauccgcggcuggaucuucgggacgacccucgacagcaagacccagucccugcugaucgugaacaacgccaccaacguggucaucaaggugugcgaguuccaguucugcaacgaccccuuccucggcguguacuaccacaagaacaacaagagcuggauggaguccgaguuccgggucuacagcuccgccaacaacugcacguucgaguacgugagccagcccuuccugauggaccuggagggcaagcaggggaacuucaagaaccuccgcgaguucguguucaagaacaucgacggcuacuucaagaucuacuccaagcacaccccgaucaaccugguccgggaccugccccagggguucagcgugcucgagccccugguggaccugcccaucggcaucaacaucacccgcuuccagacccuccuggcccugcaccgguccuaccucacgccgggggacagcagcuccggcuggaccgccggcgcggccgccuacuacgucggguaccugcagccccgcaccuuccugcucaaguacaacgagaacggcaccaucacggacgccguggacugcgcgcuggacccccugagcgagaccaagugcacccucaaguccuucaccguggagaaggggaucuaccagacgagcaacuuccggguccagcccaccgaguccaucgugcgcuucccgaacaucaccaaccugugccccuucggcgaggucuucaacgccacccgguucgccagcguguacgccuggaaccgcaagcggaucuccaacugcguggccgacuacagcguccuguacaacuccgcgagcuucuccacguucaagugcuacggcgugagccccaccaagcucaacgaccugugcuucaccaacguguacgccgacuccuucgucauccgcggggacgaggugcggcagaucgcccccggccagaccgggaagaucgccgacuacaacuacaagcugccggacgacuucacgggcugcgugaucgccuggaacagcaacaaccucgacuccaaggucgggggcaacuacaacuaccuguaccgccuguuccgcaagagcaaccucaagcccuucgagcgggacaucuccaccgagaucuaccaggcgggcagcacccccugcaacgggguggagggcuucaacugcuacuucccccugcaguccuacggguuccagccgaccaacggcgugggguaccagcccuaccgggucguggugcugagcuucgagcuccugcacgcccccgccacggucugcggccccaagaaguccaccaaccuggugaagaacaagugcgugaacuucaacuucaacggccucaccgggaccggcguccugaccgagagcaacaagaaguuccugccguuccagcaguucgggcgcgacaucgccgacacgaccgacgccgugcgcgacccccagacccuggagauccucgacaucacccccugcagcuucggcgggguguccgucaucacgccgggcaccaacaccagcaaccagguggcggugcuguaccagggcgucaacugcaccgaggugcccguggccauccacgccgaccagcugacgcccaccuggcgggucuacuccaccgggagcaacguguuccagacccgcgccggcugccucaucggggccgagcacgugaacaacuccuacgagugcgacauccccaucggcgcgggcaucugcgccagcuaccagacgcagaccaacuccccgcggcgcgcccggagcgucgccucccagagcaucaucgcguacaccaugucccugggggccgagaacagcguggccuacuccaacaacagcaucgccauccccaccaacuucacgaucuccgugaccaccgagauccugcccgucagcaugaccaagacgagcguggacugcaccauguacaucugcggcgacuccaccgagugcagcaaccuccugcugcaguacggguccuucugcacccagcucaaccgcgcccugacgggcaucgcgguggagcaggacaagaacacccaggaggucuucgcccaggugaagcagaucuacaagacgcccccgaucaaggacuucgggggcuucaacuucagccagauccugcccgaccccuccaagcccagcaagcgguccuucaucgaggaccuccuguucaacaaggugacccuggccgacgccggcuucaucaagcaguacggggacugccucggcgacaucgccgcgcgcgaccugaucugcgcccagaaguucaacgggcugaccguccucccgccccugcugaccgacgagaugaucgcccaguacaccagcgcccuccuggccggcaccaucacguccggguggaccuucggcgcgggcgccgcccugcagauccccuucgccaugcagauggcguaccgguucaacgggaucggcgugacccagaacgugcucuacgagaaccagaagcugaucgccaaccaguucaacagcgccaucgggaagauccaggacucccugagcuccaccgccagcgcccucggcaagcugcaggacgucgugaaccagaacgcgcaggcccugaacacgcucgugaagcagcuguccagcaacuucggggccaucuccagcguccugaacgacauccucucccgccuggacccgcccgaggccgaggugcagaucgaccggcugaucaccggccgccuccagagccugcagaccuacgugacccagcagcugauccgggccgcggagauccgcgccagcgccaaccucgccgccaccaagauguccgagugcguccugggccagagcaagcggguggacuucugcgggaagggcuaccaccugauguccuucccccagagcgcgccccacgggguggucuuccuccacgugacguacguccccgcccaggagaagaacuucaccaccgccccggccaucugccacgacggcaaggcgcacuucccccgcgaggggguguucguguccaacggcacccacugguucgucacgcagcggaacuucuacgagccccagaucaucaccaccgacaacaccuucgugagcggcaacugcgacguggucaucgggaucgugaacaacacgguguacgacccccugcagccggagcuggacuccuucaaggaggagcucgacaaguacuucaagaaccacaccagccccgacgucgaccugggcgacaucuccgggaucaacgccagcguggugaacauccagaaggagaucgaccgccugaacgaggucgccaagaaccucaacgagucccugaucgaccugcaggagcucggcaaguacgagcaguacaucaaguggcccugguacaucuggcugggcuucaucgccgggcugaucgccaucgugauggugaccaucaugcucugcugcaugaccagcugcugcuccugccugaagggcugcugcagcugcggguccugcugcaaguucgacgaggacgacagcgagccgguccugaagggcgugaagcuccacuacacgugaggacuaguuauaagacugacuagcccgaugggccucccaacgggcccuccuccccuccuugcaccgagauuaauagaucuaaaaaaaaaaaaaaaaaaaaaaaaaaaaaaaaaaaaaaaaaaaaaaaaaaaaaaaaaaaaaaaaaaaaaaaaaaaaaaaaaaaaaaaaaaaaaaaaaaaa

SEQ ID NO: 25738 - RNA, 4017 nt, Artificial Sequence
  SARS-CoV-2/Wuhan/WIV05/2019__EPI_ISL_402128 spike protein mRNA gc (1-1273)(K986P_V987P_N439K_D614G)
aggagaaagcuuaccauguucguguuccugguccuccugccccuggugagcucccagugcgugaaccucaccacccgcacgcagcugccgcccgccuacaccaacagcuucacccggggcgucuacuaccccgacaagguguuccgcuccagcgugcugcacuccacccaggaccucuuccugcccuucuucagcaacgucacgugguuccacgccauccacguguccgggaccaacggcaccaagcgguucgacaacccggugcugcccuucaacgacggggucuacuucgcgagcaccgagaaguccaacaucauccgcggcuggaucuucgggacgacccucgacagcaagacccagucccugcugaucgugaacaacgccaccaacguggucaucaaggugugcgaguuccaguucugcaacgaccccuuccucggcguguacuaccacaagaacaacaagagcuggauggaguccgaguuccgggucuacagcuccgccaacaacugcacguucgaguacgugagccagcccuuccugauggaccuggagggcaagcaggggaacuucaagaaccuccgcgaguucguguucaagaacaucgacggcuacuucaagaucuacuccaagcacaccccgaucaaccugguccgggaccugccccagggguucagcgcccucgagccccugguggaccugcccaucggcaucaacaucacccgcuuccagacccuccuggcccugcaccgguccuaccucacgccgggggacagcagcuccggcuggaccgcgggcgccgccgccuacuacgugggguaccugcagccccgcaccuuccugcucaaguacaacgagaacggcaccaucacggacgcggucgacugcgcccuggacccccugagcgagaccaagugcacccucaaguccuucaccguggagaaggggaucuaccagacgagcaacuuccgggugcagcccaccgaguccaucguccgcuucccgaacaucaccaaccugugccccuucggcgagguguucaacgccacccgguucgccagcgucuacgccuggaaccgcaagcggaucuccaacugcguggcggacuacagcgugcuguacaacuccgccagcuucuccacguucaagugcuacggcgucagccccaccaagcucaacgaccugugcuucaccaacguguacgccgacuccuucgugauccgcggggacgagguccggcagaucgcccccggccagaccgggaagaucgccgacuacaacuacaagcugccggacgacuucacgggcugcgugaucgcguggaacagcaagaaccucgacuccaaggucgggggcaacuacaacuaccuguaccgccuguuccgcaagagcaaccucaagcccuucgagcgggacaucuccaccgagaucuaccaggccggcagcacccccugcaacgggguggagggcuucaacugcuacuucccccugcaguccuacggguuccagccgaccaacggcgugggguaccagcccuaccggguggucgugcugagcuucgagcuccugcacgcccccgccacggugugcggccccaagaaguccaccaaccuggucaagaacaagugcgugaacuucaacuucaacggccucaccgggaccggcgugcugaccgagagcaacaagaaguuccugccguuccagcaguucgggcgcgacaucgccgacacgaccgacgcgguccgcgacccccagacccuggagauccucgacaucacccccugcagcuucggcgggguguccgugaucacgccgggcaccaacaccagcaaccaggucgccgugcuguaccagggcgugaacugcaccgagguccccguggccauccacgccgaccagcugacgcccaccuggcggguguacuccaccgggagcaacgucuuccagacccgcgccggcugccucaucggggcggagcacgugaacaacuccuacgagugcgacauccccaucggcgccggcaucugcgccagcuaccagacgcagaccaacuccccgcggcgcgcccggagcguggcgucccagagcaucaucgccuacaccaugucccugggggccgagaacagcgucgccuacuccaacaacagcaucgccauccccaccaacuucacgaucuccgugaccaccgagauccugcccgugagcaugaccaagacgagcgucgacugcaccauguacaucugcggcgacuccaccgagugcagcaaccuccugcugcaguacggguccuucugcacccagcucaaccgcgcgcugacgggcaucgccguggagcaggacaagaacacccaggagguguucgcccaggucaagcagaucuacaagacgcccccgaucaaggacuucgggggcuucaacuucagccagauccugcccgaccccuccaagcccagcaagcgguccuucaucgaggaccuccuguucaacaaggugacccuggccgacgccggcuucaucaagcaguacggggacugccucggcgacaucgcggcccgcgaccugaucugcgcccagaaguucaacgggcugaccgugcucccgccccugcugaccgacgagaugaucgcccaguacaccagcgcccuccuggcgggcaccaucacguccggguggaccuucggcgccggcgccgcccugcagauccccuucgcgaugcagauggccuaccgguucaacgggaucggcgucacccagaacgugcucuacgagaaccagaagcugaucgccaaccaguucaacagcgccaucgggaagauccaggacucccugagcuccaccgccagcgcgcucggcaagcugcaggacguggucaaccagaacgcccaggcccugaacacgcucgugaagcagcuguccagcaacuucggggccaucuccagcgugcugaacgacauccucucccgccuggacccgcccgaggccgagguccagaucgaccggcugaucaccggccgccuccagagccugcagaccuacgugacccagcagcugauccgggcggccgagauccgcgccagcgccaaccucgccgcgaccaagauguccgagugcgugcugggccagagcaagcgggucgacuucugcgggaagggcuaccaccugauguccuucccccagagcgcgccccacggggugguguuccuccacgucacguacgugcccgcccaggagaagaacuucaccaccgccccggccaucugccacgacggcaaggcccacuucccccgcgagggggucuucguguccaacggcacccacugguucgugacgcagcggaacuucuacgagccccagaucaucaccaccgacaacaccuucgucagcggcaacugcgacguggugaucgggaucgucaacaacacgguguacgacccccugcagccggagcuggacuccuucaaggaggagcucgacaaguacuucaagaaccacaccagccccgacguggaccugggcgacaucuccgggaucaacgccagcgucgugaacauccagaaggagaucgaccgccugaacgagguggccaagaaccucaacgagucccugaucgaccugcaggagcucggcaaguacgagcaguacaucaaguggcccugguacaucuggcugggcuucaucgccgggcugaucgcgaucgucauggugaccaucaugcucugcugcaugaccagcugcugcuccugccugaagggcugcugcagcugcggguccugcugcaaguucgacgaggacgacagcgagccggugcugaagggcgucaagcuccacuacacgugaggacuaguuauaagacugacuagcccgaugggccucccaacgggcccuccuccccuccuugcaccgagauuaauagaucuaaaaaaaaaaaaaaaaaaaaaaaaaaaaaaaaaaaaaaaaaaaaaaaaaaaaaaaaaaaaaaaaaaaaaaaaaaaaaaaaaaaaaaaaaaaaaaaaaaaa

SEQ ID NO: 25739 - RNA, 4017 nt, Artificial Sequence
  SARS-CoV-2/Wuhan/WIV05/2019__EPI_ISL_402128 spike protein mRNA gc (1-1273)(K986P_V987P_S477N_D614G)
aggagaaagcuuaccauguucguguuccugguccuccugccccuggugagcucccagugcgugaaccucaccacccgcacgcagcugccgcccgccuacaccaacagcuucacccggggcgucuacuaccccgacaagguguuccgcuccagcgugcugcacuccacccaggaccucuuccugcccuucuucagcaacgucacgugguuccacgccauccacguguccgggaccaacggcaccaagcgguucgacaacccggugcugcccuucaacgacggggucuacuucgcgagcaccgagaaguccaacaucauccgcggcuggaucuucgggacgacccucgacagcaagacccagucccugcugaucgugaacaacgccaccaacguggucaucaaggugugcgaguuccaguucugcaacgaccccuuccucggcguguacuaccacaagaacaacaagagcuggauggaguccgaguuccgggucuacagcuccgccaacaacugcacguucgaguacgugagccagcccuuccugauggaccuggagggcaagcaggggaacuucaagaaccuccgcgaguucguguucaagaacaucgacggcuacuucaagaucuacuccaagcacaccccgaucaaccugguccgggaccugccccagggguucagcgcccucgagccccugguggaccugcccaucggcaucaacaucacccgcuuccagacccuccuggcccugcaccgguccuaccucacgccgggggacagcagcuccggcuggaccgcgggcgccgccgccuacuacgugggguaccugcagccccgcaccuuccugcucaaguacaacgagaacggcaccaucacggacgcggucgacugcgcccuggacccccugagcgagaccaagugcacccucaaguccuucaccguggagaaggggaucuaccagacgagcaacuuccgggugcagcccaccgaguccaucguccgcuucccgaacaucaccaaccugugccccuucggcgagguguucaacgccacccgguucgccagcgucuacgccuggaaccgcaagcggaucuccaacugcguggcggacuacagcgugcuguacaacuccgccagcuucuccacguucaagugcuacggcgucagccccaccaagcucaacgaccugugcuucaccaacguguacgccgacuccuucgugauccgcggggacgagguccggcagaucgcccccggccagaccgggaagaucgccgacuacaacuacaagcugccggacgacuucacgggcugcgugaucgcguggaacagcaacaaccucgacuccaaggucgggggcaacuacaacuaccuguaccgccuguuccgcaagagcaaccucaagcccuucgagcgggacaucuccaccgagaucuaccaggccggcaacacccccugcaacgggguggagggcuucaacugcuacuucccccugcagagcuacggguuccagccgaccaacggcgugggguaccagcccuaccggguggucgugcuguccuucgagcuccugcacgcccccgccacggugugcggccccaagaaguccaccaaccuggucaagaacaagugcgugaacuucaacuucaacggccucaccgggaccggcgugcugaccgagagcaacaagaaguuccugccguuccagcaguucgggcgcgacaucgccgacacgaccgacgcgguccgcgacccccagacccuggagauccucgacaucacccccugcagcuucggcggggugagcgugaucacgccgggcaccaacaccuccaaccaggucgccgugcuguaccagggcgugaacugcaccgagguccccguggccauccacgccgaccagcugacgcccaccuggcggguguacagcaccggguccaacgucuuccagacccgcgccggcugccucaucggggcggagcacgugaacaacagcuacgagugcgacauccccaucggcgccggcaucugcgccuccuaccagacgcagaccaacagcccgcggcgcgcccgguccguggcgagccaguccaucaucgccuacaccaugagccugggggccgagaacuccgucgccuacagcaacaacuccaucgccauccccaccaacuucacgaucagcgugaccaccgagauccugcccguguccaugaccaagacgagcgucgacugcaccauguacaucugcggcgacagcaccgagugcuccaaccuccugcugcaguacgggagcuucugcacccagcucaaccgcgcgcugacgggcaucgccguggagcaggacaagaacacccaggagguguucgcccaggucaagcagaucuacaagacgcccccgaucaaggacuucgggggcuucaacuucucccagauccugcccgaccccagcaagcccuccaagcggagcuucaucgaggaccuccuguucaacaaggugacccuggccgacgccggcuucaucaagcaguacggggacugccucggcgacaucgcggcccgcgaccugaucugcgcccagaaguucaacgggcugaccgugcucccgccccugcugaccgacgagaugaucgcccaguacaccuccgcccuccuggcgggcaccaucacgagcggguggaccuucggcgccggcgccgcccugcagauccccuucgcgaugcagauggccuaccgguucaacgggaucggcgucacccagaacgugcucuacgagaaccagaagcugaucgccaaccaguucaacuccgccaucgggaagauccaggacagccuguccagcaccgccuccgcgcucggcaagcugcaggacguggucaaccagaacgcccaggcccugaacacgcucgugaagcagcugagcuccaacuucggggccaucagcuccgugcugaacgacauccucagccgccuggacccgcccgaggccgagguccagaucgaccggcugaucaccggccgccuccagucccugcagaccuacgugacccagcagcugauccgggcggccgagauccgcgccagcgccaaccucgccgcgaccaagaugagcgagugcgugcugggccaguccaagcgggucgacuucugcgggaagggcuaccaccugaugagcuucccccaguccgcgccccacggggugguguuccuccacgucacguacgugcccgcccaggagaagaacuucaccaccgccccggccaucugccacgacggcaaggcccacuucccccgcgagggggucuucgugagcaacggcacccacugguucgugacgcagcggaacuucuacgagccccagaucaucaccaccgacaacaccuucgucuccggcaacugcgacguggugaucgggaucgucaacaacacgguguacgacccccugcagccggagcuggacagcuucaaggaggagcucgacaaguacuucaagaaccacaccucccccgacguggaccugggcgacaucagcgggaucaacgccuccgucgugaacauccagaaggagaucgaccgccugaacgagguggccaagaaccucaacgagagccugaucgaccugcaggagcucggcaaguacgagcaguacaucaaguggcccugguacaucuggcugggcuucaucgccgggcugaucgcgaucgucauggugaccaucaugcucugcugcaugaccuccugcugcagcugccugaagggcugcugcuccugcgggagcugcugcaaguucgacgaggacgacuccgagccggugcugaagggcgucaagcuccacuacacgugaggacuaguuauaagacugacuagcccgaugggccucccaacgggcccuccuccccuccuugcaccgagauuaauagaucuaaaaaaaaaaaaaaaaaaaaaaaaaaaaaaaaaaaaaaaaaaaaaaaaaaaaaaaaaaaaaaaaaaaaaaaaaaaaaaaaaaaaaaaaaaaaaaaaaaaa

SEQ ID NO: 25740 - RNA, 4017 nt, Artificial Sequence
  SARS-CoV-2/Wuhan/WIV05/2019__EPI_ISL_402128 spike protein mRNA gc (1-1273)(K986P_V987P_N501Y_D614G)
aggagaaagcuuaccauguucguguuccugguccuccugccccuggugagcucccagugcgugaaccucaccacccgcacgcagcugccgcccgccuacaccaacagcuucacccggggcgucuacuaccccgacaagguguuccgcuccagcgugcugcacuccacccaggaccucuuccugcccuucuucagcaacgucacgugguuccacgccauccacguguccgggaccaacggcaccaagcgguucgacaacccggugcugcccuucaacgacggggucuacuucgcgagcaccgagaaguccaacaucauccgcggcuggaucuucgggacgacccucgacagcaagacccagucccugcugaucgugaacaacgccaccaacguggucaucaaggugugcgaguuccaguucugcaacgaccccuuccucggcguguacuaccacaagaacaacaagagcuggauggaguccgaguuccgggucuacagcuccgccaacaacugcacguucgaguacgugagccagcccuuccugauggaccuggagggcaagcaggggaacuucaagaaccuccgcgaguucguguucaagaacaucgacggcuacuucaagaucuacuccaagcacaccccgaucaaccugguccgggaccugccccagggguucagcgcccucgagccccugguggaccugcccaucggcaucaacaucacccgcuuccagacccuccuggcccugcaccgguccuaccucacgccgggggacagcagcuccggcuggaccgcgggcgccgccgccuacuacgugggguaccugcagccccgcaccuuccugcucaaguacaacgagaacggcaccaucacggacgcggucgacugcgcccuggacccccugagcgagaccaagugcacccucaaguccuucaccguggagaaggggaucuaccagacgagcaacuuccgggugcagcccaccgaguccaucguccgcuucccgaacaucaccaaccugugccccuucggcgagguguucaacgccacccgguucgccagcgucuacgccuggaaccgcaagcggaucuccaacugcguggcggacuacagcgugcuguacaacuccgccagcuucuccacguucaagugcuacggcgucagccccaccaagcucaacgaccugugcuucaccaacguguacgccgacuccuucgugauccgcggggacgagguccggcagaucgcccccggccagaccgggaagaucgccgacuacaacuacaagcugccggacgacuucacgggcugcgugaucgcguggaacagcaacaaccucgacuccaaggucgggggcaacuacaacuaccuguaccgccuguuccgcaagagcaaccucaagcccuucgagcgggacaucuccaccgagaucuaccaggccggcagcacccccugcaacgggguggagggcuucaacugcuacuucccccugcaguccuacggguuccagccgaccuacggcgugggguaccagcccuaccggguggucgugcugagcuucgagcuccugcacgcccccgccacggugugcggccccaagaaguccaccaaccuggucaagaacaagugcgugaacuucaacuucaacggccucaccgggaccggcgugcugaccgagagcaacaagaaguuccugccguuccagcaguucgggcgcgacaucgccgacacgaccgacgcgguccgcgacccccagacccuggagauccucgacaucacccccugcagcuucggcgggguguccgugaucacgccgggcaccaacaccagcaaccaggucgccgugcuguaccagggcgugaacugcaccgagguccccguggccauccacgccgaccagcugacgcccaccuggcggguguacuccaccgggagcaacgucuuccagacccgcgccggcugccucaucggggcggagcacgugaacaacuccuacgagugcgacauccccaucggcgccggcaucugcgccagcuaccagacgcagaccaacuccccgcggcgcgcccggagcguggcgucccagagcaucaucgccuacaccaugucccugggggccgagaacagcgucgccuacuccaacaacagcaucgccauccccaccaacuucacgaucuccgugaccaccgagauccugcccgugagcaugaccaagacgagcgucgacugcaccauguacaucugcggcgacuccaccgagugcagcaaccuccugcugcaguacggguccuucugcacccagcucaaccgcgcgcugacgggcaucgccguggagcaggacaagaacacccaggagguguucgcccaggucaagcagaucuacaagacgcccccgaucaaggacuucgggggcuucaacuucagccagauccugcccgaccccuccaagcccagcaagcgguccuucaucgaggaccuccuguucaacaaggugacccuggccgacgccggcuucaucaagcaguacggggacugccucggcgacaucgcggcccgcgaccugaucugcgcccagaaguucaacgggcugaccgugcucccgccccugcugaccgacgagaugaucgcccaguacaccagcgcccuccuggcgggcaccaucacguccggguggaccuucggcgccggcgccgcccugcagauccccuucgcgaugcagauggccuaccgguucaacgggaucggcgucacccagaacgugcucuacgagaaccagaagcugaucgccaaccaguucaacagcgccaucgggaagauccaggacucccugagcuccaccgccagcgcgcucggcaagcugcaggacguggucaaccagaacgcccaggcccugaacacgcucgugaagcagcuguccagcaacuucggggccaucuccagcgugcugaacgacauccucucccgccuggacccgcccgaggccgagguccagaucgaccggcugaucaccggccgccuccagagccugcagaccuacgugacccagcagcugauccgggcggccgagauccgcgccagcgccaaccucgccgcgaccaagauguccgagugcgugcugggccagagcaagcgggucgacuucugcgggaagggcuaccaccugauguccuucccccagagcgcgccccacggggugguguuccuccacgucacguacgugcccgcccaggagaagaacuucaccaccgccccggccaucugccacgacggcaaggcccacuucccccgcgagggggucuucguguccaacggcacccacugguucgugacgcagcggaacuucuacgagccccagaucaucaccaccgacaacaccuucgucagcggcaacugcgacguggugaucgggaucgucaacaacacgguguacgacccccugcagccggagcuggacuccuucaaggaggagcucgacaaguacuucaagaaccacaccagccccgacguggaccugggcgacaucuccgggaucaacgccagcgucgugaacauccagaaggagaucgaccgccugaacgagguggccaagaaccucaacgagucccugaucgaccugcaggagcucggcaaguacgagcaguacaucaaguggcccugguacaucuggcugggcuucaucgccgggcugaucgcgaucgucauggugaccaucaugcucugcugcaugaccagcugcugcuccugccugaagggcugcugcagcugcggguccugcugcaaguucgacgaggacgacagcgagccggugcugaagggcgucaagcuccacuacacgugaggacuaguuauaagacugacuagcccgaugggccucccaacgggcccuccuccccuccuugcaccgagauuaauagaucuaaaaaaaaaaaaaaaaaaaaaaaaaaaaaaaaaaaaaaaaaaaaaaaaaaaaaaaaaaaaaaaaaaaaaaaaaaaaaaaaaaaaaaaaaaaaaaaaaaaa

SEQ ID NO: 25741 - RNA, 4011 nt, Artificial Sequence
  SARS-CoV-2/Wuhan/WIV05/2019__EPI_ISL_402128 spike protein mRNA gc (1-1273)(K986P_V987P_H69del_V70del_D614G)
aggagaaagcuuaccauguucguguuccugguccuccugccccuggugagcucccagugcgugaaccucaccacccgcacgcagcugccgcccgccuacaccaacagcuucacccggggcgucuacuaccccgacaagguguuccgcuccagcgugcugcacuccacccaggaccucuuccugcccuucuucagcaacgucacgugguuccacgccaucuccgggaccaacggcaccaagcgguucgacaacccggugcugcccuucaacgacgggguguacuucgcgagcaccgagaaguccaacaucauccgcggcuggaucuucgggacgacccucgacagcaagacccagucccugcugaucgucaacaacgccaccaacguggugaucaaggucugcgaguuccaguucugcaacgaccccuuccucggcguguacuaccacaagaacaacaagagcuggauggaguccgaguuccggguguacagcuccgccaacaacugcacguucgaguacgucagccagcccuuccugauggaccuggagggcaagcaggggaacuucaagaaccuccgcgaguucguguucaagaacaucgacggcuacuucaagaucuacuccaagcacaccccgaucaaccuggugcgggaccugccccagggguucagcgcccucgagccccuggucgaccugcccaucggcaucaacaucacccgcuuccagacccuccuggcccugcaccgguccuaccucacgccgggggacagcagcuccggcuggaccgcgggcgccgccgccuacuacgugggguaccugcagccccgcaccuuccugcucaaguacaacgagaacggcaccaucacggacgcgguggacugcgcccuggacccccugagcgagaccaagugcacccucaaguccuucaccgucgagaaggggaucuaccagacgagcaacuuccgggugcagcccaccgaguccaucgugcgcuucccgaacaucaccaaccugugccccuucggcgaggucuucaacgccacccgguucgccagcguguacgccuggaaccgcaagcggaucuccaacugcgucgcggacuacagcgugcuguacaacuccgccagcuucuccacguucaagugcuacggcgugagccccaccaagcucaacgaccugugcuucaccaacgucuacgccgacuccuucgugauccgcggggacgaggugcggcagaucgcccccggccagaccgggaagaucgccgacuacaacuacaagcugccggacgacuucacgggcugcgucaucgcguggaacagcaacaaccucgacuccaaggucgggggcaacuacaacuaccuguaccgccuguuccgcaagagcaaccucaagcccuucgagcgggacaucuccaccgagaucuaccaggccggcagcacccccugcaacgggguggagggcuucaacugcuacuucccccugcaguccuacggguuccagccgaccaacggcgugggguaccagcccuaccggguggugguccugagcuucgagcuccugcacgcccccgccacggugugcggccccaagaaguccaccaaccuggugaagaacaagugcgucaacuucaacuucaacggccucaccgggaccggcgugcugaccgagagcaacaagaaguuccugccguuccagcaguucgggcgcgacaucgccgacacgaccgacgcggugcgcgacccccagacccuggagauccucgacaucacccccugcagcuucggcggggucuccgugaucacgccgggcaccaacaccagcaaccagguggccguccuguaccagggcgugaacugcaccgaggugcccgucgccauccacgccgaccagcugacgcccaccuggcggguguacuccaccgggagcaacguguuccagacccgcgccggcugccucaucggggcggagcacgucaacaacuccuacgagugcgacauccccaucggcgccggcaucugcgccagcuaccagacgcagaccaacuccccgcggcgcgcccggagcguggcgucccagagcaucaucgccuacaccaugucccugggggccgagaacagcguggccuacuccaacaacagcaucgccauccccaccaacuucacgaucuccgucaccaccgagauccugcccgugagcaugaccaagacgagcguggacugcaccauguacaucugcggcgacuccaccgagugcagcaaccuccugcugcaguacggguccuucugcacccagcucaaccgcgcgcugacgggcaucgccgucgagcaggacaagaacacccaggagguguucgcccaggugaagcagaucuacaagacgcccccgaucaaggacuucgggggcuucaacuucagccagauccugcccgaccccuccaagcccagcaagcgguccuucaucgaggaccuccuguucaacaaggucacccuggccgacgccggcuucaucaagcaguacggggacugccucggcgacaucgcggcccgcgaccugaucugcgcccagaaguucaacgggcugaccgugcucccgccccugcugaccgacgagaugaucgcccaguacaccagcgcccuccuggcgggcaccaucacguccggguggaccuucggcgccggcgccgcccugcagauccccuucgcgaugcagauggccuaccgguucaacgggaucggcgugacccagaacguccucuacgagaaccagaagcugaucgccaaccaguucaacagcgccaucgggaagauccaggacucccugagcuccaccgccagcgcgcucggcaagcugcaggacguggugaaccagaacgcccaggcccugaacacgcucgucaagcagcuguccagcaacuucggggccaucuccagcgugcugaacgacauccucucccgccuggacccgcccgaggccgaggugcagaucgaccggcugaucaccggccgccuccagagccugcagaccuacgucacccagcagcugauccgggcggccgagauccgcgccagcgccaaccucgccgcgaccaagauguccgagugcgugcugggccagagcaagcggguggacuucugcgggaagggcuaccaccugauguccuucccccagagcgcgccccacggggucguguuccuccacgugacguacguccccgcccaggagaagaacuucaccaccgccccggccaucugccacgacggcaaggcccacuucccccgcgaggggguguucgucuccaacggcacccacugguucgugacgcagcggaacuucuacgagccccagaucaucaccaccgacaacaccuucgugagcggcaacugcgacgucgugaucgggaucgugaacaacacggucuacgacccccugcagccggagcuggacuccuucaaggaggagcucgacaaguacuucaagaaccacaccagccccgacguggaccugggcgacaucuccgggaucaacgccagcguggucaacauccagaaggagaucgaccgccugaacgagguggccaagaaccucaacgagucccugaucgaccugcaggagcucggcaaguacgagcaguacaucaaguggcccugguacaucuggcugggcuucaucgccgggcugaucgcgaucgugauggucaccaucaugcucugcugcaugaccagcugcugcuccugccugaagggcugcugcagcugcggguccugcugcaaguucgacgaggacgacagcgagccggugcugaagggcgugaagcuccacuacacgugaggacuaguuauaagacugacuagcccgaugggccucccaacgggcccuccuccccuccuugcaccgagauuaauagaucuaaaaaaaaaaaaaaaaaaaaaaaaaaaaaaaaaaaaaaaaaaaaaaaaaaaaaaaaaaaaaaaaaaaaaaaaaaaaaaaaaaaaaaaaaaaaaaaaaaaa

SEQ ID NO: 25742 - RNA, 4017 nt, Artificial Sequence
  SARS-CoV-2/Wuhan/WIV05/2019__EPI_ISL_402128 spike protein mRNA gc (1-1273)(K986P_V987P_Y453F_D614G)
aggagaaagcuuaccauguucguguuccugguccuccugccccuggugagcucccagugcgugaaccucaccacccgcacgcagcugccgcccgccuacaccaacagcuucacccggggcgucuacuaccccgacaagguguuccgcuccagcgugcugcacuccacccaggaccucuuccugcccuucuucagcaacgucacgugguuccacgccauccacguguccgggaccaacggcaccaagcgguucgacaacccggugcugcccuucaacgacggggucuacuucgcgagcaccgagaaguccaacaucauccgcggcuggaucuucgggacgacccucgacagcaagacccagucccugcugaucgugaacaacgccaccaacguggucaucaaggugugcgaguuccaguucugcaacgaccccuuccucggcguguacuaccacaagaacaacaagagcuggauggaguccgaguuccgggucuacagcuccgccaacaacugcacguucgaguacgugagccagcccuuccugauggaccuggagggcaagcaggggaacuucaagaaccuccgcgaguucguguucaagaacaucgacggcuacuucaagaucuacuccaagcacaccccgaucaaccugguccgggaccugccccagggguucagcgcccucgagccccugguggaccugcccaucggcaucaacaucacccgcuuccagacccuccuggcccugcaccgguccuaccucacgccgggggacagcagcuccggcuggaccgcgggcgccgccgccuacuacgugggguaccugcagccccgcaccuuccugcucaaguacaacgagaacggcaccaucacggacgcggucgacugcgcccuggacccccugagcgagaccaagugcacccucaaguccuucaccguggagaaggggaucuaccagacgagcaacuuccgggugcagcccaccgaguccaucguccgcuucccgaacaucaccaaccugugccccuucggcgagguguucaacgccacccgguucgccagcgucuacgccuggaaccgcaagcggaucuccaacugcguggcggacuacagcgugcuguacaacuccgccagcuucuccacguucaagugcuacggcgucagccccaccaagcucaacgaccugugcuucaccaacguguacgccgacuccuucgugauccgcggggacgagguccggcagaucgcccccggccagaccgggaagaucgccgacuacaacuacaagcugccggacgacuucacgggcugcgugaucgcguggaacagcaacaaccucgacuccaaggucgggggcaacuacaacuaccuguuccgccuguuccgcaagagcaaccucaagcccuucgagcgggacaucuccaccgagaucuaccaggccggcagcacccccugcaacgggguggagggcuucaacugcuacuucccccugcaguccuacggguuccagccgaccaacggcgugggguaccagcccuaccggguggucgugcugagcuucgagcuccugcacgcccccgccacggugugcggccccaagaaguccaccaaccuggucaagaacaagugcgugaacuucaacuucaacggccucaccgggaccggcgugcugaccgagagcaacaagaaguuccugccguuccagcaguucgggcgcgacaucgccgacacgaccgacgcgguccgcgacccccagacccuggagauccucgacaucacccccugcagcuucggcgggguguccgugaucacgccgggcaccaacaccagcaaccaggucgccgugcuguaccagggcgugaacugcaccgagguccccguggccauccacgccgaccagcugacgcccaccuggcggguguacuccaccgggagcaacgucuuccagacccgcgccggcugccucaucggggcggagcacgugaacaacuccuacgagugcgacauccccaucggcgccggcaucugcgccagcuaccagacgcagaccaacuccccgcggcgcgcccggagcguggcgucccagagcaucaucgccuacaccaugucccugggggccgagaacagcgucgccuacuccaacaacagcaucgccauccccaccaacuucacgaucuccgugaccaccgagauccugcccgugagcaugaccaagacgagcgucgacugcaccauguacaucugcggcgacuccaccgagugcagcaaccuccugcugcaguacggguccuucugcacccagcucaaccgcgcgcugacgggcaucgccguggagcaggacaagaacacccaggagguguucgcccaggucaagcagaucuacaagacgcccccgaucaaggacuucgggggcuucaacuucagccagauccugcccgaccccuccaagcccagcaagcgguccuucaucgaggaccuccuguucaacaaggugacccuggccgacgccggcuucaucaagcaguacggggacugccucggcgacaucgcggcccgcgaccugaucugcgcccagaaguucaacgggcugaccgugcucccgccccugcugaccgacgagaugaucgcccaguacaccagcgcccuccuggcgggcaccaucacguccggguggaccuucggcgccggcgccgcccugcagauccccuucgcgaugcagauggccuaccgguucaacgggaucggcgucacccagaacgugcucuacgagaaccagaagcugaucgccaaccaguucaacagcgccaucgggaagauccaggacucccugagcuccaccgccagcgcgcucggcaagcugcaggacguggucaaccagaacgcccaggcccugaacacgcucgugaagcagcuguccagcaacuucggggccaucuccagcgugcugaacgacauccucucccgccuggacccgcccgaggccgagguccagaucgaccggcugaucaccggccgccuccagagccugcagaccuacgugacccagcagcugauccgggcggccgagauccgcgccagcgccaaccucgccgcgaccaagauguccgagugcgugcugggccagagcaagcgggucgacuucugcgggaagggcuaccaccugauguccuucccccagagcgcgccccacggggugguguuccuccacgucacguacgugcccgcccaggagaagaacuucaccaccgccccggccaucugccacgacggcaaggcccacuucccccgcgagggggucuucguguccaacggcacccacugguucgugacgcagcggaacuucuacgagccccagaucaucaccaccgacaacaccuucgucagcggcaacugcgacguggugaucgggaucgucaacaacacgguguacgacccccugcagccggagcuggacuccuucaaggaggagcucgacaaguacuucaagaaccacaccagccccgacguggaccugggcgacaucuccgggaucaacgccagcgucgugaacauccagaaggagaucgaccgccugaacgagguggccaagaaccucaacgagucccugaucgaccugcaggagcucggcaaguacgagcaguacaucaaguggcccugguacaucuggcugggcuucaucgccgggcugaucgcgaucgucauggugaccaucaugcucugcugcaugaccagcugcugcuccugccugaagggcugcugcagcugcggguccugcugcaaguucgacgaggacgacagcgagccggugcugaagggcgucaagcuccacuacacgugaggacuaguuauaagacugacuagcccgaugggccucccaacgggcccuccuccccuccuugcaccgagauuaauagaucuaaaaaaaaaaaaaaaaaaaaaaaaaaaaaaaaaaaaaaaaaaaaaaaaaaaaaaaaaaaaaaaaaaaaaaaaaaaaaaaaaaaaaaaaaaaaaaaaaaaa

SEQ ID NO: 25743 - RNA, 4017 nt, Artificial Sequence
  SARS-CoV-2/Wuhan/WIV05/2019__EPI_ISL_402128 spike protein mRNA gc (1-1273)(K986P_V987P_D614G_I692V)
aggagaaagcuuaccauguucguguuccugguccuccugccccuggugagcucccagugcgugaaccucaccacccgcacgcagcugccgcccgccuacaccaacagcuucacccggggcgucuacuaccccgacaagguguuccgcuccagcgugcugcacuccacccaggaccucuuccugcccuucuucagcaacgucacgugguuccacgccauccacguguccgggaccaacggcaccaagcgguucgacaacccggugcugcccuucaacgacggggucuacuucgcgagcaccgagaaguccaacaucauccgcggcuggaucuucgggacgacccucgacagcaagacccagucccugcugaucgugaacaacgccaccaacguggucaucaaggugugcgaguuccaguucugcaacgaccccuuccucggcguguacuaccacaagaacaacaagagcuggauggaguccgaguuccgggucuacagcuccgccaacaacugcacguucgaguacgugagccagcccuuccugauggaccuggagggcaagcaggggaacuucaagaaccuccgcgaguucguguucaagaacaucgacggcuacuucaagaucuacuccaagcacaccccgaucaaccugguccgggaccugccccagggguucagcgcccucgagccccugguggaccugcccaucggcaucaacaucacccgcuuccagacccuccuggcccugcaccgguccuaccucacgccgggggacagcagcuccggcuggaccgcgggcgccgccgccuacuacgugggguaccugcagccccgcaccuuccugcucaaguacaacgagaacggcaccaucacggacgcggucgacugcgcccuggacccccugagcgagaccaagugcacccucaaguccuucaccguggagaaggggaucuaccagacgagcaacuuccgggugcagcccaccgaguccaucguccgcuucccgaacaucaccaaccugugccccuucggcgagguguucaacgccacccgguucgccagcgucuacgccuggaaccgcaagcggaucuccaacugcguggcggacuacagcgugcuguacaacuccgccagcuucuccacguucaagugcuacggcgucagccccaccaagcucaacgaccugugcuucaccaacguguacgccgacuccuucgugauccgcggggacgagguccggcagaucgcccccggccagaccgggaagaucgccgacuacaacuacaagcugccggacgacuucacgggcugcgugaucgcguggaacagcaacaaccucgacuccaaggucgggggcaacuacaacuaccuguaccgccuguuccgcaagagcaaccucaagcccuucgagcgggacaucuccaccgagaucuaccaggccggcagcacccccugcaacgggguggagggcuucaacugcuacuucccccugcaguccuacggguuccagccgaccaacggcgugggguaccagcccuaccggguggucgugcugagcuucgagcuccugcacgcccccgccacggugugcggccccaagaaguccaccaaccuggucaagaacaagugcgugaacuucaacuucaacggccucaccgggaccggcgugcugaccgagagcaacaagaaguuccugccguuccagcaguucgggcgcgacaucgccgacacgaccgacgcgguccgcgacccccagacccuggagauccucgacaucacccccugcagcuucggcgggguguccgugaucacgccgggcaccaacaccagcaaccaggucgccgugcuguaccagggcgugaacugcaccgagguccccguggccauccacgccgaccagcugacgcccaccuggcggguguacuccaccgggagcaacgucuuccagacccgcgccggcugccucaucggggcggagcacgugaacaacuccuacgagugcgacauccccaucggcgccggcaucugcgccagcuaccagacgcagaccaacuccccgcggcgcgcccggagcguggcgucccagagcgucaucgccuacaccaugucccugggggccgagaacagcguggccuacuccaacaacagcaucgccauccccaccaacuucacgaucuccgugaccaccgagauccugcccgucagcaugaccaagacgagcguggacugcaccauguacaucugcggcgacuccaccgagugcagcaaccuccugcugcaguacggguccuucugcacccagcucaaccgcgcgcugacgggcaucgccguggagcaggacaagaacacccaggaggucuucgcccaggugaagcagaucuacaagacgcccccgaucaaggacuucgggggcuucaacuucagccagauccugcccgaccccuccaagcccagcaagcgguccuucaucgaggaccuccuguucaacaaggugacccuggccgacgccggcuucaucaagcaguacggggacugccucggcgacaucgcggcccgcgaccugaucugcgcccagaaguucaacgggcugaccguccucccgccccugcugaccgacgagaugaucgcccaguacaccagcgcccuccuggcgggcaccaucacguccggguggaccuucggcgccggcgccgcccugcagauccccuucgcgaugcagauggccuaccgguucaacgggaucggcgugacccagaacgugcucuacgagaaccagaagcugaucgccaaccaguucaacagcgccaucgggaagauccaggacucccugagcuccaccgccagcgcgcucggcaagcugcaggacgucgugaaccagaacgcccaggcccugaacacgcucgugaagcagcuguccagcaacuucggggccaucuccagcguccugaacgacauccucucccgccuggacccgcccgaggccgaggugcagaucgaccggcugaucaccggccgccuccagagccugcagaccuacgugacccagcagcugauccgggcggccgagauccgcgccagcgccaaccucgccgcgaccaagauguccgagugcguccugggccagagcaagcggguggacuucugcgggaagggcuaccaccugauguccuucccccagagcgcgccccacgggguggucuuccuccacgugacguacguccccgcccaggagaagaacuucaccaccgccccggccaucugccacgacggcaaggcccacuucccccgcgaggggguguucguguccaacggcacccacugguucgucacgcagcggaacuucuacgagccccagaucaucaccaccgacaacaccuucgugagcggcaacugcgacguggucaucgggaucgugaacaacacgguguacgacccccugcagccggagcuggacuccuucaaggaggagcucgacaaguacuucaagaaccacaccagccccgacgucgaccugggcgacaucuccgggaucaacgccagcguggugaacauccagaaggagaucgaccgccugaacgaggucgccaagaaccucaacgagucccugaucgaccugcaggagcucggcaaguacgagcaguacaucaaguggcccugguacaucuggcugggcuucaucgccgggcugaucgcgaucgugauggugaccaucaugcucugcugcaugaccagcugcugcuccugccugaagggcugcugcagcugcggguccugcugcaaguucgacgaggacgacagcgagccgguccugaagggcgugaagcuccacuacacgugaggacuaguuauaagacugacuagcccgaugggccucccaacgggcccuccuccccuccuugcaccgagauuaauagaucuaaaaaaaaaaaaaaaaaaaaaaaaaaaaaaaaaaaaaaaaaaaaaaaaaaaaaaaaaaaaaaaaaaaaaaaaaaaaaaaaaaaaaaaaaaaaaaaaaaaa

SEQ ID NO: 25744 - RNA, 4017 nt, Artificial Sequence
  SARS-CoV-2/Wuhan/WIV05/2019__EPI_ISL_402128 spike protein mRNA gc (1-1273)(K986P_V987P_D614G_M1229I)
aggagaaagcuuaccauguucguguuccugguccuccugccccuggugagcucccagugcgugaaccucaccacccgcacgcagcugccgcccgccuacaccaacagcuucacccggggcgucuacuaccccgacaagguguuccgcuccagcgugcugcacuccacccaggaccucuuccugcccuucuucagcaacgucacgugguuccacgccauccacguguccgggaccaacggcaccaagcgguucgacaacccggugcugcccuucaacgacggggucuacuucgcgagcaccgagaaguccaacaucauccgcggcuggaucuucgggacgacccucgacagcaagacccagucccugcugaucgugaacaacgccaccaacguggucaucaaggugugcgaguuccaguucugcaacgaccccuuccucggcguguacuaccacaagaacaacaagagcuggauggaguccgaguuccgggucuacagcuccgccaacaacugcacguucgaguacgugagccagcccuuccugauggaccuggagggcaagcaggggaacuucaagaaccuccgcgaguucguguucaagaacaucgacggcuacuucaagaucuacuccaagcacaccccgaucaaccugguccgggaccugccccagggguucagcgcccucgagccccugguggaccugcccaucggcaucaacaucacccgcuuccagacccuccuggcccugcaccgguccuaccucacgccgggggacagcagcuccggcuggaccgcgggcgccgccgccuacuacgugggguaccugcagccccgcaccuuccugcucaaguacaacgagaacggcaccaucacggacgcggucgacugcgcccuggacccccugagcgagaccaagugcacccucaaguccuucaccguggagaaggggaucuaccagacgagcaacuuccgggugcagcccaccgaguccaucguccgcuucccgaacaucaccaaccugugccccuucggcgagguguucaacgccacccgguucgccagcgucuacgccuggaaccgcaagcggaucuccaacugcguggcggacuacagcgugcuguacaacuccgccagcuucuccacguucaagugcuacggcgucagccccaccaagcucaacgaccugugcuucaccaacguguacgccgacuccuucgugauccgcggggacgagguccggcagaucgcccccggccagaccgggaagaucgccgacuacaacuacaagcugccggacgacuucacgggcugcgugaucgcguggaacagcaacaaccucgacuccaaggucgggggcaacuacaacuaccuguaccgccuguuccgcaagagcaaccucaagcccuucgagcgggacaucuccaccgagaucuaccaggccggcagcacccccugcaacgggguggagggcuucaacugcuacuucccccugcaguccuacggguuccagccgaccaacggcgugggguaccagcccuaccggguggucgugcugagcuucgagcuccugcacgcccccgccacggugugcggccccaagaaguccaccaaccuggucaagaacaagugcgugaacuucaacuucaacggccucaccgggaccggcgugcugaccgagagcaacaagaaguuccugccguuccagcaguucgggcgcgacaucgccgacacgaccgacgcgguccgcgacccccagacccuggagauccucgacaucacccccugcagcuucggcgggguguccgugaucacgccgggcaccaacaccagcaaccaggucgccgugcuguaccagggcgugaacugcaccgagguccccguggccauccacgccgaccagcugacgcccaccuggcggguguacuccaccgggagcaacgucuuccagacccgcgccggcugccucaucggggcggagcacgugaacaacuccuacgagugcgacauccccaucggcgccggcaucugcgccagcuaccagacgcagaccaacuccccgcggcgcgcccggagcguggcgucccagagcaucaucgccuacaccaugucccugggggccgagaacagcgucgccuacuccaacaacagcaucgccauccccaccaacuucacgaucuccgugaccaccgagauccugcccgugagcaugaccaagacgagcgucgacugcaccauguacaucugcggcgacuccaccgagugcagcaaccuccugcugcaguacggguccuucugcacccagcucaaccgcgcgcugacgggcaucgccguggagcaggacaagaacacccaggagguguucgcccaggucaagcagaucuacaagacgcccccgaucaaggacuucgggggcuucaacuucagccagauccugcccgaccccuccaagcccagcaagcgguccuucaucgaggaccuccuguucaacaaggugacccuggccgacgccggcuucaucaagcaguacggggacugccucggcgacaucgcggcccgcgaccugaucugcgcccagaaguucaacgggcugaccgugcucccgccccugcugaccgacgagaugaucgcccaguacaccagcgcccuccuggcgggcaccaucacguccggguggaccuucggcgccggcgccgcccugcagauccccuucgcgaugcagauggccuaccgguucaacgggaucggcgucacccagaacgugcucuacgagaaccagaagcugaucgccaaccaguucaacagcgccaucgggaagauccaggacucccugagcuccaccgccagcgcgcucggcaagcugcaggacguggucaaccagaacgcccaggcccugaacacgcucgugaagcagcuguccagcaacuucggggccaucuccagcgugcugaacgacauccucucccgccuggacccgcccgaggccgagguccagaucgaccggcugaucaccggccgccuccagagccugcagaccuacgugacccagcagcugauccgggcggccgagauccgcgccagcgccaaccucgccgcgaccaagauguccgagugcgugcugggccagagcaagcgggucgacuucugcgggaagggcuaccaccugauguccuucccccagagcgcgccccacggggugguguuccuccacgucacguacgugcccgcccaggagaagaacuucaccaccgccccggccaucugccacgacggcaaggcccacuucccccgcgagggggucuucguguccaacggcacccacugguucgugacgcagcggaacuucuacgagccccagaucaucaccaccgacaacaccuucgucagcggcaacugcgacguggugaucgggaucgucaacaacacgguguacgacccccugcagccggagcuggacuccuucaaggaggagcucgacaaguacuucaagaaccacaccagccccgacguggaccugggcgacaucuccgggaucaacgccagcgucgugaacauccagaaggagaucgaccgccugaacgagguggccaagaaccucaacgagucccugaucgaccugcaggagcucggcaaguacgagcaguacaucaaguggcccugguacaucuggcugggcuucaucgccgggcugaucgcgaucgucaucgugaccaucaugcucugcugcaugaccagcugcugcuccugccugaagggcugcugcagcugcggguccugcugcaaguucgacgaggacgacagcgagccggugcugaagggcgucaagcuccacuacacgugaggacuaguuauaagacugacuagcccgaugggccucccaacgggcccuccuccccuccuugcaccgagauuaauagaucuaaaaaaaaaaaaaaaaaaaaaaaaaaaaaaaaaaaaaaaaaaaaaaaaaaaaaaaaaaaaaaaaaaaaaaaaaaaaaaaaaaaaaaaaaaaaaaaaaaaa

SEQ ID NO: 25745 - RNA, 4011 nt, Artificial Sequence
  SARS-CoV-2/Wuhan/WIV05/2019__EPI_ISL_402128 spike protein mRNA gc (1-1273)(K986P_V987P_H69del_V70del_A222V_Y453F_S477N_D614G_I692V)
aggagaaagcuuaccauguucguguuccugguccuccugccccuggugagcucccagugcgugaaccucaccacccgcacgcagcugccgcccgccuacaccaacagcuucacccggggcgucuacuaccccgacaagguguuccgcuccagcgugcugcacuccacccaggaccucuuccugcccuucuucagcaacgucacgugguuccacgccaucuccgggaccaacggcaccaagcgguucgacaacccggugcugcccuucaacgacgggguguacuucgcgagcaccgagaaguccaacaucauccgcggcuggaucuucgggacgacccucgacagcaagacccagucccugcugaucgucaacaacgccaccaacguggugaucaaggucugcgaguuccaguucugcaacgaccccuuccucggcguguacuaccacaagaacaacaagagcuggauggaguccgaguuccggguguacagcuccgccaacaacugcacguucgaguacgucagccagcccuuccugauggaccuggagggcaagcaggggaacuucaagaaccuccgcgaguucguguucaagaacaucgacggcuacuucaagaucuacuccaagcacaccccgaucaaccuggugcgggaccugccccagggguucagcguccucgagccccugguggaccugcccaucggcaucaacaucacccgcuuccagacccuccuggcccugcaccgguccuaccucacgccgggggacagcagcuccggcuggaccgccggcgcggccgccuacuacgugggguaccugcagccccgcaccuuccugcucaaguacaacgagaacggcaccaucacggacgccgucgacugcgcgcuggacccccugagcgagaccaagugcacccucaaguccuucaccguggagaaggggaucuaccagacgagcaacuuccgggugcagcccaccgaguccaucguccgcuucccgaacaucaccaaccugugccccuucggcgagguguucaacgccacccgguucgccagcgucuacgccuggaaccgcaagcggaucuccaacugcguggccgacuacagcgugcuguacaacuccgcgagcuucuccacguucaagugcuacggcgucagccccaccaagcucaacgaccugugcuucaccaacguguacgccgacuccuucgugauccgcggggacgagguccggcagaucgcccccggccagaccgggaagaucgccgacuacaacuacaagcugccggacgacuucacgggcugcgugaucgccuggaacagcaacaaccucgacuccaaggucgggggcaacuacaacuaccuguuccgccuguuccgcaagagcaaccucaagcccuucgagcgggacaucuccaccgagaucuaccaggcgggcaacacccccugcaacgggguggagggcuucaacugcuacuucccccugcagagcuacggguuccagccgaccaacggcgugggguaccagcccuaccggguggucgugcuguccuucgagcuccugcacgcccccgccacggugugcggccccaagaaguccaccaaccuggucaagaacaagugcgugaacuucaacuucaacggccucaccgggaccggcgugcugaccgagagcaacaagaaguuccugccguuccagcaguucgggcgcgacaucgccgacacgaccgacgccguccgcgacccccagacccuggagauccucgacaucacccccugcagcuucggcggggugagcgugaucacgccgggcaccaacaccuccaaccaggucgcggugcuguaccagggcgugaacugcaccgagguccccguggccauccacgccgaccagcugacgcccaccuggcggguguacagcaccggguccaacgucuuccagacccgcgccggcugccucaucggggccgagcacgugaacaacagcuacgagugcgacauccccaucggcgcgggcaucugcgccuccuaccagacgcagaccaacagcccgcggcgcgcccgguccguggccagccaguccgucaucgcguacaccaugagccugggggccgagaacuccguggccuacagcaacaacuccaucgccauccccaccaacuucacgaucagcgugaccaccgagauccugcccgucuccaugaccaagacgagcguggacugcaccauguacaucugcggcgacagcaccgagugcuccaaccuccugcugcaguacgggagcuucugcacccagcucaaccgcgcccugacgggcaucgcgguggagcaggacaagaacacccaggaggucuucgcccaggugaagcagaucuacaagacgcccccgaucaaggacuucgggggcuucaacuucucccagauccugcccgaccccagcaagcccuccaagcggagcuucaucgaggaccuccuguucaacaaggugacccuggccgacgccggcuucaucaagcaguacggggacugccucggcgacaucgccgcgcgcgaccugaucugcgcccagaaguucaacgggcugaccguccucccgccccugcugaccgacgagaugaucgcccaguacaccuccgcccuccuggccggcaccaucacgagcggguggaccuucggcgcgggcgccgcccugcagauccccuucgccaugcagauggcguaccgguucaacgggaucggcgugacccagaacgugcucuacgagaaccagaagcugaucgccaaccaguucaacuccgccaucgggaagauccaggacagccuguccagcaccgccuccgcccucggcaagcugcaggacgucgugaaccagaacgcgcaggcccugaacacgcucgugaagcagcugagcuccaacuucggggccaucagcuccguccugaacgacauccucagccgccuggacccgcccgaggccgaggugcagaucgaccggcugaucaccggccgccuccagucccugcagaccuacgugacccagcagcugauccgggccgcggagauccgcgccagcgccaaccucgccgccaccaagaugagcgagugcguccugggccaguccaagcggguggacuucugcgggaagggcuaccaccugaugagcuucccccaguccgcgccccacgggguggucuuccuccacgugacguacguccccgcccaggagaagaacuucaccaccgccccggccaucugccacgacggcaaggcgcacuucccccgcgaggggguguucgugagcaacggcacccacugguucgucacgcagcggaacuucuacgagccccagaucaucaccaccgacaacaccuucguguccggcaacugcgacguggucaucgggaucgugaacaacacgguguacgacccccugcagccggagcuggacagcuucaaggaggagcucgacaaguacuucaagaaccacaccucccccgacgucgaccugggcgacaucagcgggaucaacgccuccguggugaacauccagaaggagaucgaccgccugaacgaggucgccaagaaccucaacgagagccugaucgaccugcaggagcucggcaaguacgagcaguacaucaaguggcccugguacaucuggcugggcuucaucgccgggcugaucgccaucgugauggugaccaucaugcucugcugcaugaccuccugcugcagcugccugaagggcugcugcuccugcgggagcugcugcaaguucgacgaggacgacuccgagccgguccugaagggcgugaagcuccacuacacgugaggacuaguuauaagacugacuagcccgaugggccucccaacgggcccuccuccccuccuugcaccgagauuaauagaucuaaaaaaaaaaaaaaaaaaaaaaaaaaaaaaaaaaaaaaaaaaaaaaaaaaaaaaaaaaaaaaaaaaaaaaaaaaaaaaaaaaaaaaaaaaaaaaaaaaaa

SEQ ID NO: 25746 - RNA, 4011 nt, Artificial Sequence
  SARS-CoV-2/Wuhan/WIV05/2019__EPI_ISL_402128 spike protein mRNA gc (1-1273)(K986P_V987P_H69del_V70del_Y453F_D614G_I692V_M1229I)
aggagaaagcuuaccauguucguguuccugguccuccugccccuggugagcucccagugcgugaaccucaccacccgcacgcagcugccgcccgccuacaccaacagcuucacccggggcgucuacuaccccgacaagguguuccgcuccagcgugcugcacuccacccaggaccucuuccugcccuucuucagcaacgucacgugguuccacgccaucuccgggaccaacggcaccaagcgguucgacaacccggugcugcccuucaacgacgggguguacuucgcgagcaccgagaaguccaacaucauccgcggcuggaucuucgggacgacccucgacagcaagacccagucccugcugaucgucaacaacgccaccaacguggugaucaaggucugcgaguuccaguucugcaacgaccccuuccucggcguguacuaccacaagaacaacaagagcuggauggaguccgaguuccggguguacagcuccgccaacaacugcacguucgaguacgucagccagcccuuccugauggaccuggagggcaagcaggggaacuucaagaaccuccgcgaguucguguucaagaacaucgacggcuacuucaagaucuacuccaagcacaccccgaucaaccuggugcgggaccugccccagggguucagcgcccucgagccccuggucgaccugcccaucggcaucaacaucacccgcuuccagacccuccuggcccugcaccgguccuaccucacgccgggggacagcagcuccggcuggaccgcgggcgccgccgccuacuacgugggguaccugcagccccgcaccuuccugcucaaguacaacgagaacggcaccaucacggacgcgguggacugcgcccuggacccccugagcgagaccaagugcacccucaaguccuucaccgucgagaaggggaucuaccagacgagcaacuuccgggugcagcccaccgaguccaucgugcgcuucccgaacaucaccaaccugugccccuucggcgaggucuucaacgccacccgguucgccagcguguacgccuggaaccgcaagcggaucuccaacugcgucgcggacuacagcgugcuguacaacuccgccagcuucuccacguucaagugcuacggcgugagccccaccaagcucaacgaccugugcuucaccaacgucuacgccgacuccuucgugauccgcggggacgaggugcggcagaucgcccccggccagaccgggaagaucgccgacuacaacuacaagcugccggacgacuucacgggcugcgucaucgcguggaacagcaacaaccucgacuccaaggucgggggcaacuacaacuaccuguuccgccuguuccgcaagagcaaccucaagcccuucgagcgggacaucuccaccgagaucuaccaggccggcagcacccccugcaacgggguggagggcuucaacugcuacuucccccugcaguccuacggguuccagccgaccaacggcgugggguaccagcccuaccggguggugguccugagcuucgagcuccugcacgcccccgccacggugugcggccccaagaaguccaccaaccuggugaagaacaagugcgucaacuucaacuucaacggccucaccgggaccggcgugcugaccgagagcaacaagaaguuccugccguuccagcaguucgggcgcgacaucgccgacacgaccgacgcggugcgcgacccccagacccuggagauccucgacaucacccccugcagcuucggcggggucuccgugaucacgccgggcaccaacaccagcaaccagguggccguccuguaccagggcgugaacugcaccgaggugcccgucgccauccacgccgaccagcugacgcccaccuggcggguguacuccaccgggagcaacguguuccagacccgcgccggcugccucaucggggcggagcacgucaacaacuccuacgagugcgacauccccaucggcgccggcaucugcgccagcuaccagacgcagaccaacuccccgcggcgcgcccggagcguggcgucccagagcgugaucgccuacaccaugucccugggggccgagaacagcgucgccuacuccaacaacagcaucgccauccccaccaacuucacgaucuccgugaccaccgagauccugcccgugagcaugaccaagacgagcgucgacugcaccauguacaucugcggcgacuccaccgagugcagcaaccuccugcugcaguacggguccuucugcacccagcucaaccgcgcgcugacgggcaucgccguggagcaggacaagaacacccaggagguguucgcccaggucaagcagaucuacaagacgcccccgaucaaggacuucgggggcuucaacuucagccagauccugcccgaccccuccaagcccagcaagcgguccuucaucgaggaccuccuguucaacaaggugacccuggccgacgccggcuucaucaagcaguacggggacugccucggcgacaucgcggcccgcgaccugaucugcgcccagaaguucaacgggcugaccgugcucccgccccugcugaccgacgagaugaucgcccaguacaccagcgcccuccuggcgggcaccaucacguccggguggaccuucggcgccggcgccgcccugcagauccccuucgcgaugcagauggccuaccgguucaacgggaucggcgucacccagaacgugcucuacgagaaccagaagcugaucgccaaccaguucaacagcgccaucgggaagauccaggacucccugagcuccaccgccagcgcgcucggcaagcugcaggacguggucaaccagaacgcccaggcccugaacacgcucgugaagcagcuguccagcaacuucggggccaucuccagcgugcugaacgacauccucucccgccuggacccgcccgaggccgagguccagaucgaccggcugaucaccggccgccuccagagccugcagaccuacgugacccagcagcugauccgggcggccgagauccgcgccagcgccaaccucgccgcgaccaagauguccgagugcgugcugggccagagcaagcgggucgacuucugcgggaagggcuaccaccugauguccuucccccagagcgcgccccacggggugguguuccuccacgucacguacgugcccgcccaggagaagaacuucaccaccgccccggccaucugccacgacggcaaggcccacuucccccgcgagggggucuucguguccaacggcacccacugguucgugacgcagcggaacuucuacgagccccagaucaucaccaccgacaacaccuucgucagcggcaacugcgacguggugaucgggaucgucaacaacacgguguacgacccccugcagccggagcuggacuccuucaaggaggagcucgacaaguacuucaagaaccacaccagccccgacguggaccugggcgacaucuccgggaucaacgccagcgucgugaacauccagaaggagaucgaccgccugaacgagguggccaagaaccucaacgagucccugaucgaccugcaggagcucggcaaguacgagcaguacaucaaguggcccugguacaucuggcugggcuucaucgccgggcugaucgcgaucgucaucgugaccaucaugcucugcugcaugaccagcugcugcuccugccugaagggcugcugcagcugcggguccugcugcaaguucgacgaggacgacagcgagccggugcugaagggcgucaagcuccacuacacgugaggacuaguuauaagacugacuagcccgaugggccucccaacgggcccuccuccccuccuugcaccgagauuaauagaucuaaaaaaaaaaaaaaaaaaaaaaaaaaaaaaaaaaaaaaaaaaaaaaaaaaaaaaaaaaaaaaaaaaaaaaaaaaaaaaaaaaaaaaaaaaaaaaaaaaaa

SEQ ID NO: 25747 - RNA, 4008 nt, Artificial Sequence
  SARS-CoV-2/Wuhan/WIV05/2019__EPI_ISL_402128 spike protein mRNA gc (1-1273)(K986P_V987P_K986P_V987P_H69del_V70del_Y144del_N501Y_A570 D_D614G_P681H_T716I_S982A_D1118H)
aggagaaagcuuaccauguucguguuccugguccuccugccccuggugagcucccagugcgugaaccucaccacccgcacgcagcugccgcccgccuacaccaacagcuucacccggggcgucuacuaccccgacaagguguuccgcuccagcgugcugcacuccacccaggaccucuuccugcccuucuucagcaacgucacgugguuccacgccaucuccgggaccaacggcaccaagcgguucgacaacccggugcugcccuucaacgacgggguguacuucgcgagcaccgagaaguccaacaucauccgcggcuggaucuucgggacgacccucgacagcaagacccagucccugcugaucgucaacaacgccaccaacguggugaucaaggucugcgaguuccaguucugcaacgaccccuuccucggcguguaccacaagaacaacaagagcuggauggaguccgaguuccggguguacagcuccgccaacaacugcacguucgaguacgucagccagcccuuccugauggaccuggagggcaagcaggggaacuucaagaaccuccgcgaguucguguucaagaacaucgacggcuacuucaagaucuacuccaagcacaccccgaucaaccuggugcgggaccugccccagggguucagcgcccucgagccccuggucgaccugcccaucggcaucaacaucacccgcuuccagacccuccuggcccugcaccgguccuaccucacgccgggggacagcagcuccggcuggaccgcgggcgccgccgccuacuacgugggguaccugcagccccgcaccuuccugcucaaguacaacgagaacggcaccaucacggacgcgguggacugcgcccuggacccccugagcgagaccaagugcacccucaaguccuucaccgucgagaaggggaucuaccagacgagcaacuuccgggugcagcccaccgaguccaucgugcgcuucccgaacaucaccaaccugugccccuucggcgaggucuucaacgccacccgguucgccagcguguacgccuggaaccgcaagcggaucuccaacugcgucgcggacuacagcgugcuguacaacuccgccagcuucuccacguucaagugcuacggcgugagccccaccaagcucaacgaccugugcuucaccaacgucuacgccgacuccuucgugauccgcggggacgaggugcggcagaucgcccccggccagaccgggaagaucgccgacuacaacuacaagcugccggacgacuucacgggcugcgucaucgcguggaacagcaacaaccucgacuccaaggucgggggcaacuacaacuaccuguaccgccuguuccgcaagagcaaccucaagcccuucgagcgggacaucuccaccgagaucuaccaggccggcagcacccccugcaacgggguggagggcuucaacugcuacuucccccugcaguccuacggguuccagccgaccuacggcgugggguaccagcccuaccggguggugguccugagcuucgagcuccugcacgcccccgccacggugugcggccccaagaaguccaccaaccuggugaagaacaagugcgucaacuucaacuucaacggccucaccgggaccggcgugcugaccgagagcaacaagaaguuccugccguuccagcaguucgggcgcgacaucgacgacacgaccgacgccgugcgcgacccccagacccuggagauccucgacaucacccccugcagcuucggcggggucuccgugaucacgccgggcaccaacaccagcaaccagguggcgguccuguaccagggcgugaacugcaccgaggugcccgucgccauccacgccgaccagcugacgcccaccuggcggguguacuccaccgggagcaacguguuccagacccgcgccggcugccucaucggggccgagcacgucaacaacuccuacgagugcgacauccccaucggcgcgggcaucugcgccagcuaccagacgcagaccaacucccaccggcgcgcccggagcguggccucccagagcaucaucgcguacaccaugucccugggggccgagaacagcguggccuacuccaacaacagcaucgccaucccgaucaacuucaccaucuccgucacgaccgagauccugcccgugagcaugaccaagaccagcguggacugcacgauguacaucugcggcgacuccaccgagugcagcaaccuccugcugcaguacggguccuucugcacccagcucaaccgcgcccugaccggcaucgcggucgagcaggacaagaacacgcaggagguguucgcccaggugaagcagaucuacaagaccccgcccaucaaggacuucgggggcuucaacuucagccagauccugcccgaccccuccaagcccagcaagcgguccuucaucgaggaccuccuguucaacaaggucacccuggccgacgccggcuucaucaagcaguacggggacugccucggcgacaucgccgcgcgcgaccugaucugcgcccagaaguucaacgggcugaccgugcugcccccgcuccugacggacgagaugaucgcccaguacaccagcgcccuccuggccggcaccaucaccuccggguggacguucggcgcgggcgccgcccugcagauccccuucgccaugcagauggcguaccgguucaacgggaucggcgugacccagaacguccucuacgagaaccagaagcugaucgccaaccaguucaacagcgccaucgggaagauccaggacucccugagcuccaccgccagcgcccucggcaagcugcaggacguggugaaccagaacgcgcaggcccugaacacccucgucaagcagcuguccagcaacuucggggccaucuccagcgugcugaacgacauccucgcccgccuggacccgcccgaggccgaggugcagaucgaccggcugaucacgggccgccuccagucccugcagaccuacgucacccagcagcugauccgggcggccgagauccgcgccagcgccaaccucgccgcgaccaagaugagcgagugcgugcugggccaguccaagcggguggacuucugcgggaagggcuaccaccugaugagcuucccccaguccgcgccccacggggucguguuccuccacgugaccuacguccccgcccaggagaagaacuucacgaccgcccccgccaucugccacgacggcaaggcccacuucccgcgcgaggggguguucgucagcaacggcacccacugguucgugacccagcggaacuucuacgagccccagaucaucacgacccacaacaccuucguguccggcaacugcgacgucgugaucgggaucgugaacaacaccgucuacgacccccugcagcccgagcuggacagcuucaaggaggagcucgacaaguacuucaagaaccacacguccccggacguggaccugggcgacaucagcgggaucaacgccuccguggucaacauccagaaggagaucgaccgccugaacgagguggccaagaaccucaacgagagccugaucgaccugcaggagcucggcaaguacgagcaguacaucaaguggcccugguacaucuggcugggcuucaucgccgggcugaucgcgaucgugauggucaccaucaugcucugcugcaugaccuccugcugcagcugccugaagggcugcugcuccugcgggagcugcugcaaguucgacgaggacgacuccgagcccgugcugaagggcgugaagcuccacuacaccugaggacuaguuauaagacugacuagcccgaugggccucccaacgggcccuccuccccuccuugcaccgagauuaauagaucuaaaaaaaaaaaaaaaaaaaaaaaaaaaaaaaaaaaaaaaaaaaaaaaaaaaaaaaaaaaaaaaaaaaaaaaaaaaaaaaaaaaaaaaaaaaaaaaaaaaa

SEQ ID NO: 25748 - RNA, 4017 nt, Artificial Sequence
  SARS-CoV-2/Wuhan/WIV05/2019__EPI_ISL_402128 spike protein mRNA gc (1-1273)(K986P_V987P_K986P_V987P_K417N_E484K_N501Y_D614G)
aggagaaagcuuaccauguucguguuccugguccuccugccccuggugagcucccagugcgugaaccucaccacccgcacgcagcugccgcccgccuacaccaacagcuucacccggggcgucuacuaccccgacaagguguuccgcuccagcgugcugcacuccacccaggaccucuuccugcccuucuucagcaacgucacgugguuccacgccauccacguguccgggaccaacggcaccaagcgguucgacaacccggugcugcccuucaacgacggggucuacuucgcgagcaccgagaaguccaacaucauccgcggcuggaucuucgggacgacccucgacagcaagacccagucccugcugaucgugaacaacgccaccaacguggucaucaaggugugcgaguuccaguucugcaacgaccccuuccucggcguguacuaccacaagaacaacaagagcuggauggaguccgaguuccgggucuacagcuccgccaacaacugcacguucgaguacgugagccagcccuuccugauggaccuggagggcaagcaggggaacuucaagaaccuccgcgaguucguguucaagaacaucgacggcuacuucaagaucuacuccaagcacaccccgaucaaccugguccgggaccugccccagggguucagcgcccucgagccccugguggaccugcccaucggcaucaacaucacccgcuuccagacccuccuggcccugcaccgguccuaccucacgccgggggacagcagcuccggcuggaccgcgggcgccgccgccuacuacgugggguaccugcagccccgcaccuuccugcucaaguacaacgagaacggcaccaucacggacgcggucgacugcgcccuggacccccugagcgagaccaagugcacccucaaguccuucaccguggagaaggggaucuaccagacgagcaacuuccgggugcagcccaccgaguccaucguccgcuucccgaacaucaccaaccugugccccuucggcgagguguucaacgccacccgguucgccagcgucuacgccuggaaccgcaagcggaucuccaacugcguggcggacuacagcgugcuguacaacuccgccagcuucuccacguucaagugcuacggcgucagccccaccaagcucaacgaccugugcuucaccaacguguacgccgacuccuucgugauccgcggggacgagguccggcagaucgcccccggccagaccgggaacaucgccgacuacaacuacaagcugccggacgacuucacgggcugcgugaucgcguggaacagcaacaaccucgacuccaaggucgggggcaacuacaacuaccuguaccgccuguuccgcaagagcaaccucaagcccuucgagcgggacaucuccaccgagaucuaccaggccggcagcacccccugcaacggggugaagggcuucaacugcuacuucccccugcaguccuacggguuccagccgaccuacggcgugggguaccagcccuaccggguggucgugcugagcuucgagcuccugcacgcccccgccacggugugcggccccaagaaguccaccaaccuggucaagaacaagugcgugaacuucaacuucaacggccucaccgggaccggcgugcugaccgagagcaacaagaaguuccugccguuccagcaguucgggcgcgacaucgccgacacgaccgacgcgguccgcgacccccagacccuggagauccucgacaucacccccugcagcuucggcgggguguccgugaucacgccgggcaccaacaccagcaaccaggucgccgugcuguaccagggcgugaacugcaccgagguccccguggccauccacgccgaccagcugacgcccaccuggcggguguacuccaccgggagcaacgucuuccagacccgcgccggcugccucaucggggcggagcacgugaacaacuccuacgagugcgacauccccaucggcgccggcaucugcgccagcuaccagacgcagaccaacuccccgcggcgcgcccggagcguggcgucccagagcaucaucgccuacaccaugucccugggggccgagaacagcgucgccuacuccaacaacagcaucgccauccccaccaacuucacgaucuccgugaccaccgagauccugcccgugagcaugaccaagacgagcgucgacugcaccauguacaucugcggcgacuccaccgagugcagcaaccuccugcugcaguacggguccuucugcacccagcucaaccgcgcgcugacgggcaucgccguggagcaggacaagaacacccaggagguguucgcccaggucaagcagaucuacaagacgcccccgaucaaggacuucgggggcuucaacuucagccagauccugcccgaccccuccaagcccagcaagcgguccuucaucgaggaccuccuguucaacaaggugacccuggccgacgccggcuucaucaagcaguacggggacugccucggcgacaucgcggcccgcgaccugaucugcgcccagaaguucaacgggcugaccgugcucccgccccugcugaccgacgagaugaucgcccaguacaccagcgcccuccuggcgggcaccaucacguccggguggaccuucggcgccggcgccgcccugcagauccccuucgcgaugcagauggccuaccgguucaacgggaucggcgucacccagaacgugcucuacgagaaccagaagcugaucgccaaccaguucaacagcgccaucgggaagauccaggacucccugagcuccaccgccagcgcgcucggcaagcugcaggacguggucaaccagaacgcccaggcccugaacacgcucgugaagcagcuguccagcaacuucggggccaucuccagcgugcugaacgacauccucucccgccuggacccgcccgaggccgagguccagaucgaccggcugaucaccggccgccuccagagccugcagaccuacgugacccagcagcugauccgggcggccgagauccgcgccagcgccaaccucgccgcgaccaagauguccgagugcgugcugggccagagcaagcgggucgacuucugcgggaagggcuaccaccugauguccuucccccagagcgcgccccacggggugguguuccuccacgucacguacgugcccgcccaggagaagaacuucaccaccgccccggccaucugccacgacggcaaggcccacuucccccgcgagggggucuucguguccaacggcacccacugguucgugacgcagcggaacuucuacgagccccagaucaucaccaccgacaacaccuucgucagcggcaacugcgacguggugaucgggaucgucaacaacacgguguacgacccccugcagccggagcuggacuccuucaaggaggagcucgacaaguacuucaagaaccacaccagccccgacguggaccugggcgacaucuccgggaucaacgccagcgucgugaacauccagaaggagaucgaccgccugaacgagguggccaagaaccucaacgagucccugaucgaccugcaggagcucggcaaguacgagcaguacaucaaguggcccugguacaucuggcugggcuucaucgccgggcugaucgcgaucgucauggugaccaucaugcucugcugcaugaccagcugcugcuccugccugaagggcugcugcagcugcggguccugcugcaaguucgacgaggacgacagcgagccggugcugaagggcgucaagcuccacuacacgugaggacuaguuauaagacugacuagcccgaugggccucccaacgggcccuccuccccuccuugcaccgagauuaauagaucuaaaaaaaaaaaaaaaaaaaaaaaaaaaaaaaaaaaaaaaaaaaaaaaaaaaaaaaaaaaaaaaaaaaaaaaaaaaaaaaaaaaaaaaaaaaaaaaaaaaa

SEQ ID NO: 25749 - RNA, 4008 nt, Artificial Sequence
  SARS-CoV-2/Wuhan/WIV05/2019__EPI_ISL_402128 spike protein mRNA gc (1-1273)(K986P_V987P_K986P_V987P_L18F_D80A_D215G_L242del_A243del_ L244del_R246I_K417N_E484K_N501Y_D614G_A701V)
aggagaaagcuuaccauguucguguuccugguccuccugccccuggugagcucccagugcgugaacuucaccacccgcacgcagcucccgcccgccuacaccaacagcuucacccggggcgucuacuaccccgacaagguguuccgcuccagcgugcugcacuccacccaggaccuguuccuccccuucuucagcaacgucacgugguuccacgccauccacguguccgggaccaacggcaccaagcgguucgcgaacccggugcugcccuucaacgacggggucuacuucgccagcaccgagaaguccaacaucauccgcggcuggaucuucgggacgacccuggacagcaagacccagucccuccugaucgugaacaacgccaccaacguggucaucaaggugugcgaguuccaguucugcaacgaccccuuccugggcguguacuaccacaagaacaacaagagcuggauggaguccgaguuccgggucuacagcuccgccaacaacugcacguucgaguacgugagccagcccuuccucauggaccuggagggcaagcaggggaacuucaagaaccugcgcgaguucguguucaagaacaucgacggcuacuucaagaucuacuccaagcacaccccgaucaaccucguccgggggcugccccagggcuucagcgcccuggagccccucguggaccugcccaucgggaucaacaucacccgcuuccagacccugcacaucuccuaccucacgccgggcgacagcagcuccggcuggaccgcgggggccgccgccuacuacgugggcuaccugcagccccggaccuuccugcucaaguacaacgagaacgggaccaucacggacgcggucgacugcgcccuggacccccugagcgagaccaagugcacccucaaguccuucaccguggagaagggcaucuaccagacgagcaacuuccgcgugcagcccaccgaguccaucguccgguucccgaacaucaccaaccugugccccuucggcgagguguucaacgccacccgcuucgccagcgucuacgccuggaaccggaagcgcaucuccaacugcguggcggacuacagcgugcuguacaacuccgccagcuucuccacguucaagugcuacggggucagccccaccaagcucaacgaccugugcuucaccaacguguacgccgacuccuucgugauccggggcgacgagguccgccagaucgcccccgggcagaccggcaacaucgccgacuacaacuacaagcugccggacgacuucacggggugcgugaucgcguggaacagcaacaaccucgacuccaaggugggcggcaacuacaacuaccuguaccggcuguuccgcaagagcaaccucaagcccuucgagcgggacaucuccaccgagaucuaccaggccgggagcacccccugcaacggcgucaagggguucaacugcuacuucccccugcaguccuacggcuuccagccgaccuacggggugggcuaccagcccuaccgcguggucgugcugagcuucgagcuccugcacgcccccgccacggugugcggccccaagaaguccaccaaccuggucaagaacaagugcgugaacuucaacuucaacgggcucaccggcaccggggugcugaccgagagcaacaagaaguuccugccguuccagcaguucggccgggacaucgccgacacgaccgacgcgguccgcgacccccagacccucgagauccuggacaucacccccugcagcuucgggggcguguccgugaucacgccgggcaccaacaccagcaaccaggucgccgugcuguaccagggggugaacugcaccgagguccccguggccauccacgccgaccagcugacgcccaccuggcgcguguacuccaccggcagcaacgucuuccagacccgggccgggugccucaucggcgcggagcacgugaacaacuccuacgagugcgacauccccaucggcgccgggaucugcgccagcuaccagacgcagaccaacuccccgcgccgggcccgcagcguggcgucccagagcaucaucgccuacaccaugucccugggcgucgagaacagcguggccuacuccaacaacagcaucgccauccccaccaacuucacgaucuccgugaccaccgagauccugcccgucagcaugaccaagacgagcguggacugcaccauguacaucugcggggacuccaccgagugcagcaaccuccugcugcaguacggcuccuucugcacccagcucaaccgggcccugacggggaucgcgguggagcaggacaagaacacccaggaggucuucgcccaggugaagcagaucuacaagacgcccccgaucaaggacuucggcggcuucaacuucagccagauccugcccgaccccuccaagcccagcaagcgcuccuucaucgaggaccuccuguucaacaaggugacccuggccgacgccggguucaucaagcaguacggcgacugccucggggacaucgccgcgcgggaccugaucugcgcccagaaguucaacggccugaccguccucccgccccugcugaccgacgagaugaucgcccaguacaccagcgcccuccuggccgggaccaucacguccggcuggaccuucggcgcgggggccgcccugcagauccccuucgccaugcagauggcguaccgcuucaacggcaucggggugacccagaacgugcucuacgagaaccagaagcugaucgccaaccaguucaacagcgccaucggcaagauccaggacucccugagcuccaccgccagcgcccucgggaagcugcaggacgucgugaaccagaacgcgcaggcccugaacacgcucgugaagcagcuguccagcaacuucggcgccaucuccagcguccugaacgacauccucucccggcuggacccgcccgaggccgaggugcagaucgaccgccugaucaccggccggcuccagagccugcagaccuacgugacccagcagcugauccgcgccgcggagauccgggccagcgccaaccucgccgccaccaagauguccgagugcguccuggggcagagcaagcgcguggacuucugcggcaagggguaccaccugauguccuucccccagagcgcgccccacggcguggucuuccuccacgugacguacguccccgcccaggagaagaacuucaccaccgccccggccaucugccacgacgggaaggcgcacuucccccgggagggcguguucguguccaacggcacccacugguucgucacgcagcgcaacuucuacgagccccagaucaucaccaccgacaacaccuucgugagcgggaacugcgacguggucaucggcaucgugaacaacacgguguacgacccccugcagccggagcuggacuccuucaaggaggagcucgacaaguacuucaagaaccacaccagccccgacgucgaccugggggacaucuccggcaucaacgccagcguggugaacauccagaaggagaucgaccggcugaacgaggucgccaagaaccucaacgagucccugaucgaccugcaggagcucggcaaguacgagcaguacaucaaguggcccugguacaucuggcugggguucaucgccggccugaucgccaucgugauggugaccaucaugcucugcugcaugaccagcugcugcuccugccugaaggggugcugcagcugcggcuccugcugcaaguucgacgaggacgacagcgagccgguccugaagggggugaagcuccacuacacgugaggacuaguuauaagacugacuagcccgaugggccucccaacgggcccuccuccccuccuugcaccgagauuaauagaucuaaaaaaaaaaaaaaaaaaaaaaaaaaaaaaaaaaaaaaaaaaaaaaaaaaaaaaaaaaaaaaaaaaaaaaaaaaaaaaaaaaaaaaaaaaaaaaaaaaaa

SEQ ID NO: 25750 - RNA, 4017 nt, Artificial Sequence
  SARS-CoV-2/Wuhan/WIV05/2019__EPI_ISL_402128 spike protein mRNA gc (1-1273)(K986P_V987P_K986P_V987P_E484K_D614G)
aggagaaagcuuaccauguucguguuccugguccuccugccccuggugagcucccagugcgugaaccucaccacccgcacgcagcugccgcccgccuacaccaacagcuucacccggggcgucuacuaccccgacaagguguuccgcuccagcgugcugcacuccacccaggaccucuuccugcccuucuucagcaacgucacgugguuccacgccauccacguguccgggaccaacggcaccaagcgguucgacaacccggugcugcccuucaacgacggggucuacuucgcgagcaccgagaaguccaacaucauccgcggcuggaucuucgggacgacccucgacagcaagacccagucccugcugaucgugaacaacgccaccaacguggucaucaaggugugcgaguuccaguucugcaacgaccccuuccucggcguguacuaccacaagaacaacaagagcuggauggaguccgaguuccgggucuacagcuccgccaacaacugcacguucgaguacgugagccagcccuuccugauggaccuggagggcaagcaggggaacuucaagaaccuccgcgaguucguguucaagaacaucgacggcuacuucaagaucuacuccaagcacaccccgaucaaccugguccgggaccugccccagggguucagcgcccucgagccccugguggaccugcccaucggcaucaacaucacccgcuuccagacccuccuggcccugcaccgguccuaccucacgccgggggacagcagcuccggcuggaccgcgggcgccgccgccuacuacgugggguaccugcagccccgcaccuuccugcucaaguacaacgagaacggcaccaucacggacgcggucgacugcgcccuggacccccugagcgagaccaagugcacccucaaguccuucaccguggagaaggggaucuaccagacgagcaacuuccgggugcagcccaccgaguccaucguccgcuucccgaacaucaccaaccugugccccuucggcgagguguucaacgccacccgguucgccagcgucuacgccuggaaccgcaagcggaucuccaacugcguggcggacuacagcgugcuguacaacuccgccagcuucuccacguucaagugcuacggcgucagccccaccaagcucaacgaccugugcuucaccaacguguacgccgacuccuucgugauccgcggggacgagguccggcagaucgcccccggccagaccgggaagaucgccgacuacaacuacaagcugccggacgacuucacgggcugcgugaucgcguggaacagcaacaaccucgacuccaaggucgggggcaacuacaacuaccuguaccgccuguuccgcaagagcaaccucaagcccuucgagcgggacaucuccaccgagaucuaccaggccggcagcacccccugcaacggggugaagggcuucaacugcuacuucccccugcaguccuacggguuccagccgaccaacggcgugggguaccagcccuaccggguggucgugcugagcuucgagcuccugcacgcccccgccacggugugcggccccaagaaguccaccaaccuggucaagaacaagugcgugaacuucaacuucaacggccucaccgggaccggcgugcugaccgagagcaacaagaaguuccugccguuccagcaguucgggcgcgacaucgccgacacgaccgacgcgguccgcgacccccagacccuggagauccucgacaucacccccugcagcuucggcgggguguccgugaucacgccgggcaccaacaccagcaaccaggucgccgugcuguaccagggcgugaacugcaccgagguccccguggccauccacgccgaccagcugacgcccaccuggcggguguacuccaccgggagcaacgucuuccagacccgcgccggcugccucaucggggcggagcacgugaacaacuccuacgagugcgacauccccaucggcgccggcaucugcgccagcuaccagacgcagaccaacuccccgcggcgcgcccggagcguggcgucccagagcaucaucgccuacaccaugucccugggggccgagaacagcgucgccuacuccaacaacagcaucgccauccccaccaacuucacgaucuccgugaccaccgagauccugcccgugagcaugaccaagacgagcgucgacugcaccauguacaucugcggcgacuccaccgagugcagcaaccuccugcugcaguacggguccuucugcacccagcucaaccgcgcgcugacgggcaucgccguggagcaggacaagaacacccaggagguguucgcccaggucaagcagaucuacaagacgcccccgaucaaggacuucgggggcuucaacuucagccagauccugcccgaccccuccaagcccagcaagcgguccuucaucgaggaccuccuguucaacaaggugacccuggccgacgccggcuucaucaagcaguacggggacugccucggcgacaucgcggcccgcgaccugaucugcgcccagaaguucaacgggcugaccgugcucccgccccugcugaccgacgagaugaucgcccaguacaccagcgcccuccuggcgggcaccaucacguccggguggaccuucggcgccggcgccgcccugcagauccccuucgcgaugcagauggccuaccgguucaacgggaucggcgucacccagaacgugcucuacgagaaccagaagcugaucgccaaccaguucaacagcgccaucgggaagauccaggacucccugagcuccaccgccagcgcgcucggcaagcugcaggacguggucaaccagaacgcccaggcccugaacacgcucgugaagcagcuguccagcaacuucggggccaucuccagcgugcugaacgacauccucucccgccuggacccgcccgaggccgagguccagaucgaccggcugaucaccggccgccuccagagccugcagaccuacgugacccagcagcugauccgggcggccgagauccgcgccagcgccaaccucgccgcgaccaagauguccgagugcgugcugggccagagcaagcgggucgacuucugcgggaagggcuaccaccugauguccuucccccagagcgcgccccacggggugguguuccuccacgucacguacgugcccgcccaggagaagaacuucaccaccgccccggccaucugccacgacggcaaggcccacuucccccgcgagggggucuucguguccaacggcacccacugguucgugacgcagcggaacuucuacgagccccagaucaucaccaccgacaacaccuucgucagcggcaacugcgacguggugaucgggaucgucaacaacacgguguacgacccccugcagccggagcuggacuccuucaaggaggagcucgacaaguacuucaagaaccacaccagccccgacguggaccugggcgacaucuccgggaucaacgccagcgucgugaacauccagaaggagaucgaccgccugaacgagguggccaagaaccucaacgagucccugaucgaccugcaggagcucggcaaguacgagcaguacaucaaguggcccugguacaucuggcugggcuucaucgccgggcugaucgcgaucgucauggugaccaucaugcucugcugcaugaccagcugcugcuccugccugaagggcugcugcagcugcggguccugcugcaaguucgacgaggacgacagcgagccggugcugaagggcgucaagcuccacuacacgugaggacuaguuauaagacugacuagcccgaugggccucccaacgggcccuccuccccuccuugcaccgagauuaauagaucuaaaaaaaaaaaaaaaaaaaaaaaaaaaaaaaaaaaaaaaaaaaaaaaaaaaaaaaaaaaaaaaaaaaaaaaaaaaaaaaaaaaaaaaaaaaaaaaaaaaa

SEQ ID NO: 25751 - RNA, 4017 nt, Artificial Sequence
  SARS-CoV-2/Wuhan/WIV05/2019__EPI_ISL_402128 spike protein mRNA gc (1-1273)(K986P_V987P_K986P_V987P_L18F_T20N_P26S_D138Y_R190S_K417T _E484K_N501Y_D614G_H655Y_T1027I)
aggagaaagcuuaccauguucguguuccugguccuccugccccuggugagcucccagugcgugaacuucaccaaccgcacccagcucccgagcgccuacacgaacuccuucacccggggcgucuacuaccccgacaagguguuccgcagcuccgugcugcacagcacccaggaccuguuccuccccuucuucuccaacgucaccugguuccacgccauccacgugagcgggacgaacggcaccaagcgguucgacaaccccgugcugccguucaacgacggggucuacuucgcguccaccgagaaguccaacaucauccgcggcuggaucuucgggaccacgcuggacuccaagacccagagccuccugaucgugaacaacgccaccaacguggucaucaaggugugcgaguuccaguucugcaacuaccccuuccugggcguguacuaccacaagaacaacaaguccuggauggagagcgaguuccgggucuacuccagcgccaacaacugcaccuucgaguacgugucccagcccuuccucauggaccuggagggcaagcaggggaacuucaagaaccugagcgaguucguguucaagaacaucgacggcuacuucaagaucuacuccaagcacacgcccaucaaccucguccgcgaccugccgcagggguucagcgcccuggagccccucguggaccugcccaucggcaucaacaucacccgguuccagacccugcucgcccugcaccgcagcuaccugacccccggggacuccagcuccggcuggacggcgggcgccgccgccuacuacgugggguaccuccagccgcggaccuuccugcugaaguacaacgagaacggcaccaucaccgacgcggucgacugcgcccucgacccccugagcgagacgaagugcacccugaaguccuucaccguggagaaggggaucuaccagaccagcaacuuccgcgugcagcccacggaguccaucguccgguuccccaacaucaccaaccucugcccguucggcgagguguucaacgccacccgcuucgccagcgucuacgccuggaaccggaagcgcaucuccaacugcguggcggacuacagcgugcuguacaacuccgccagcuucuccaccuucaagugcuacggcgucagccccacgaagcugaacgaccucugcuucaccaacguguacgccgacuccuucgugauccgcggggacgagguccggcagaucgcccccggccagaccgggaccaucgccgacuacaacuacaagcugcccgacgacuucacgggcugcgugaucgcguggaacagcaacaaccuggacuccaaggucgggggcaacuacaacuaccucuaccggcuguuccgcaagagcaaccugaagccguucgagcgggacaucuccaccgagaucuaccaggccggcagcacccccugcaacggggugaagggcuucaacugcuacuucccccuccagagcuacggguuccagcccaccuacggcgugggguaccagccguaccgcguggucgugcuguccuucgagcugcuccacgcccccgccacggugugcggccccaagaaguccaccaaccuggucaagaacaagugcgugaacuucaacuucaacggccugaccgggaccggcgugcucaccgagagcaacaagaaguuccugcccuuccagcaguucgggcgggacaucgccgacacgaccgacgcgguccgcgacccgcagacccuggagauccuggacaucacccccugcagcuucggcgggguguccgugaucacgcccggcaccaacaccagcaaccaggucgccgugcucuaccagggcgugaacugcaccgaggucccgguggccauccacgccgaccagcugacgcccaccuggcgcguguacuccaccgggagcaacgucuuccagacccgggccggcugccugaucggggcggaguacgugaacaacuccuacgagugcgacauccccaucggcgccggcaucugcgccagcuaccagacgcagaccaacagcccccgccgggcccgcagcguggcgucccagagcaucaucgccuacaccaugucccucggggccgagaacagcgucgccuacuccaacaacagcaucgccaucccgaccaacuucacgaucagcgugaccaccgagauccugcccguguccaugaccaagacgagcgucgacugcaccauguacaucugcggcgacuccaccgagugcagcaaccugcuccugcaguacggguccuucugcacccagcugaaccgggcgcucacgggcaucgccguggagcaggacaagaacacccaggagguguucgcccaggucaagcagaucuacaagaccccgcccaucaaggacuucgggggcuucaacuucagccagauccugcccgaccccuccaagcccagcaagcgcuccuucaucgaggaccuccuguucaacaaggugacccuggccgacgccggcuucaucaagcaguacggggacugccugggcgacaucgcggcccgggaccucaucugcgcccagaaguucaacgggcugacggugcugcccccgcuccugaccgacgagaugaucgcccaguacaccagcgcccugcucgcgggcaccaucacguccggguggaccuucggcgccggcgccgcccugcagauccccuucgcgaugcagauggccuaccgcuucaacgggaucggcgucacccagaacgugcuguacgagaaccagaagcucaucgccaaccaguucaacagcgccaucgggaagauccaggacucccugagcuccaccgccagcgcgcugggcaagcuccaggacguggucaaccagaacgcccaggcccugaacacgcuggugaagcagcucuccagcaacuucggggccaucuccagcgugcugaacgacauccugagccggcucgacccgcccgaggccgagguccagaucgaccgccugaucaccggccggcugcagucccuccagaccuacgugacccagcagcugauccgcgcggccgagauccgggccagcgccaaccuggccgcgaucaagauguccgagugcgugcucggccagagcaagcgcgucgacuucugcgggaagggcuaccaccugauguccuucccccagagcgcgccccacggggugguguuccugcacgucaccuacgugcccgcccaggagaagaacuucacgaccgcccccgccaucugccacgacggcaaggcccacuucccgcgggagggggucuucguguccaacggcacccacugguucgugacccagcgcaacuucuacgagccccagaucaucacgaccgacaacaccuucgucagcggcaacugcgacguggugaucgggaucgucaacaacaccguguacgacccccuccagcccgagcuggacuccuucaaggaggagcuggacaaguacuucaagaaccacacgagcccggacguggaccucggcgacaucuccgggaucaacgccagcgucgugaacauccagaaggagaucgaccggcugaacgagguggccaagaaccugaacgagucccucaucgaccugcaggagcugggcaaguacgagcaguacaucaaguggcccugguacaucuggcucggcuucaucgccgggcugaucgcgaucgucauggugaccaucaugcugugcugcaugaccagcugcugcuccugccucaagggcugcugcagcugcggguccugcugcaaguucgacgaggacgacagcgagcccgugcugaagggcgucaagcugcacuacaccugaggacuaguuauaagacugacuagcccgaugggccucccaacgggcccuccuccccuccuugcaccgagauuaauagaucuaaaaaaaaaaaaaaaaaaaaaaaaaaaaaaaaaaaaaaaaaaaaaaaaaaaaaaaaaaaaaaaaaaaaaaaaaaaaaaaaaaaaaaaaaaaaaaaaaaaa

SEQ ID NO: 25752 - RNA, 4017 nt, Artificial Sequence
  SARS-CoV-2/Wuhan/WIV05/2019__EPI_ISL_402128 spike protein mRNA gc (1-1273)(K986P_V987P_K986P_V987P_S13I_W152C_L452R_D614G)
aggagaaagcuuaccauguucguguuccugguccuccugccccuggugagcauccagugcgugaaccucaccacccgcacgcagcugccgcccgccuacaccaacuccuucacccggggcgucuacuaccccgacaagguguuccgcagcuccgugcugcacagcacccaggaccucuuccugcccuucuucuccaacgucacgugguuccacgccauccacgugagcgggaccaacggcaccaagcgguucgacaacccggugcugcccuucaacgacggggucuacuucgcguccaccgagaaguccaacaucauccgcggcuggaucuucgggacgacccucgacagcaagacccagagccugcugaucgugaacaacgccaccaacguggucaucaaggugugcgaguuccaguucugcaacgaccccuuccucggcguguacuaccacaagaacaacaaguccugcauggagagcgaguuccgggucuacuccagcgccaacaacugcacguucgaguacgugucccagcccuuccugauggaccuggagggcaagcaggggaacuucaagaaccuccgcgaguucguguucaagaacaucgacggcuacuucaagaucuacagcaagcacaccccgaucaaccugguccgggaccugccccagggguucuccgcccucgagccccugguggaccugcccaucggcaucaacaucacccgcuuccagacccuccuggcccugcaccggagcuaccucacgccgggggacuccagcagcggcuggaccgcgggcgccgccgccuacuacgugggguaccugcagccccgcaccuuccugcucaaguacaacgagaacggcaccaucacggacgcggucgacugcgcccuggacccccuguccgagaccaagugcacccucaagagcuucaccguggagaaggggaucuaccagacguccaacuuccgggugcagcccaccgagagcaucguccgcuucccgaacaucaccaaccugugccccuucggcgagguguucaacgccacccgguucgccuccgucuacgccuggaaccgcaagcggaucagcaacugcguggcggacuacuccgugcuguacaacagcgccuccuucagcacguucaagugcuacggcgucucccccaccaagcucaacgaccugugcuucaccaacguguacgccgacagcuucgugauccgcggggacgagguccggcagaucgcccccggccagaccgggaagaucgccgacuacaacuacaagcugccggacgacuucacgggcugcgugaucgcguggaacuccaacaaccucgacagcaaggucgggggcaacuacaacuaccgcuaccggcuguuccgcaaguccaaccugaagcccuucgagcgggacaucagcaccgagaucuaccaggccggcuccacccccugcaacgggguggagggcuucaacugcuacuucccccuccagagcuacggguuccagccgaccaacggcgugggguaccagcccuaccgcguggucgugcuguccuucgagcugcuccacgcccccgccacggugugcggccccaagaaguccaccaaccuggucaagaacaagugcgugaacuucaacuucaacggccugaccgggaccggcgugcucaccgagagcaacaagaaguuccugccguuccagcaguucgggcgcgacaucgccgacacgaccgacgcgguccgggacccccagacccuggagauccuggacaucacccccugcagcuucggcggggugagcgugaucacgccgggcaccaacaccuccaaccaggucgccgugcucuaccagggcgugaacugcaccgagguccccguggccauccacgccgaccagcugacgcccaccuggcgcguguacagcaccggguccaacgucuuccagacccgggccggcugccugaucggggcggagcacgugaacaacagcuacgagugcgacauccccaucggcgccggcaucugcgccuccuaccagacgcagaccaacagcccgcgccgggcccgcuccguggcgagccaguccaucaucgccuacaccaugagccucggggccgagaacuccgucgccuacagcaacaacuccaucgccauccccaccaacuucacgaucagcgugaccaccgagauccugcccguguccaugaccaagacgagcgucgacugcaccauguacaucugcggcgacagcaccgagugcuccaaccugcuccugcaguacgggagcuucugcacccagcugaaccgggcgcucacgggcaucgccguggagcaggacaagaacacccaggagguguucgcccaggucaagcagaucuacaagacgcccccgaucaaggacuucgggggcuucaacuucucccagauccugcccgaccccagcaagcccuccaagcgcagcuucaucgaggaccuccuguucaacaaggugacccuggccgacgccggcuucaucaagcaguacggggacugccugggcgacaucgcggcccgggaccucaucugcgcccagaaguucaacgggcugaccgugcugccgccccuccugaccgacgagaugaucgcccaguacaccuccgcccugcucgcgggcaccaucacgagcggguggaccuucggcgccggcgccgcccugcagauccccuucgcgaugcagauggccuaccgcuucaacgggaucggcgucacccagaacgugcuguacgagaaccagaagcucaucgccaaccaguucaacuccgccaucgggaagauccaggacagccuguccagcaccgccuccgcgcugggcaagcuccaggacguggucaaccagaacgcccaggcccugaacacgcuggugaagcagcucagcuccaacuucggggccaucagcuccgugcugaacgacauccugagccggcucgacccgcccgaggccgagguccagaucgaccgccugaucaccggccggcugcagucccuccagaccuacgugacccagcagcugauccgcgcggccgagauccgggccagcgccaaccuggccgcgaccaagaugagcgagugcgugcucggccaguccaagcgcgucgacuucugcgggaagggcuaccaccugaugagcuucccccaguccgcgccccacggggugguguuccugcacgucacguacgugcccgcccaggagaagaacuucaccaccgccccggccaucugccacgacggcaaggcccacuucccccgggagggggucuucgugagcaacggcacccacugguucgugacgcagcgcaacuucuacgagccccagaucaucaccaccgacaacaccuucgucuccggcaacugcgacguggugaucgggaucgucaacaacacgguguacgacccccuccagccggagcuggacagcuucaaggaggagcuggacaaguacuucaagaaccacaccucccccgacguggaccucggcgacaucagcgggaucaacgccuccgucgugaacauccagaaggagaucgaccggcugaacgagguggccaagaaccugaacgagagccucaucgaccugcaggagcugggcaaguacgagcaguacaucaaguggcccugguacaucuggcucggcuucaucgccgggcugaucgcgaucgucauggugaccaucaugcugugcugcaugaccuccugcugcagcugccucaagggcugcugcuccugcgggagcugcugcaaguucgacgaggacgacuccgagccggugcugaagggcgucaagcugcacuacacgugaggacuaguuauaagacugacuagcccgaugggccucccaacgggcccuccuccccuccuugcaccgagauuaauagaucuaaaaaaaaaaaaaaaaaaaaaaaaaaaaaaaaaaaaaaaaaaaaaaaaaaaaaaaaaaaaaaaaaaaaaaaaaaaaaaaaaaaaaaaaaaaaaaaaaaaa

SEQ ID NO: 25753 - RNA, 4017 nt, Artificial Sequence
  SARS-CoV-2/Wuhan/WIV05/2019__EPI_ISL_402128 spike protein mRNA gc (1-1273)(K986P_V987P)
aggagaaagcuuaccauguucguguuccuggugcugcugccccuggugagcagccagugcgugaaccugaccacccggacccagcugccaccagccuacaccaacagcuucacccggggcgucuacuaccccgacaagguguuccggagcagcguccugcacagcacccaggaccuguuccugcccuucuucagcaacgugaccugguuccacgccauccacgugagcggcaccaacggcaccaagcgguucgacaaccccgugcugcccuucaacgacggcguguacuucgccagcaccgagaagagcaacaucauccggggcuggaucuucggcaccacccuggacagcaagacccagagccugcugaucgugaauaacgccaccaacguggugaucaaggugugcgaguuccaguucugcaacgaccccuuccugggcguguacuaccacaagaacaacaagagcuggauggagagcgaguuccggguguacagcagcgccaacaacugcaccuucgaguacgugagccagcccuuccugauggaccuggagggcaagcagggcaacuucaagaaccugcgggaguucguguucaagaacaucgacggcuacuucaagaucuacagcaagcacaccccaaucaaccuggugcgggaucugccccagggcuucucagcccuggagccccugguggaccugcccaucggcaucaacaucacccgguuccagacccugcuggcccugcaccggagcuaccugaccccaggcgacagcagcagcggguggacagcaggcgcggcugcuuacuacgugggcuaccugcagccccggaccuuccugcugaaguacaacgagaacggcaccaucaccgacgccguggacugcgcccuggacccucugagcgagaccaagugcacccugaagagcuucaccguggagaagggcaucuaccagaccagcaacuuccgggugcagcccaccgagagcaucgugcgguuccccaacaucaccaaccugugccccuucggcgagguguucaacgccacccgguucgccagcguguacgccuggaaccggaagcggaucagcaacugcguggccgacuacagcgugcuguacaacagcgccagcuucagcaccuucaagugcuacggcgugagccccaccaagcugaacgaccugugcuucaccaacguguacgccgacagcuucgugauccguggcgacgaggugcggcagaucgcacccggccagacaggcaagaucgccgacuacaacuacaagcugcccgacgacuucaccggcugcgugaucgccuggaacagcaacaaccucgacagcaaggugggcggcaacuacaacuaccuguaccggcuguuccggaagagcaaccugaagcccuucgagcgggacaucagcaccgagaucuaccaagccggcuccaccccuugcaacggcguggagggcuucaacugcuacuucccucugcagagcuacggcuuccagcccaccaacggcgugggcuaccagcccuaccgggugguggugcugagcuucgagcugcugcacgccccagccaccguguguggccccaagaagagcaccaaccuggugaagaacaagugcgugaacuucaacuucaacggccuuaccggcaccggcgugcugaccgagagcaacaagaaauuccugcccuuucagcaguucggccgggacaucgccgacaccaccgacgcugugcgggauccccagacccuggagauccuggacaucaccccuugcagcuucggcggcgugagcgugaucaccccaggcaccaacaccagcaaccagguggccgugcuguaccaggacgugaacugcaccgaggugcccguggccauccacgccgaccagcugacacccaccuggcgggucuacagcaccggcagcaacguguuccagacccgggccgguugccugaucggcgccgagcacgugaacaacagcuacgagugcgacauccccaucggcgccggcaucugugccagcuaccagacccagaccaauucaccccggagggcaaggagcguggccagccagagcaucaucgccuacaccaugagccugggcgccgagaacagcguggccuacagcaacaacagcaucgccauccccaccaacuucaccaucagcgugaccaccgagauucugcccgugagcaugaccaagaccagcguggacugcaccauguacaucugcggcgacagcaccgagugcagcaaccugcugcugcaguacggcagcuucugcacccagcugaaccgggcccugaccggcaucgccguggagcaggacaagaacacccaggagguguucgcccaggugaagcagaucuacaagaccccucccaucaaggacuucggcggcuucaacuucagccagauccugcccgaccccagcaagcccagcaagcggagcuucaucgaggaccugcuguucaacaaggugacccuagccgacgccggcuucaucaagcaguacggcgacugccucggcgacauagccgcccgggaccugaucugcgcccagaaguucaacggccugaccgugcugccuccccugcugaccgacgagaugaucgcccaguacaccagcgcccuguuagccggaaccaucaccagcggcuggacuuucggcgcuggagccgcucugcagauccccuucgccaugcagauggccuaccgguucaacggcaucggcgugacccagaacgugcuguacgagaaccagaagcugaucgccaaccaguucaacagcgccaucggcaagauccaggacagccugagcagcaccgcuagcgcccugggcaagcugcaggacguggugaaccagaacgcccaggcccugaacacccuggugaagcagcugagcagcaacuucggcgccaucagcagcgugcugaacgacauccugagccggcuggacccucccgaggccgaggugcagaucgaccggcugaucacuggccggcugcagagccugcagaccuacgugacccagcagcugauccgggccgccgagauucgggccagcgccaaccuggccgccaccaagaugagcgagugcgugcugggccagagcaagcggguggacuucugcggcaagggcuaccaccugaugagcuuuccccagagcgcaccccacggagugguguuccugcacgugaccuacgugcccgcccaggagaagaacuucaccaccgccccagccaucugccacgacggcaaggcccacuuuccccgggagggcguguucgugagcaacggcacccacugguucgugacccagcggaacuucuacgagccccagaucaucaccaccgacaacaccuucgugagcggcaacugcgacguggugaucggcaucgugaacaacaccguguacgauccccugcagcccgagcuggacagcuucaaggaggagcuggacaaguacuucaagaaucacaccagccccgacguggaccugggcgacaucagcggcaucaacgccagcguggugaacauccagaaggagaucgaucggcugaacgagguggccaagaaccugaacgagagccugaucgaccugcaggagcugggcaaguacgagcaguacaucaaguggcccugguacaucuggcugggcuucaucgccggccugaucgccaucgugauggugaccaucaugcugugcugcaugaccagcugcugcagcugccugaagggcuguugcagcugcggcagcugcugcaaguucgacgaggacgacagcgagcccgugcugaagggcgugaagcugcacuacaccugaggacuaguuauaagacugacuagcccgaugggccucccaacgggcccuccuccccuccuugcaccgagauuaauagaucuaaaaaaaaaaaaaaaaaaaaaaaaaaaaaaaaaaaaaaaaaaaaaaaaaaaaaaaaaaaaaaaaaaaaaaaaaaaaaaaaaaaaaaaaaaaaaaaaaaaa

SEQ ID NO: 25754 - RNA, 4017 nt, Artificial Sequence
  SARS-CoV-2/Wuhan/WIV05/2019__EPI_ISL_402128 spike protein mRNA gc (1-1273)(K986P_V987P_ D614G)
aggagaaagcuuaccauguucguguuccuggugcugcugccccuggugagcagccagugcgugaaccugaccacccggacccagcugccaccagccuacaccaacagcuucacccggggcgucuacuaccccgacaagguguuccggagcagcguccugcacagcacccaggaccuguuccugcccuucuucagcaacgugaccugguuccacgccauccacgugagcggcaccaacggcaccaagcgguucgacaaccccgugcugcccuucaacgacggcguguacuucgccagcaccgagaagagcaacaucauccggggcuggaucuucggcaccacccuggacagcaagacccagagccugcugaucgugaauaacgccaccaacguggugaucaaggugugcgaguuccaguucugcaacgaccccuuccugggcguguacuaccacaagaacaacaagagcuggauggagagcgaguuccggguguacagcagcgccaacaacugcaccuucgaguacgugagccagcccuuccugauggaccuggagggcaagcagggcaacuucaagaaccugcgggaguucguguucaagaacaucgacggcuacuucaagaucuacagcaagcacaccccaaucaaccuggugcgggaucugccccagggcuucucagcccuggagccccugguggaccugcccaucggcaucaacaucacccgguuccagacccugcuggcccugcaccggagcuaccugaccccaggcgacagcagcagcggguggacagcaggcgcggcugcuuacuacgugggcuaccugcagccccggaccuuccugcugaaguacaacgagaacggcaccaucaccgacgccguggacugcgcccuggacccucugagcgagaccaagugcacccugaagagcuucaccguggagaagggcaucuaccagaccagcaacuuccgggugcagcccaccgagagcaucgugcgguuccccaacaucaccaaccugugccccuucggcgagguguucaacgccacccgguucgccagcguguacgccuggaaccggaagcggaucagcaacugcguggccgacuacagcgugcuguacaacagcgccagcuucagcaccuucaagugcuacggcgugagccccaccaagcugaacgaccugugcuucaccaacguguacgccgacagcuucgugauccguggcgacgaggugcggcagaucgcacccggccagacaggcaagaucgccgacuacaacuacaagcugcccgacgacuucaccggcugcgugaucgccuggaacagcaacaaccucgacagcaaggugggcggcaacuacaacuaccuguaccggcuguuccggaagagcaaccugaagcccuucgagcgggacaucagcaccgagaucuaccaagccggcuccaccccuugcaacggcguggagggcuucaacugcuacuucccucugcagagcuacggcuuccagcccaccaacggcgugggcuaccagcccuaccgggugguggugcugagcuucgagcugcugcacgccccagccaccguguguggccccaagaagagcaccaaccuggugaagaacaagugcgugaacuucaacuucaacggccuuaccggcaccggcgugcugaccgagagcaacaagaaauuccugcccuuucagcaguucggccgggacaucgccgacaccaccgacgcugugcgggauccccagacccuggagauccuggacaucaccccuugcagcuucggcggcgugagcgugaucaccccaggcaccaacaccagcaaccagguggccgugcuguaccagggcgugaacugcaccgaggugcccguggccauccacgccgaccagcugacacccaccuggcgggucuacagcaccggcagcaacguguuccagacccgggccgguugccugaucggcgccgagcacgugaacaacagcuacgagugcgacauccccaucggcgccggcaucugugccagcuaccagacccagaccaauucaccccggagggcaaggagcguggccagccagagcaucaucgccuacaccaugagccugggcgccgagaacagcguggccuacagcaacaacagcaucgccauccccaccaacuucaccaucagcgugaccaccgagauucugcccgugagcaugaccaagaccagcguggacugcaccauguacaucugcggcgacagcaccgagugcagcaaccugcugcugcaguacggcagcuucugcacccagcugaaccgggcccugaccggcaucgccguggagcaggacaagaacacccaggagguguucgcccaggugaagcagaucuacaagaccccucccaucaaggacuucggcggcuucaacuucagccagauccugcccgaccccagcaagcccagcaagcggagcuucaucgaggaccugcuguucaacaaggugacccuagccgacgccggcuucaucaagcaguacggcgacugccucggcgacauagccgcccgggaccugaucugcgcccagaaguucaacggccugaccgugcugccuccccugcugaccgacgagaugaucgcccaguacaccagcgcccuguuagccggaaccaucaccagcggcuggacuuucggcgcuggagccgcucugcagauccccuucgccaugcagauggccuaccgguucaacggcaucggcgugacccagaacgugcuguacgagaaccagaagcugaucgccaaccaguucaacagcgccaucggcaagauccaggacagccugagcagcaccgcuagcgcccugggcaagcugcaggacguggugaaccagaacgcccaggcccugaacacccuggugaagcagcugagcagcaacuucggcgccaucagcagcgugcugaacgacauccugagccggcuggacccucccgaggccgaggugcagaucgaccggcugaucacuggccggcugcagagccugcagaccuacgugacccagcagcugauccgggccgccgagauucgggccagcgccaaccuggccgccaccaagaugagcgagugcgugcugggccagagcaagcggguggacuucugcggcaagggcuaccaccugaugagcuuuccccagagcgcaccccacggagugguguuccugcacgugaccuacgugcccgcccaggagaagaacuucaccaccgccccagccaucugccacgacggcaaggcccacuuuccccgggagggcguguucgugagcaacggcacccacugguucgugacccagcggaacuucuacgagccccagaucaucaccaccgacaacaccuucgugagcggcaacugcgacguggugaucggcaucgugaacaacaccguguacgauccccugcagcccgagcuggacagcuucaaggaggagcuggacaaguacuucaagaaucacaccagccccgacguggaccugggcgacaucagcggcaucaacgccagcguggugaacauccagaaggagaucgaucggcugaacgagguggccaagaaccugaacgagagccugaucgaccugcaggagcugggcaaguacgagcaguacaucaaguggcccugguacaucuggcugggcuucaucgccggccugaucgccaucgugauggugaccaucaugcugugcugcaugaccagcugcugcagcugccugaagggcuguugcagcugcggcagcugcugcaaguucgacgaggacgacagcgagcccgugcugaagggcgugaagcugcacuacaccugaggacuaguuauaagacugacuagcccgaugggccucccaacgggcccuccuccccuccuugcaccgagauuaauagaucuaaaaaaaaaaaaaaaaaaaaaaaaaaaaaaaaaaaaaaaaaaaaaaaaaaaaaaaaaaaaaaaaaaaaaaaaaaaaaaaaaaaaaaaaaaaaaaaaaaaa

SEQ ID NO: 25755 - RNA, 4017 nt, Artificial Sequence
  SARS-CoV-2/Wuhan/WIV05/2019__EPI_ISL_402128 spike protein mRNA gc (1-1273)(K986P_V987P_A222V_D614G)
aggagaaagcuuaccauguucguguuccuggugcugcugccccuggugagcagccagugcgugaaccugaccacccggacccagcugccaccagccuacaccaacagcuucacccggggcgucuacuaccccgacaagguguuccggagcagcguccugcacagcacccaggaccuguuccugcccuucuucagcaacgugaccugguuccacgccauccacgugagcggcaccaacggcaccaagcgguucgacaaccccgugcugcccuucaacgacggcguguacuucgccagcaccgagaagagcaacaucauccggggcuggaucuucggcaccacccuggacagcaagacccagagccugcugaucgugaauaacgccaccaacguggugaucaaggugugcgaguuccaguucugcaacgaccccuuccugggcguguacuaccacaagaacaacaagagcuggauggagagcgaguuccggguguacagcagcgccaacaacugcaccuucgaguacgugagccagcccuuccugauggaccuggagggcaagcagggcaacuucaagaaccugcgggaguucguguucaagaacaucgacggcuacuucaagaucuacagcaagcacaccccaaucaaccuggugcgggaucugccccagggcuucucagugcuggagccccugguggaccugcccaucggcaucaacaucacccgguuccagacccugcuggcccugcaccggagcuaccugaccccaggcgacagcagcagcggguggacagcaggcgcggcugcuuacuacgugggcuaccugcagccccggaccuuccugcugaaguacaacgagaacggcaccaucaccgacgccguggacugcgcccuggacccucugagcgagaccaagugcacccugaagagcuucaccguggagaagggcaucuaccagaccagcaacuuccgggugcagcccaccgagagcaucgugcgguuccccaacaucaccaaccugugccccuucggcgagguguucaacgccacccgguucgccagcguguacgccuggaaccggaagcggaucagcaacugcguggccgacuacagcgugcuguacaacagcgccagcuucagcaccuucaagugcuacggcgugagccccaccaagcugaacgaccugugcuucaccaacguguacgccgacagcuucgugauccguggcgacgaggugcggcagaucgcacccggccagacaggcaagaucgccgacuacaacuacaagcugcccgacgacuucaccggcugcgugaucgccuggaacagcaacaaccucgacagcaaggugggcggcaacuacaacuaccuguaccggcuguuccggaagagcaaccugaagcccuucgagcgggacaucagcaccgagaucuaccaagccggcuccaccccuugcaacggcguggagggcuucaacugcuacuucccucugcagagcuacggcuuccagcccaccaacggcgugggcuaccagcccuaccgggugguggugcugagcuucgagcugcugcacgccccagccaccguguguggccccaagaagagcaccaaccuggugaagaacaagugcgugaacuucaacuucaacggccuuaccggcaccggcgugcugaccgagagcaacaagaaauuccugcccuuucagcaguucggccgggacaucgccgacaccaccgacgcugugcgggauccccagacccuggagauccuggacaucaccccuugcagcuucggcggcgugagcgugaucaccccaggcaccaacaccagcaaccagguggccgugcuguaccagggcgugaacugcaccgaggugcccguggccauccacgccgaccagcugacacccaccuggcgggucuacagcaccggcagcaacguguuccagacccgggccgguugccugaucggcgccgagcacgugaacaacagcuacgagugcgacauccccaucggcgccggcaucugugccagcuaccagacccagaccaauucaccccggagggcaaggagcguggccagccagagcaucaucgccuacaccaugagccugggcgccgagaacagcguggccuacagcaacaacagcaucgccauccccaccaacuucaccaucagcgugaccaccgagauucugcccgugagcaugaccaagaccagcguggacugcaccauguacaucugcggcgacagcaccgagugcagcaaccugcugcugcaguacggcagcuucugcacccagcugaaccgggcccugaccggcaucgccguggagcaggacaagaacacccaggagguguucgcccaggugaagcagaucuacaagaccccucccaucaaggacuucggcggcuucaacuucagccagauccugcccgaccccagcaagcccagcaagcggagcuucaucgaggaccugcuguucaacaaggugacccuagccgacgccggcuucaucaagcaguacggcgacugccucggcgacauagccgcccgggaccugaucugcgcccagaaguucaacggccugaccgugcugccuccccugcugaccgacgagaugaucgcccaguacaccagcgcccuguuagccggaaccaucaccagcggcuggacuuucggcgcuggagccgcucugcagauccccuucgccaugcagauggccuaccgguucaacggcaucggcgugacccagaacgugcuguacgagaaccagaagcugaucgccaaccaguucaacagcgccaucggcaagauccaggacagccugagcagcaccgcuagcgcccugggcaagcugcaggacguggugaaccagaacgcccaggcccugaacacccuggugaagcagcugagcagcaacuucggcgccaucagcagcgugcugaacgacauccugagccggcuggacccucccgaggccgaggugcagaucgaccggcugaucacuggccggcugcagagccugcagaccuacgugacccagcagcugauccgggccgccgagauucgggccagcgccaaccuggccgccaccaagaugagcgagugcgugcugggccagagcaagcggguggacuucugcggcaagggcuaccaccugaugagcuuuccccagagcgcaccccacggagugguguuccugcacgugaccuacgugcccgcccaggagaagaacuucaccaccgccccagccaucugccacgacggcaaggcccacuuuccccgggagggcguguucgugagcaacggcacccacugguucgugacccagcggaacuucuacgagccccagaucaucaccaccgacaacaccuucgugagcggcaacugcgacguggugaucggcaucgugaacaacaccguguacgauccccugcagcccgagcuggacagcuucaaggaggagcuggacaaguacuucaagaaucacaccagccccgacguggaccugggcgacaucagcggcaucaacgccagcguggugaacauccagaaggagaucgaucggcugaacgagguggccaagaaccugaacgagagccugaucgaccugcaggagcugggcaaguacgagcaguacaucaaguggcccugguacaucuggcugggcuucaucgccggccugaucgccaucgugauggugaccaucaugcugugcugcaugaccagcugcugcagcugccugaagggcuguugcagcugcggcagcugcugcaaguucgacgaggacgacagcgagcccgugcugaagggcgugaagcugcacuacaccugaggacuaguuauaagacugacuagcccgaugggccucccaacgggcccuccuccccuccuugcaccgagauuaauagaucuaaaaaaaaaaaaaaaaaaaaaaaaaaaaaaaaaaaaaaaaaaaaaaaaaaaaaaaaaaaaaaaaaaaaaaaaaaaaaaaaaaaaaaaaaaaaaaaaaaaa

SEQ ID NO: 25756 - RNA, 4017 nt, Artificial Sequence
  SARS-CoV-2/Wuhan/WIV05/2019__EPI_ISL_402128 spike protein mRNA gc (1-1273)(K986P_V987P_N439K_D614G)
aggagaaagcuuaccauguucguguuccuggugcugcugccccuggugagcagccagugcgugaaccugaccacccggacccagcugccaccagccuacaccaacagcuucacccggggcgucuacuaccccgacaagguguuccggagcagcguccugcacagcacccaggaccuguuccugcccuucuucagcaacgugaccugguuccacgccauccacgugagcggcaccaacggcaccaagcgguucgacaaccccgugcugcccuucaacgacggcguguacuucgccagcaccgagaagagcaacaucauccggggcuggaucuucggcaccacccuggacagcaagacccagagccugcugaucgugaauaacgccaccaacguggugaucaaggugugcgaguuccaguucugcaacgaccccuuccugggcguguacuaccacaagaacaacaagagcuggauggagagcgaguuccggguguacagcagcgccaacaacugcaccuucgaguacgugagccagcccuuccugauggaccuggagggcaagcagggcaacuucaagaaccugcgggaguucguguucaagaacaucgacggcuacuucaagaucuacagcaagcacaccccaaucaaccuggugcgggaucugccccagggcuucucagcccuggagccccugguggaccugcccaucggcaucaacaucacccgguuccagacccugcuggcccugcaccggagcuaccugaccccaggcgacagcagcagcggguggacagcaggcgcggcugcuuacuacgugggcuaccugcagccccggaccuuccugcugaaguacaacgagaacggcaccaucaccgacgccguggacugcgcccuggacccucugagcgagaccaagugcacccugaagagcuucaccguggagaagggcaucuaccagaccagcaacuuccgggugcagcccaccgagagcaucgugcgguuccccaacaucaccaaccugugccccuucggcgagguguucaacgccacccgguucgccagcguguacgccuggaaccggaagcggaucagcaacugcguggccgacuacagcgugcuguacaacagcgccagcuucagcaccuucaagugcuacggcgugagccccaccaagcugaacgaccugugcuucaccaacguguacgccgacagcuucgugauccguggcgacgaggugcggcagaucgcacccggccagacaggcaagaucgccgacuacaacuacaagcugcccgacgacuucaccggcugcgugaucgccuggaacagcaagaaccucgacagcaaggugggcggcaacuacaacuaccuguaccggcuguuccggaagagcaaccugaagcccuucgagcgggacaucagcaccgagaucuaccaagccggcuccaccccuugcaacggcguggagggcuucaacugcuacuucccucugcagagcuacggcuuccagcccaccaacggcgugggcuaccagcccuaccgggugguggugcugagcuucgagcugcugcacgccccagccaccguguguggccccaagaagagcaccaaccuggugaagaacaagugcgugaacuucaacuucaacggccuuaccggcaccggcgugcugaccgagagcaacaagaaauuccugcccuuucagcaguucggccgggacaucgccgacaccaccgacgcugugcgggauccccagacccuggagauccuggacaucaccccuugcagcuucggcggcgugagcgugaucaccccaggcaccaacaccagcaaccagguggccgugcuguaccagggcgugaacugcaccgaggugcccguggccauccacgccgaccagcugacacccaccuggcgggucuacagcaccggcagcaacguguuccagacccgggccgguugccugaucggcgccgagcacgugaacaacagcuacgagugcgacauccccaucggcgccggcaucugugccagcuaccagacccagaccaauucaccccggagggcaaggagcguggccagccagagcaucaucgccuacaccaugagccugggcgccgagaacagcguggccuacagcaacaacagcaucgccauccccaccaacuucaccaucagcgugaccaccgagauucugcccgugagcaugaccaagaccagcguggacugcaccauguacaucugcggcgacagcaccgagugcagcaaccugcugcugcaguacggcagcuucugcacccagcugaaccgggcccugaccggcaucgccguggagcaggacaagaacacccaggagguguucgcccaggugaagcagaucuacaagaccccucccaucaaggacuucggcggcuucaacuucagccagauccugcccgaccccagcaagcccagcaagcggagcuucaucgaggaccugcuguucaacaaggugacccuagccgacgccggcuucaucaagcaguacggcgacugccucggcgacauagccgcccgggaccugaucugcgcccagaaguucaacggccugaccgugcugccuccccugcugaccgacgagaugaucgcccaguacaccagcgcccuguuagccggaaccaucaccagcggcuggacuuucggcgcuggagccgcucugcagauccccuucgccaugcagauggccuaccgguucaacggcaucggcgugacccagaacgugcuguacgagaaccagaagcugaucgccaaccaguucaacagcgccaucggcaagauccaggacagccugagcagcaccgcuagcgcccugggcaagcugcaggacguggugaaccagaacgcccaggcccugaacacccuggugaagcagcugagcagcaacuucggcgccaucagcagcgugcugaacgacauccugagccggcuggacccucccgaggccgaggugcagaucgaccggcugaucacuggccggcugcagagccugcagaccuacgugacccagcagcugauccgggccgccgagauucgggccagcgccaaccuggccgccaccaagaugagcgagugcgugcugggccagagcaagcggguggacuucugcggcaagggcuaccaccugaugagcuuuccccagagcgcaccccacggagugguguuccugcacgugaccuacgugcccgcccaggagaagaacuucaccaccgccccagccaucugccacgacggcaaggcccacuuuccccgggagggcguguucgugagcaacggcacccacugguucgugacccagcggaacuucuacgagccccagaucaucaccaccgacaacaccuucgugagcggcaacugcgacguggugaucggcaucgugaacaacaccguguacgauccccugcagcccgagcuggacagcuucaaggaggagcuggacaaguacuucaagaaucacaccagccccgacguggaccugggcgacaucagcggcaucaacgccagcguggugaacauccagaaggagaucgaucggcugaacgagguggccaagaaccugaacgagagccugaucgaccugcaggagcugggcaaguacgagcaguacaucaaguggcccugguacaucuggcugggcuucaucgccggccugaucgccaucgugauggugaccaucaugcugugcugcaugaccagcugcugcagcugccugaagggcuguugcagcugcggcagcugcugcaaguucgacgaggacgacagcgagcccgugcugaagggcgugaagcugcacuacaccugaggacuaguuauaagacugacuagcccgaugggccucccaacgggcccuccuccccuccuugcaccgagauuaauagaucuaaaaaaaaaaaaaaaaaaaaaaaaaaaaaaaaaaaaaaaaaaaaaaaaaaaaaaaaaaaaaaaaaaaaaaaaaaaaaaaaaaaaaaaaaaaaaaaaaaaa

SEQ ID NO: 25757 - RNA, 4017 nt, Artificial Sequence
  SARS-CoV-2/Wuhan/WIV05/2019__EPI_ISL_402128 spike protein mRNA gc (1-1273)(K986P_V987P_S477N_D614G)
aggagaaagcuuaccauguucguguuccuggugcugcugccccuggugagcagccagugcgugaaccugaccacccggacccagcugccaccagccuacaccaacagcuucacccggggcgucuacuaccccgacaagguguuccggagcagcguccugcacagcacccaggaccuguuccugcccuucuucagcaacgugaccugguuccacgccauccacgugagcggcaccaacggcaccaagcgguucgacaaccccgugcugcccuucaacgacggcguguacuucgccagcaccgagaagagcaacaucauccggggcuggaucuucggcaccacccuggacagcaagacccagagccugcugaucgugaauaacgccaccaacguggugaucaaggugugcgaguuccaguucugcaacgaccccuuccugggcguguacuaccacaagaacaacaagagcuggauggagagcgaguuccggguguacagcagcgccaacaacugcaccuucgaguacgugagccagcccuuccugauggaccuggagggcaagcagggcaacuucaagaaccugcgggaguucguguucaagaacaucgacggcuacuucaagaucuacagcaagcacaccccaaucaaccuggugcgggaucugccccagggcuucucagcccuggagccccugguggaccugcccaucggcaucaacaucacccgguuccagacccugcuggcccugcaccggagcuaccugaccccaggcgacagcagcagcggguggacagcaggcgcggcugcuuacuacgugggcuaccugcagccccggaccuuccugcugaaguacaacgagaacggcaccaucaccgacgccguggacugcgcccuggacccucugagcgagaccaagugcacccugaagagcuucaccguggagaagggcaucuaccagaccagcaacuuccgggugcagcccaccgagagcaucgugcgguuccccaacaucaccaaccugugccccuucggcgagguguucaacgccacccgguucgccagcguguacgccuggaaccggaagcggaucagcaacugcguggccgacuacagcgugcuguacaacagcgccagcuucagcaccuucaagugcuacggcgugagccccaccaagcugaacgaccugugcuucaccaacguguacgccgacagcuucgugauccguggcgacgaggugcggcagaucgcacccggccagacaggcaagaucgccgacuacaacuacaagcugcccgacgacuucaccggcugcgugaucgccuggaacagcaacaaccucgacagcaaggugggcggcaacuacaacuaccuguaccggcuguuccggaagagcaaccugaagcccuucgagcgggacaucagcaccgagaucuaccaagccggcaacaccccuugcaacggcguggagggcuucaacugcuacuucccucugcagagcuacggcuuccagcccaccaacggcgugggcuaccagcccuaccgggugguggugcugagcuucgagcugcugcacgccccagccaccguguguggccccaagaagagcaccaaccuggugaagaacaagugcgugaacuucaacuucaacggccuuaccggcaccggcgugcugaccgagagcaacaagaaauuccugcccuuucagcaguucggccgggacaucgccgacaccaccgacgcugugcgggauccccagacccuggagauccuggacaucaccccuugcagcuucggcggcgugagcgugaucaccccaggcaccaacaccagcaaccagguggccgugcuguaccagggcgugaacugcaccgaggugcccguggccauccacgccgaccagcugacacccaccuggcgggucuacagcaccggcagcaacguguuccagacccgggccgguugccugaucggcgccgagcacgugaacaacagcuacgagugcgacauccccaucggcgccggcaucugugccagcuaccagacccagaccaauucaccccggagggcaaggagcguggccagccagagcaucaucgccuacaccaugagccugggcgccgagaacagcguggccuacagcaacaacagcaucgccauccccaccaacuucaccaucagcgugaccaccgagauucugcccgugagcaugaccaagaccagcguggacugcaccauguacaucugcggcgacagcaccgagugcagcaaccugcugcugcaguacggcagcuucugcacccagcugaaccgggcccugaccggcaucgccguggagcaggacaagaacacccaggagguguucgcccaggugaagcagaucuacaagaccccucccaucaaggacuucggcggcuucaacuucagccagauccugcccgaccccagcaagcccagcaagcggagcuucaucgaggaccugcuguucaacaaggugacccuagccgacgccggcuucaucaagcaguacggcgacugccucggcgacauagccgcccgggaccugaucugcgcccagaaguucaacggccugaccgugcugccuccccugcugaccgacgagaugaucgcccaguacaccagcgcccuguuagccggaaccaucaccagcggcuggacuuucggcgcuggagccgcucugcagauccccuucgccaugcagauggccuaccgguucaacggcaucggcgugacccagaacgugcuguacgagaaccagaagcugaucgccaaccaguucaacagcgccaucggcaagauccaggacagccugagcagcaccgcuagcgcccugggcaagcugcaggacguggugaaccagaacgcccaggcccugaacacccuggugaagcagcugagcagcaacuucggcgccaucagcagcgugcugaacgacauccugagccggcuggacccucccgaggccgaggugcagaucgaccggcugaucacuggccggcugcagagccugcagaccuacgugacccagcagcugauccgggccgccgagauucgggccagcgccaaccuggccgccaccaagaugagcgagugcgugcugggccagagcaagcggguggacuucugcggcaagggcuaccaccugaugagcuuuccccagagcgcaccccacggagugguguuccugcacgugaccuacgugcccgcccaggagaagaacuucaccaccgccccagccaucugccacgacggcaaggcccacuuuccccgggagggcguguucgugagcaacggcacccacugguucgugacccagcggaacuucuacgagccccagaucaucaccaccgacaacaccuucgugagcggcaacugcgacguggugaucggcaucgugaacaacaccguguacgauccccugcagcccgagcuggacagcuucaaggaggagcuggacaaguacuucaagaaucacaccagccccgacguggaccugggcgacaucagcggcaucaacgccagcguggugaacauccagaaggagaucgaucggcugaacgagguggccaagaaccugaacgagagccugaucgaccugcaggagcugggcaaguacgagcaguacaucaaguggcccugguacaucuggcugggcuucaucgccggccugaucgccaucgugauggugaccaucaugcugugcugcaugaccagcugcugcagcugccugaagggcuguugcagcugcggcagcugcugcaaguucgacgaggacgacagcgagcccgugcugaagggcgugaagcugcacuacaccugaggacuaguuauaagacugacuagcccgaugggccucccaacgggcccuccuccccuccuugcaccgagauuaauagaucuaaaaaaaaaaaaaaaaaaaaaaaaaaaaaaaaaaaaaaaaaaaaaaaaaaaaaaaaaaaaaaaaaaaaaaaaaaaaaaaaaaaaaaaaaaaaaaaaaaaa

SEQ ID NO: 25758 - RNA, 4017 nt, Artificial Sequence
  SARS-CoV-2/Wuhan/WIV05/2019__EPI_ISL_402128 spike protein mRNA gc (1-1273)(K986P_V987P_N501Y_D614G)
aggagaaagcuuaccauguucguguuccuggugcugcugccccuggugagcagccagugcgugaaccugaccacccggacccagcugccaccagccuacaccaacagcuucacccggggcgucuacuaccccgacaagguguuccggagcagcguccugcacagcacccaggaccuguuccugcccuucuucagcaacgugaccugguuccacgccauccacgugagcggcaccaacggcaccaagcgguucgacaaccccgugcugcccuucaacgacggcguguacuucgccagcaccgagaagagcaacaucauccggggcuggaucuucggcaccacccuggacagcaagacccagagccugcugaucgugaauaacgccaccaacguggugaucaaggugugcgaguuccaguucugcaacgaccccuuccugggcguguacuaccacaagaacaacaagagcuggauggagagcgaguuccggguguacagcagcgccaacaacugcaccuucgaguacgugagccagcccuuccugauggaccuggagggcaagcagggcaacuucaagaaccugcgggaguucguguucaagaacaucgacggcuacuucaagaucuacagcaagcacaccccaaucaaccuggugcgggaucugccccagggcuucucagcccuggagccccugguggaccugcccaucggcaucaacaucacccgguuccagacccugcuggcccugcaccggagcuaccugaccccaggcgacagcagcagcggguggacagcaggcgcggcugcuuacuacgugggcuaccugcagccccggaccuuccugcugaaguacaacgagaacggcaccaucaccgacgccguggacugcgcccuggacccucugagcgagaccaagugcacccugaagagcuucaccguggagaagggcaucuaccagaccagcaacuuccgggugcagcccaccgagagcaucgugcgguuccccaacaucaccaaccugugccccuucggcgagguguucaacgccacccgguucgccagcguguacgccuggaaccggaagcggaucagcaacugcguggccgacuacagcgugcuguacaacagcgccagcuucagcaccuucaagugcuacggcgugagccccaccaagcugaacgaccugugcuucaccaacguguacgccgacagcuucgugauccguggcgacgaggugcggcagaucgcacccggccagacaggcaagaucgccgacuacaacuacaagcugcccgacgacuucaccggcugcgugaucgccuggaacagcaacaaccucgacagcaaggugggcggcaacuacaacuaccuguaccggcuguuccggaagagcaaccugaagcccuucgagcgggacaucagcaccgagaucuaccaagccggcuccaccccuugcaacggcguggagggcuucaacugcuacuucccucugcagagcuacggcuuccagcccaccuacggcgugggcuaccagcccuaccgggugguggugcugagcuucgagcugcugcacgccccagccaccguguguggccccaagaagagcaccaaccuggugaagaacaagugcgugaacuucaacuucaacggccuuaccggcaccggcgugcugaccgagagcaacaagaaauuccugcccuuucagcaguucggccgggacaucgccgacaccaccgacgcugugcgggauccccagacccuggagauccuggacaucaccccuugcagcuucggcggcgugagcgugaucaccccaggcaccaacaccagcaaccagguggccgugcuguaccagggcgugaacugcaccgaggugcccguggccauccacgccgaccagcugacacccaccuggcgggucuacagcaccggcagcaacguguuccagacccgggccgguugccugaucggcgccgagcacgugaacaacagcuacgagugcgacauccccaucggcgccggcaucugugccagcuaccagacccagaccaauucaccccggagggcaaggagcguggccagccagagcaucaucgccuacaccaugagccugggcgccgagaacagcguggccuacagcaacaacagcaucgccauccccaccaacuucaccaucagcgugaccaccgagauucugcccgugagcaugaccaagaccagcguggacugcaccauguacaucugcggcgacagcaccgagugcagcaaccugcugcugcaguacggcagcuucugcacccagcugaaccgggcccugaccggcaucgccguggagcaggacaagaacacccaggagguguucgcccaggugaagcagaucuacaagaccccucccaucaaggacuucggcggcuucaacuucagccagauccugcccgaccccagcaagcccagcaagcggagcuucaucgaggaccugcuguucaacaaggugacccuagccgacgccggcuucaucaagcaguacggcgacugccucggcgacauagccgcccgggaccugaucugcgcccagaaguucaacggccugaccgugcugccuccccugcugaccgacgagaugaucgcccaguacaccagcgcccuguuagccggaaccaucaccagcggcuggacuuucggcgcuggagccgcucugcagauccccuucgccaugcagauggccuaccgguucaacggcaucggcgugacccagaacgugcuguacgagaaccagaagcugaucgccaaccaguucaacagcgccaucggcaagauccaggacagccugagcagcaccgcuagcgcccugggcaagcugcaggacguggugaaccagaacgcccaggcccugaacacccuggugaagcagcugagcagcaacuucggcgccaucagcagcgugcugaacgacauccugagccggcuggacccucccgaggccgaggugcagaucgaccggcugaucacuggccggcugcagagccugcagaccuacgugacccagcagcugauccgggccgccgagauucgggccagcgccaaccuggccgccaccaagaugagcgagugcgugcugggccagagcaagcggguggacuucugcggcaagggcuaccaccugaugagcuuuccccagagcgcaccccacggagugguguuccugcacgugaccuacgugcccgcccaggagaagaacuucaccaccgccccagccaucugccacgacggcaaggcccacuuuccccgggagggcguguucgugagcaacggcacccacugguucgugacccagcggaacuucuacgagccccagaucaucaccaccgacaacaccuucgugagcggcaacugcgacguggugaucggcaucgugaacaacaccguguacgauccccugcagcccgagcuggacagcuucaaggaggagcuggacaaguacuucaagaaucacaccagccccgacguggaccugggcgacaucagcggcaucaacgccagcguggugaacauccagaaggagaucgaucggcugaacgagguggccaagaaccugaacgagagccugaucgaccugcaggagcugggcaaguacgagcaguacaucaaguggcccugguacaucuggcugggcuucaucgccggccugaucgccaucgugauggugaccaucaugcugugcugcaugaccagcugcugcagcugccugaagggcuguugcagcugcggcagcugcugcaaguucgacgaggacgacagcgagcccgugcugaagggcgugaagcugcacuacaccugaggacuaguuauaagacugacuagcccgaugggccucccaacgggcccuccuccccuccuugcaccgagauuaauagaucuaaaaaaaaaaaaaaaaaaaaaaaaaaaaaaaaaaaaaaaaaaaaaaaaaaaaaaaaaaaaaaaaaaaaaaaaaaaaaaaaaaaaaaaaaaaaaaaaaaaa

SEQ ID NO: 25759 - RNA, 4011 nt, Artificial Sequence
  SARS-CoV-2/Wuhan/WIV05/2019__EPI_ISL_402128 spike protein mRNA gc (1-1273)(K986P_V987P_H69del_V70del_D614G)
aggagaaagcuuaccauguucguguuccuggugcugcugccccuggugagcagccagugcgugaaccugaccacccggacccagcugccaccagccuacaccaacagcuucacccggggcgucuacuaccccgacaagguguuccggagcagcguccugcacagcacccaggaccuguuccugcccuucuucagcaacgugaccugguuccacgccaucagcggcaccaacggcaccaagcgguucgacaaccccgugcugcccuucaacgacggcguguacuucgccagcaccgagaagagcaacaucauccggggcuggaucuucggcaccacccuggacagcaagacccagagccugcugaucgugaauaacgccaccaacguggugaucaaggugugcgaguuccaguucugcaacgaccccuuccugggcguguacuaccacaagaacaacaagagcuggauggagagcgaguuccggguguacagcagcgccaacaacugcaccuucgaguacgugagccagcccuuccugauggaccuggagggcaagcagggcaacuucaagaaccugcgggaguucguguucaagaacaucgacggcuacuucaagaucuacagcaagcacaccccaaucaaccuggugcgggaucugccccagggcuucucagcccuggagccccugguggaccugcccaucggcaucaacaucacccgguuccagacccugcuggcccugcaccggagcuaccugaccccaggcgacagcagcagcggguggacagcaggcgcggcugcuuacuacgugggcuaccugcagccccggaccuuccugcugaaguacaacgagaacggcaccaucaccgacgccguggacugcgcccuggacccucugagcgagaccaagugcacccugaagagcuucaccguggagaagggcaucuaccagaccagcaacuuccgggugcagcccaccgagagcaucgugcgguuccccaacaucaccaaccugugccccuucggcgagguguucaacgccacccgguucgccagcguguacgccuggaaccggaagcggaucagcaacugcguggccgacuacagcgugcuguacaacagcgccagcuucagcaccuucaagugcuacggcgugagccccaccaagcugaacgaccugugcuucaccaacguguacgccgacagcuucgugauccguggcgacgaggugcggcagaucgcacccggccagacaggcaagaucgccgacuacaacuacaagcugcccgacgacuucaccggcugcgugaucgccuggaacagcaacaaccucgacagcaaggugggcggcaacuacaacuaccuguaccggcuguuccggaagagcaaccugaagcccuucgagcgggacaucagcaccgagaucuaccaagccggcuccaccccuugcaacggcguggagggcuucaacugcuacuucccucugcagagcuacggcuuccagcccaccaacggcgugggcuaccagcccuaccgggugguggugcugagcuucgagcugcugcacgccccagccaccguguguggccccaagaagagcaccaaccuggugaagaacaagugcgugaacuucaacuucaacggccuuaccggcaccggcgugcugaccgagagcaacaagaaauuccugcccuuucagcaguucggccgggacaucgccgacaccaccgacgcugugcgggauccccagacccuggagauccuggacaucaccccuugcagcuucggcggcgugagcgugaucaccccaggcaccaacaccagcaaccagguggccgugcuguaccagggcgugaacugcaccgaggugcccguggccauccacgccgaccagcugacacccaccuggcgggucuacagcaccggcagcaacguguuccagacccgggccgguugccugaucggcgccgagcacgugaacaacagcuacgagugcgacauccccaucggcgccggcaucugugccagcuaccagacccagaccaauucaccccggagggcaaggagcguggccagccagagcaucaucgccuacaccaugagccugggcgccgagaacagcguggccuacagcaacaacagcaucgccauccccaccaacuucaccaucagcgugaccaccgagauucugcccgugagcaugaccaagaccagcguggacugcaccauguacaucugcggcgacagcaccgagugcagcaaccugcugcugcaguacggcagcuucugcacccagcugaaccgggcccugaccggcaucgccguggagcaggacaagaacacccaggagguguucgcccaggugaagcagaucuacaagaccccucccaucaaggacuucggcggcuucaacuucagccagauccugcccgaccccagcaagcccagcaagcggagcuucaucgaggaccugcuguucaacaaggugacccuagccgacgccggcuucaucaagcaguacggcgacugccucggcgacauagccgcccgggaccugaucugcgcccagaaguucaacggccugaccgugcugccuccccugcugaccgacgagaugaucgcccaguacaccagcgcccuguuagccggaaccaucaccagcggcuggacuuucggcgcuggagccgcucugcagauccccuucgccaugcagauggccuaccgguucaacggcaucggcgugacccagaacgugcuguacgagaaccagaagcugaucgccaaccaguucaacagcgccaucggcaagauccaggacagccugagcagcaccgcuagcgcccugggcaagcugcaggacguggugaaccagaacgcccaggcccugaacacccuggugaagcagcugagcagcaacuucggcgccaucagcagcgugcugaacgacauccugagccggcuggacccucccgaggccgaggugcagaucgaccggcugaucacuggccggcugcagagccugcagaccuacgugacccagcagcugauccgggccgccgagauucgggccagcgccaaccuggccgccaccaagaugagcgagugcgugcugggccagagcaagcggguggacuucugcggcaagggcuaccaccugaugagcuuuccccagagcgcaccccacggagugguguuccugcacgugaccuacgugcccgcccaggagaagaacuucaccaccgccccagccaucugccacgacggcaaggcccacuuuccccgggagggcguguucgugagcaacggcacccacugguucgugacccagcggaacuucuacgagccccagaucaucaccaccgacaacaccuucgugagcggcaacugcgacguggugaucggcaucgugaacaacaccguguacgauccccugcagcccgagcuggacagcuucaaggaggagcuggacaaguacuucaagaaucacaccagccccgacguggaccugggcgacaucagcggcaucaacgccagcguggugaacauccagaaggagaucgaucggcugaacgagguggccaagaaccugaacgagagccugaucgaccugcaggagcugggcaaguacgagcaguacaucaaguggcccugguacaucuggcugggcuucaucgccggccugaucgccaucgugauggugaccaucaugcugugcugcaugaccagcugcugcagcugccugaagggcuguugcagcugcggcagcugcugcaaguucgacgaggacgacagcgagcccgugcugaagggcgugaagcugcacuacaccugaggacuaguuauaagacugacuagcccgaugggccucccaacgggcccuccuccccuccuugcaccgagauuaauagaucuaaaaaaaaaaaaaaaaaaaaaaaaaaaaaaaaaaaaaaaaaaaaaaaaaaaaaaaaaaaaaaaaaaaaaaaaaaaaaaaaaaaaaaaaaaaaaaaaaaaa

SEQ ID NO: 25760 - RNA, 4017 nt, Artificial Sequence
  SARS-CoV-2/Wuhan/WIV05/2019__EPI_ISL_402128 spike protein mRNA gc (1-1273)(K986P_V987P_Y453F_D614G)
aggagaaagcuuaccauguucguguuccuggugcugcugccccuggugagcagccagugcgugaaccugaccacccggacccagcugccaccagccuacaccaacagcuucacccggggcgucuacuaccccgacaagguguuccggagcagcguccugcacagcacccaggaccuguuccugcccuucuucagcaacgugaccugguuccacgccauccacgugagcggcaccaacggcaccaagcgguucgacaaccccgugcugcccuucaacgacggcguguacuucgccagcaccgagaagagcaacaucauccggggcuggaucuucggcaccacccuggacagcaagacccagagccugcugaucgugaauaacgccaccaacguggugaucaaggugugcgaguuccaguucugcaacgaccccuuccugggcguguacuaccacaagaacaacaagagcuggauggagagcgaguuccggguguacagcagcgccaacaacugcaccuucgaguacgugagccagcccuuccugauggaccuggagggcaagcagggcaacuucaagaaccugcgggaguucguguucaagaacaucgacggcuacuucaagaucuacagcaagcacaccccaaucaaccuggugcgggaucugccccagggcuucucagcccuggagccccugguggaccugcccaucggcaucaacaucacccgguuccagacccugcuggcccugcaccggagcuaccugaccccaggcgacagcagcagcggguggacagcaggcgcggcugcuuacuacgugggcuaccugcagccccggaccuuccugcugaaguacaacgagaacggcaccaucaccgacgccguggacugcgcccuggacccucugagcgagaccaagugcacccugaagagcuucaccguggagaagggcaucuaccagaccagcaacuuccgggugcagcccaccgagagcaucgugcgguuccccaacaucaccaaccugugccccuucggcgagguguucaacgccacccgguucgccagcguguacgccuggaaccggaagcggaucagcaacugcguggccgacuacagcgugcuguacaacagcgccagcuucagcaccuucaagugcuacggcgugagccccaccaagcugaacgaccugugcuucaccaacguguacgccgacagcuucgugauccguggcgacgaggugcggcagaucgcacccggccagacaggcaagaucgccgacuacaacuacaagcugcccgacgacuucaccggcugcgugaucgccuggaacagcaacaaccucgacagcaaggugggcggcaacuacaacuaccuguuccggcuguuccggaagagcaaccugaagcccuucgagcgggacaucagcaccgagaucuaccaagccggcuccaccccuugcaacggcguggagggcuucaacugcuacuucccucugcagagcuacggcuuccagcccaccaacggcgugggcuaccagcccuaccgggugguggugcugagcuucgagcugcugcacgccccagccaccguguguggccccaagaagagcaccaaccuggugaagaacaagugcgugaacuucaacuucaacggccuuaccggcaccggcgugcugaccgagagcaacaagaaauuccugcccuuucagcaguucggccgggacaucgccgacaccaccgacgcugugcgggauccccagacccuggagauccuggacaucaccccuugcagcuucggcggcgugagcgugaucaccccaggcaccaacaccagcaaccagguggccgugcuguaccagggcgugaacugcaccgaggugcccguggccauccacgccgaccagcugacacccaccuggcgggucuacagcaccggcagcaacguguuccagacccgggccgguugccugaucggcgccgagcacgugaacaacagcuacgagugcgacauccccaucggcgccggcaucugugccagcuaccagacccagaccaauucaccccggagggcaaggagcguggccagccagagcaucaucgccuacaccaugagccugggcgccgagaacagcguggccuacagcaacaacagcaucgccauccccaccaacuucaccaucagcgugaccaccgagauucugcccgugagcaugaccaagaccagcguggacugcaccauguacaucugcggcgacagcaccgagugcagcaaccugcugcugcaguacggcagcuucugcacccagcugaaccgggcccugaccggcaucgccguggagcaggacaagaacacccaggagguguucgcccaggugaagcagaucuacaagaccccucccaucaaggacuucggcggcuucaacuucagccagauccugcccgaccccagcaagcccagcaagcggagcuucaucgaggaccugcuguucaacaaggugacccuagccgacgccggcuucaucaagcaguacggcgacugccucggcgacauagccgcccgggaccugaucugcgcccagaaguucaacggccugaccgugcugccuccccugcugaccgacgagaugaucgcccaguacaccagcgcccuguuagccggaaccaucaccagcggcuggacuuucggcgcuggagccgcucugcagauccccuucgccaugcagauggccuaccgguucaacggcaucggcgugacccagaacgugcuguacgagaaccagaagcugaucgccaaccaguucaacagcgccaucggcaagauccaggacagccugagcagcaccgcuagcgcccugggcaagcugcaggacguggugaaccagaacgcccaggcccugaacacccuggugaagcagcugagcagcaacuucggcgccaucagcagcgugcugaacgacauccugagccggcuggacccucccgaggccgaggugcagaucgaccggcugaucacuggccggcugcagagccugcagaccuacgugacccagcagcugauccgggccgccgagauucgggccagcgccaaccuggccgccaccaagaugagcgagugcgugcugggccagagcaagcggguggacuucugcggcaagggcuaccaccugaugagcuuuccccagagcgcaccccacggagugguguuccugcacgugaccuacgugcccgcccaggagaagaacuucaccaccgccccagccaucugccacgacggcaaggcccacuuuccccgggagggcguguucgugagcaacggcacccacugguucgugacccagcggaacuucuacgagccccagaucaucaccaccgacaacaccuucgugagcggcaacugcgacguggugaucggcaucgugaacaacaccguguacgauccccugcagcccgagcuggacagcuucaaggaggagcuggacaaguacuucaagaaucacaccagccccgacguggaccugggcgacaucagcggcaucaacgccagcguggugaacauccagaaggagaucgaucggcugaacgagguggccaagaaccugaacgagagccugaucgaccugcaggagcugggcaaguacgagcaguacaucaaguggcccugguacaucuggcugggcuucaucgccggccugaucgccaucgugauggugaccaucaugcugugcugcaugaccagcugcugcagcugccugaagggcuguugcagcugcggcagcugcugcaaguucgacgaggacgacagcgagcccgugcugaagggcgugaagcugcacuacaccugaggacuaguuauaagacugacuagcccgaugggccucccaacgggcccuccuccccuccuugcaccgagauuaauagaucuaaaaaaaaaaaaaaaaaaaaaaaaaaaaaaaaaaaaaaaaaaaaaaaaaaaaaaaaaaaaaaaaaaaaaaaaaaaaaaaaaaaaaaaaaaaaaaaaaaaa

SEQ ID NO: 25761 - RNA, 4017 nt, Artificial Sequence
  SARS-CoV-2/Wuhan/WIV05/2019__EPI_ISL_402128 spike protein mRNA gc (1-1273)(K986P_V987P_D614G_I692V)
aggagaaagcuuaccauguucguguuccuggugcugcugccccuggugagcagccagugcgugaaccugaccacccggacccagcugccaccagccuacaccaacagcuucacccggggcgucuacuaccccgacaagguguuccggagcagcguccugcacagcacccaggaccuguuccugcccuucuucagcaacgugaccugguuccacgccauccacgugagcggcaccaacggcaccaagcgguucgacaaccccgugcugcccuucaacgacggcguguacuucgccagcaccgagaagagcaacaucauccggggcuggaucuucggcaccacccuggacagcaagacccagagccugcugaucgugaauaacgccaccaacguggugaucaaggugugcgaguuccaguucugcaacgaccccuuccugggcguguacuaccacaagaacaacaagagcuggauggagagcgaguuccggguguacagcagcgccaacaacugcaccuucgaguacgugagccagcccuuccugauggaccuggagggcaagcagggcaacuucaagaaccugcgggaguucguguucaagaacaucgacggcuacuucaagaucuacagcaagcacaccccaaucaaccuggugcgggaucugccccagggcuucucagcccuggagccccugguggaccugcccaucggcaucaacaucacccgguuccagacccugcuggcccugcaccggagcuaccugaccccaggcgacagcagcagcggguggacagcaggcgcggcugcuuacuacgugggcuaccugcagccccggaccuuccugcugaaguacaacgagaacggcaccaucaccgacgccguggacugcgcccuggacccucugagcgagaccaagugcacccugaagagcuucaccguggagaagggcaucuaccagaccagcaacuuccgggugcagcccaccgagagcaucgugcgguuccccaacaucaccaaccugugccccuucggcgagguguucaacgccacccgguucgccagcguguacgccuggaaccggaagcggaucagcaacugcguggccgacuacagcgugcuguacaacagcgccagcuucagcaccuucaagugcuacggcgugagccccaccaagcugaacgaccugugcuucaccaacguguacgccgacagcuucgugauccguggcgacgaggugcggcagaucgcacccggccagacaggcaagaucgccgacuacaacuacaagcugcccgacgacuucaccggcugcgugaucgccuggaacagcaacaaccucgacagcaaggugggcggcaacuacaacuaccuguaccggcuguuccggaagagcaaccugaagcccuucgagcgggacaucagcaccgagaucuaccaagccggcuccaccccuugcaacggcguggagggcuucaacugcuacuucccucugcagagcuacggcuuccagcccaccaacggcgugggcuaccagcccuaccgggugguggugcugagcuucgagcugcugcacgccccagccaccguguguggccccaagaagagcaccaaccuggugaagaacaagugcgugaacuucaacuucaacggccuuaccggcaccggcgugcugaccgagagcaacaagaaauuccugcccuuucagcaguucggccgggacaucgccgacaccaccgacgcugugcgggauccccagacccuggagauccuggacaucaccccuugcagcuucggcggcgugagcgugaucaccccaggcaccaacaccagcaaccagguggccgugcuguaccagggcgugaacugcaccgaggugcccguggccauccacgccgaccagcugacacccaccuggcgggucuacagcaccggcagcaacguguuccagacccgggccgguugccugaucggcgccgagcacgugaacaacagcuacgagugcgacauccccaucggcgccggcaucugugccagcuaccagacccagaccaauucaccccggagggcaaggagcguggccagccagagcgugaucgccuacaccaugagccugggcgccgagaacagcguggccuacagcaacaacagcaucgccauccccaccaacuucaccaucagcgugaccaccgagauucugcccgugagcaugaccaagaccagcguggacugcaccauguacaucugcggcgacagcaccgagugcagcaaccugcugcugcaguacggcagcuucugcacccagcugaaccgggcccugaccggcaucgccguggagcaggacaagaacacccaggagguguucgcccaggugaagcagaucuacaagaccccucccaucaaggacuucggcggcuucaacuucagccagauccugcccgaccccagcaagcccagcaagcggagcuucaucgaggaccugcuguucaacaaggugacccuagccgacgccggcuucaucaagcaguacggcgacugccucggcgacauagccgcccgggaccugaucugcgcccagaaguucaacggccugaccgugcugccuccccugcugaccgacgagaugaucgcccaguacaccagcgcccuguuagccggaaccaucaccagcggcuggacuuucggcgcuggagccgcucugcagauccccuucgccaugcagauggccuaccgguucaacggcaucggcgugacccagaacgugcuguacgagaaccagaagcugaucgccaaccaguucaacagcgccaucggcaagauccaggacagccugagcagcaccgcuagcgcccugggcaagcugcaggacguggugaaccagaacgcccaggcccugaacacccuggugaagcagcugagcagcaacuucggcgccaucagcagcgugcugaacgacauccugagccggcuggacccucccgaggccgaggugcagaucgaccggcugaucacuggccggcugcagagccugcagaccuacgugacccagcagcugauccgggccgccgagauucgggccagcgccaaccuggccgccaccaagaugagcgagugcgugcugggccagagcaagcggguggacuucugcggcaagggcuaccaccugaugagcuuuccccagagcgcaccccacggagugguguuccugcacgugaccuacgugcccgcccaggagaagaacuucaccaccgccccagccaucugccacgacggcaaggcccacuuuccccgggagggcguguucgugagcaacggcacccacugguucgugacccagcggaacuucuacgagccccagaucaucaccaccgacaacaccuucgugagcggcaacugcgacguggugaucggcaucgugaacaacaccguguacgauccccugcagcccgagcuggacagcuucaaggaggagcuggacaaguacuucaagaaucacaccagccccgacguggaccugggcgacaucagcggcaucaacgccagcguggugaacauccagaaggagaucgaucggcugaacgagguggccaagaaccugaacgagagccugaucgaccugcaggagcugggcaaguacgagcaguacaucaaguggcccugguacaucuggcugggcuucaucgccggccugaucgccaucgugauggugaccaucaugcugugcugcaugaccagcugcugcagcugccugaagggcuguugcagcugcggcagcugcugcaaguucgacgaggacgacagcgagcccgugcugaagggcgugaagcugcacuacaccugaggacuaguuauaagacugacuagcccgaugggccucccaacgggcccuccuccccuccuugcaccgagauuaauagaucuaaaaaaaaaaaaaaaaaaaaaaaaaaaaaaaaaaaaaaaaaaaaaaaaaaaaaaaaaaaaaaaaaaaaaaaaaaaaaaaaaaaaaaaaaaaaaaaaaaaa

SEQ ID NO: 25762 - RNA, 4017 nt, Artificial Sequence
  SARS-CoV-2/Wuhan/WIV05/2019__EPI_ISL_402128 spike protein mRNA gc (1-1273)(K986P_V987P_D614G_M1229I)
aggagaaagcuuaccauguucguguuccuggugcugcugccccuggugagcagccagugcgugaaccugaccacccggacccagcugccaccagccuacaccaacagcuucacccggggcgucuacuaccccgacaagguguuccggagcagcguccugcacagcacccaggaccuguuccugcccuucuucagcaacgugaccugguuccacgccauccacgugagcggcaccaacggcaccaagcgguucgacaaccccgugcugcccuucaacgacggcguguacuucgccagcaccgagaagagcaacaucauccggggcuggaucuucggcaccacccuggacagcaagacccagagccugcugaucgugaauaacgccaccaacguggugaucaaggugugcgaguuccaguucugcaacgaccccuuccugggcguguacuaccacaagaacaacaagagcuggauggagagcgaguuccggguguacagcagcgccaacaacugcaccuucgaguacgugagccagcccuuccugauggaccuggagggcaagcagggcaacuucaagaaccugcgggaguucguguucaagaacaucgacggcuacuucaagaucuacagcaagcacaccccaaucaaccuggugcgggaucugccccagggcuucucagcccuggagccccugguggaccugcccaucggcaucaacaucacccgguuccagacccugcuggcccugcaccggagcuaccugaccccaggcgacagcagcagcggguggacagcaggcgcggcugcuuacuacgugggcuaccugcagccccggaccuuccugcugaaguacaacgagaacggcaccaucaccgacgccguggacugcgcccuggacccucugagcgagaccaagugcacccugaagagcuucaccguggagaagggcaucuaccagaccagcaacuuccgggugcagcccaccgagagcaucgugcgguuccccaacaucaccaaccugugccccuucggcgagguguucaacgccacccgguucgccagcguguacgccuggaaccggaagcggaucagcaacugcguggccgacuacagcgugcuguacaacagcgccagcuucagcaccuucaagugcuacggcgugagccccaccaagcugaacgaccugugcuucaccaacguguacgccgacagcuucgugauccguggcgacgaggugcggcagaucgcacccggccagacaggcaagaucgccgacuacaacuacaagcugcccgacgacuucaccggcugcgugaucgccuggaacagcaacaaccucgacagcaaggugggcggcaacuacaacuaccuguaccggcuguuccggaagagcaaccugaagcccuucgagcgggacaucagcaccgagaucuaccaagccggcuccaccccuugcaacggcguggagggcuucaacugcuacuucccucugcagagcuacggcuuccagcccaccaacggcgugggcuaccagcccuaccgggugguggugcugagcuucgagcugcugcacgccccagccaccguguguggccccaagaagagcaccaaccuggugaagaacaagugcgugaacuucaacuucaacggccuuaccggcaccggcgugcugaccgagagcaacaagaaauuccugcccuuucagcaguucggccgggacaucgccgacaccaccgacgcugugcgggauccccagacccuggagauccuggacaucaccccuugcagcuucggcggcgugagcgugaucaccccaggcaccaacaccagcaaccagguggccgugcuguaccagggcgugaacugcaccgaggugcccguggccauccacgccgaccagcugacacccaccuggcgggucuacagcaccggcagcaacguguuccagacccgggccgguugccugaucggcgccgagcacgugaacaacagcuacgagugcgacauccccaucggcgccggcaucugugccagcuaccagacccagaccaauucaccccggagggcaaggagcguggccagccagagcaucaucgccuacaccaugagccugggcgccgagaacagcguggccuacagcaacaacagcaucgccauccccaccaacuucaccaucagcgugaccaccgagauucugcccgugagcaugaccaagaccagcguggacugcaccauguacaucugcggcgacagcaccgagugcagcaaccugcugcugcaguacggcagcuucugcacccagcugaaccgggcccugaccggcaucgccguggagcaggacaagaacacccaggagguguucgcccaggugaagcagaucuacaagaccccucccaucaaggacuucggcggcuucaacuucagccagauccugcccgaccccagcaagcccagcaagcggagcuucaucgaggaccugcuguucaacaaggugacccuagccgacgccggcuucaucaagcaguacggcgacugccucggcgacauagccgcccgggaccugaucugcgcccagaaguucaacggccugaccgugcugccuccccugcugaccgacgagaugaucgcccaguacaccagcgcccuguuagccggaaccaucaccagcggcuggacuuucggcgcuggagccgcucugcagauccccuucgccaugcagauggccuaccgguucaacggcaucggcgugacccagaacgugcuguacgagaaccagaagcugaucgccaaccaguucaacagcgccaucggcaagauccaggacagccugagcagcaccgcuagcgcccugggcaagcugcaggacguggugaaccagaacgcccaggcccugaacacccuggugaagcagcugagcagcaacuucggcgccaucagcagcgugcugaacgacauccugagccggcuggacccucccgaggccgaggugcagaucgaccggcugaucacuggccggcugcagagccugcagaccuacgugacccagcagcugauccgggccgccgagauucgggccagcgccaaccuggccgccaccaagaugagcgagugcgugcugggccagagcaagcggguggacuucugcggcaagggcuaccaccugaugagcuuuccccagagcgcaccccacggagugguguuccugcacgugaccuacgugcccgcccaggagaagaacuucaccaccgccccagccaucugccacgacggcaaggcccacuuuccccgggagggcguguucgugagcaacggcacccacugguucgugacccagcggaacuucuacgagccccagaucaucaccaccgacaacaccuucgugagcggcaacugcgacguggugaucggcaucgugaacaacaccguguacgauccccugcagcccgagcuggacagcuucaaggaggagcuggacaaguacuucaagaaucacaccagccccgacguggaccugggcgacaucagcggcaucaacgccagcguggugaacauccagaaggagaucgaucggcugaacgagguggccaagaaccugaacgagagccugaucgaccugcaggagcugggcaaguacgagcaguacaucaaguggcccugguacaucuggcugggcuucaucgccggccugaucgccaucgugaucgugaccaucaugcugugcugcaugaccagcugcugcagcugccugaagggcuguugcagcugcggcagcugcugcaaguucgacgaggacgacagcgagcccgugcugaagggcgugaagcugcacuacaccugaggacuaguuauaagacugacuagcccgaugggccucccaacgggcccuccuccccuccuugcaccgagauuaauagaucuaaaaaaaaaaaaaaaaaaaaaaaaaaaaaaaaaaaaaaaaaaaaaaaaaaaaaaaaaaaaaaaaaaaaaaaaaaaaaaaaaaaaaaaaaaaaaaaaaaaa

SEQ ID NO: 25763 - RNA, 4011 nt, Artificial Sequence
  SARS-CoV-2/Wuhan/WIV05/2019__EPI_ISL_402128 spike protein mRNA gc (1-1273)(K986P_V987P_H69del_V70del_A222V_Y453F_S477N_D614G_I692V)
aggagaaagcuuaccauguucguguuccuggugcugcugccccuggugagcagccagugcgugaaccugaccacccggacccagcugccaccagccuacaccaacagcuucacccggggcgucuacuaccccgacaagguguuccggagcagcguccugcacagcacccaggaccuguuccugcccuucuucagcaacgugaccugguuccacgccaucagcggcaccaacggcaccaagcgguucgacaaccccgugcugcccuucaacgacggcguguacuucgccagcaccgagaagagcaacaucauccggggcuggaucuucggcaccacccuggacagcaagacccagagccugcugaucgugaauaacgccaccaacguggugaucaaggugugcgaguuccaguucugcaacgaccccuuccugggcguguacuaccacaagaacaacaagagcuggauggagagcgaguuccggguguacagcagcgccaacaacugcaccuucgaguacgugagccagcccuuccugauggaccuggagggcaagcagggcaacuucaagaaccugcgggaguucguguucaagaacaucgacggcuacuucaagaucuacagcaagcacaccccaaucaaccuggugcgggaucugccccagggcuucucagugcuggagccccugguggaccugcccaucggcaucaacaucacccgguuccagacccugcuggcccugcaccggagcuaccugaccccaggcgacagcagcagcggguggacagcaggcgcggcugcuuacuacgugggcuaccugcagccccggaccuuccugcugaaguacaacgagaacggcaccaucaccgacgccguggacugcgcccuggacccucugagcgagaccaagugcacccugaagagcuucaccguggagaagggcaucuaccagaccagcaacuuccgggugcagcccaccgagagcaucgugcgguuccccaacaucaccaaccugugccccuucggcgagguguucaacgccacccgguucgccagcguguacgccuggaaccggaagcggaucagcaacugcguggccgacuacagcgugcuguacaacagcgccagcuucagcaccuucaagugcuacggcgugagccccaccaagcugaacgaccugugcuucaccaacguguacgccgacagcuucgugauccguggcgacgaggugcggcagaucgcacccggccagacaggcaagaucgccgacuacaacuacaagcugcccgacgacuucaccggcugcgugaucgccuggaacagcaacaaccucgacagcaaggugggcggcaacuacaacuaccuguuccggcuguuccggaagagcaaccugaagcccuucgagcgggacaucagcaccgagaucuaccaagccggcaacaccccuugcaacggcguggagggcuucaacugcuacuucccucugcagagcuacggcuuccagcccaccaacggcgugggcuaccagcccuaccgggugguggugcugagcuucgagcugcugcacgccccagccaccguguguggccccaagaagagcaccaaccuggugaagaacaagugcgugaacuucaacuucaacggccuuaccggcaccggcgugcugaccgagagcaacaagaaauuccugcccuuucagcaguucggccgggacaucgccgacaccaccgacgcugugcgggauccccagacccuggagauccuggacaucaccccuugcagcuucggcggcgugagcgugaucaccccaggcaccaacaccagcaaccagguggccgugcuguaccagggcgugaacugcaccgaggugcccguggccauccacgccgaccagcugacacccaccuggcgggucuacagcaccggcagcaacguguuccagacccgggccgguugccugaucggcgccgagcacgugaacaacagcuacgagugcgacauccccaucggcgccggcaucugugccagcuaccagacccagaccaauucaccccggagggcaaggagcguggccagccagagcgugaucgccuacaccaugagccugggcgccgagaacagcguggccuacagcaacaacagcaucgccauccccaccaacuucaccaucagcgugaccaccgagauucugcccgugagcaugaccaagaccagcguggacugcaccauguacaucugcggcgacagcaccgagugcagcaaccugcugcugcaguacggcagcuucugcacccagcugaaccgggcccugaccggcaucgccguggagcaggacaagaacacccaggagguguucgcccaggugaagcagaucuacaagaccccucccaucaaggacuucggcggcuucaacuucagccagauccugcccgaccccagcaagcccagcaagcggagcuucaucgaggaccugcuguucaacaaggugacccuagccgacgccggcuucaucaagcaguacggcgacugccucggcgacauagccgcccgggaccugaucugcgcccagaaguucaacggccugaccgugcugccuccccugcugaccgacgagaugaucgcccaguacaccagcgcccuguuagccggaaccaucaccagcggcuggacuuucggcgcuggagccgcucugcagauccccuucgccaugcagauggccuaccgguucaacggcaucggcgugacccagaacgugcuguacgagaaccagaagcugaucgccaaccaguucaacagcgccaucggcaagauccaggacagccugagcagcaccgcuagcgcccugggcaagcugcaggacguggugaaccagaacgcccaggcccugaacacccuggugaagcagcugagcagcaacuucggcgccaucagcagcgugcugaacgacauccugagccggcuggacccucccgaggccgaggugcagaucgaccggcugaucacuggccggcugcagagccugcagaccuacgugacccagcagcugauccgggccgccgagauucgggccagcgccaaccuggccgccaccaagaugagcgagugcgugcugggccagagcaagcggguggacuucugcggcaagggcuaccaccugaugagcuuuccccagagcgcaccccacggagugguguuccugcacgugaccuacgugcccgcccaggagaagaacuucaccaccgccccagccaucugccacgacggcaaggcccacuuuccccgggagggcguguucgugagcaacggcacccacugguucgugacccagcggaacuucuacgagccccagaucaucaccaccgacaacaccuucgugagcggcaacugcgacguggugaucggcaucgugaacaacaccguguacgauccccugcagcccgagcuggacagcuucaaggaggagcuggacaaguacuucaagaaucacaccagccccgacguggaccugggcgacaucagcggcaucaacgccagcguggugaacauccagaaggagaucgaucggcugaacgagguggccaagaaccugaacgagagccugaucgaccugcaggagcugggcaaguacgagcaguacaucaaguggcccugguacaucuggcugggcuucaucgccggccugaucgccaucgugauggugaccaucaugcugugcugcaugaccagcugcugcagcugccugaagggcuguugcagcugcggcagcugcugcaaguucgacgaggacgacagcgagcccgugcugaagggcgugaagcugcacuacaccugaggacuaguuauaagacugacuagcccgaugggccucccaacgggcccuccuccccuccuugcaccgagauuaauagaucuaaaaaaaaaaaaaaaaaaaaaaaaaaaaaaaaaaaaaaaaaaaaaaaaaaaaaaaaaaaaaaaaaaaaaaaaaaaaaaaaaaaaaaaaaaaaaaaaaaaa

SEQ ID NO: 25764 - RNA, 4011 nt, Artificial Sequence
  SARS-CoV-2/Wuhan/WIV05/2019__EPI_ISL_402128 spike protein mRNA gc (1-1273)(K986P_V987P_H69del_V70del_Y453F_D614G_I692V_M1229I)
aggagaaagcuuaccauguucguguuccuggugcugcugccccuggugagcagccagugcgugaaccugaccacccggacccagcugccaccagccuacaccaacagcuucacccggggcgucuacuaccccgacaagguguuccggagcagcguccugcacagcacccaggaccuguuccugcccuucuucagcaacgugaccugguuccacgccaucagcggcaccaacggcaccaagcgguucgacaaccccgugcugcccuucaacgacggcguguacuucgccagcaccgagaagagcaacaucauccggggcuggaucuucggcaccacccuggacagcaagacccagagccugcugaucgugaauaacgccaccaacguggugaucaaggugugcgaguuccaguucugcaacgaccccuuccugggcguguacuaccacaagaacaacaagagcuggauggagagcgaguuccggguguacagcagcgccaacaacugcaccuucgaguacgugagccagcccuuccugauggaccuggagggcaagcagggcaacuucaagaaccugcgggaguucguguucaagaacaucgacggcuacuucaagaucuacagcaagcacaccccaaucaaccuggugcgggaucugccccagggcuucucagcccuggagccccugguggaccugcccaucggcaucaacaucacccgguuccagacccugcuggcccugcaccggagcuaccugaccccaggcgacagcagcagcggguggacagcaggcgcggcugcuuacuacgugggcuaccugcagccccggaccuuccugcugaaguacaacgagaacggcaccaucaccgacgccguggacugcgcccuggacccucugagcgagaccaagugcacccugaagagcuucaccguggagaagggcaucuaccagaccagcaacuuccgggugcagcccaccgagagcaucgugcgguuccccaacaucaccaaccugugccccuucggcgagguguucaacgccacccgguucgccagcguguacgccuggaaccggaagcggaucagcaacugcguggccgacuacagcgugcuguacaacagcgccagcuucagcaccuucaagugcuacggcgugagccccaccaagcugaacgaccugugcuucaccaacguguacgccgacagcuucgugauccguggcgacgaggugcggcagaucgcacccggccagacaggcaagaucgccgacuacaacuacaagcugcccgacgacuucaccggcugcgugaucgccuggaacagcaacaaccucgacagcaaggugggcggcaacuacaacuaccuguuccggcuguuccggaagagcaaccugaagcccuucgagcgggacaucagcaccgagaucuaccaagccggcuccaccccuugcaacggcguggagggcuucaacugcuacuucccucugcagagcuacggcuuccagcccaccaacggcgugggcuaccagcccuaccgggugguggugcugagcuucgagcugcugcacgccccagccaccguguguggccccaagaagagcaccaaccuggugaagaacaagugcgugaacuucaacuucaacggccuuaccggcaccggcgugcugaccgagagcaacaagaaauuccugcccuuucagcaguucggccgggacaucgccgacaccaccgacgcugugcgggauccccagacccuggagauccuggacaucaccccuugcagcuucggcggcgugagcgugaucaccccaggcaccaacaccagcaaccagguggccgugcuguaccagggcgugaacugcaccgaggugcccguggccauccacgccgaccagcugacacccaccuggcgggucuacagcaccggcagcaacguguuccagacccgggccgguugccugaucggcgccgagcacgugaacaacagcuacgagugcgacauccccaucggcgccggcaucugugccagcuaccagacccagaccaauucaccccggagggcaaggagcguggccagccagagcgugaucgccuacaccaugagccugggcgccgagaacagcguggccuacagcaacaacagcaucgccauccccaccaacuucaccaucagcgugaccaccgagauucugcccgugagcaugaccaagaccagcguggacugcaccauguacaucugcggcgacagcaccgagugcagcaaccugcugcugcaguacggcagcuucugcacccagcugaaccgggcccugaccggcaucgccguggagcaggacaagaacacccaggagguguucgcccaggugaagcagaucuacaagaccccucccaucaaggacuucggcggcuucaacuucagccagauccugcccgaccccagcaagcccagcaagcggagcuucaucgaggaccugcuguucaacaaggugacccuagccgacgccggcuucaucaagcaguacggcgacugccucggcgacauagccgcccgggaccugaucugcgcccagaaguucaacggccugaccgugcugccuccccugcugaccgacgagaugaucgcccaguacaccagcgcccuguuagccggaaccaucaccagcggcuggacuuucggcgcuggagccgcucugcagauccccuucgccaugcagauggccuaccgguucaacggcaucggcgugacccagaacgugcuguacgagaaccagaagcugaucgccaaccaguucaacagcgccaucggcaagauccaggacagccugagcagcaccgcuagcgcccugggcaagcugcaggacguggugaaccagaacgcccaggcccugaacacccuggugaagcagcugagcagcaacuucggcgccaucagcagcgugcugaacgacauccugagccggcuggacccucccgaggccgaggugcagaucgaccggcugaucacuggccggcugcagagccugcagaccuacgugacccagcagcugauccgggccgccgagauucgggccagcgccaaccuggccgccaccaagaugagcgagugcgugcugggccagagcaagcggguggacuucugcggcaagggcuaccaccugaugagcuuuccccagagcgcaccccacggagugguguuccugcacgugaccuacgugcccgcccaggagaagaacuucaccaccgccccagccaucugccacgacggcaaggcccacuuuccccgggagggcguguucgugagcaacggcacccacugguucgugacccagcggaacuucuacgagccccagaucaucaccaccgacaacaccuucgugagcggcaacugcgacguggugaucggcaucgugaacaacaccguguacgauccccugcagcccgagcuggacagcuucaaggaggagcuggacaaguacuucaagaaucacaccagccccgacguggaccugggcgacaucagcggcaucaacgccagcguggugaacauccagaaggagaucgaucggcugaacgagguggccaagaaccugaacgagagccugaucgaccugcaggagcugggcaaguacgagcaguacaucaaguggcccugguacaucuggcugggcuucaucgccggccugaucgccaucgugaucgugaccaucaugcugugcugcaugaccagcugcugcagcugccugaagggcuguugcagcugcggcagcugcugcaaguucgacgaggacgacagcgagcccgugcugaagggcgugaagcugcacuacaccugaggacuaguuauaagacugacuagcccgaugggccucccaacgggcccuccuccccuccuugcaccgagauuaauagaucuaaaaaaaaaaaaaaaaaaaaaaaaaaaaaaaaaaaaaaaaaaaaaaaaaaaaaaaaaaaaaaaaaaaaaaaaaaaaaaaaaaaaaaaaaaaaaaaaaaaa

SEQ ID NO: 25765 - RNA, 4008 nt, Artificial Sequence
  SARS-CoV-2/Wuhan/WIV05/2019__EPI_ISL_402128 spike protein mRNA gc (1-1273)(K986P_V987P_K986P_V987P_H69del_V70del_Y144del_N501Y_A570 D_D614G_P681H_T716I_S982A_D1118H)
aggagaaagcuuaccauguucguguuccuggugcugcugccccuggugagcagccagugcgugaaccugaccacccggacccagcugccaccagccuacaccaacagcuucacccggggcgucuacuaccccgacaagguguuccggagcagcguccugcacagcacccaggaccuguuccugcccuucuucagcaacgugaccugguuccacgccaucagcggcaccaacggcaccaagcgguucgacaaccccgugcugcccuucaacgacggcguguacuucgccagcaccgagaagagcaacaucauccggggcuggaucuucggcaccacccuggacagcaagacccagagccugcugaucgugaauaacgccaccaacguggugaucaaggugugcgaguuccaguucugcaacgaccccuuccugggcguguaccacaagaacaacaagagcuggauggagagcgaguuccggguguacagcagcgccaacaacugcaccuucgaguacgugagccagcccuuccugauggaccuggagggcaagcagggcaacuucaagaaccugcgggaguucguguucaagaacaucgacggcuacuucaagaucuacagcaagcacaccccaaucaaccuggugcgggaucugccccagggcuucucagcccuggagccccugguggaccugcccaucggcaucaacaucacccgguuccagacccugcuggcccugcaccggagcuaccugaccccaggcgacagcagcagcggguggacagcaggcgcggcugcuuacuacgugggcuaccugcagccccggaccuuccugcugaaguacaacgagaacggcaccaucaccgacgccguggacugcgcccuggacccucugagcgagaccaagugcacccugaagagcuucaccguggagaagggcaucuaccagaccagcaacuuccgggugcagcccaccgagagcaucgugcgguuccccaacaucaccaaccugugccccuucggcgagguguucaacgccacccgguucgccagcguguacgccuggaaccggaagcggaucagcaacugcguggccgacuacagcgugcuguacaacagcgccagcuucagcaccuucaagugcuacggcgugagccccaccaagcugaacgaccugugcuucaccaacguguacgccgacagcuucgugauccguggcgacgaggugcggcagaucgcacccggccagacaggcaagaucgccgacuacaacuacaagcugcccgacgacuucaccggcugcgugaucgccuggaacagcaacaaccucgacagcaaggugggcggcaacuacaacuaccuguaccggcuguuccggaagagcaaccugaagcccuucgagcgggacaucagcaccgagaucuaccaagccggcuccaccccuugcaacggcguggagggcuucaacugcuacuucccucugcagagcuacggcuuccagcccaccuacggcgugggcuaccagcccuaccgggugguggugcugagcuucgagcugcugcacgccccagccaccguguguggccccaagaagagcaccaaccuggugaagaacaagugcgugaacuucaacuucaacggccuuaccggcaccggcgugcugaccgagagcaacaagaaauuccugcccuuucagcaguucggccgggacaucgacgacaccaccgacgcugugcgggauccccagacccuggagauccuggacaucaccccuugcagcuucggcggcgugagcgugaucaccccaggcaccaacaccagcaaccagguggccgugcuguaccagggcgugaacugcaccgaggugcccguggccauccacgccgaccagcugacacccaccuggcgggucuacagcaccggcagcaacguguuccagacccgggccgguugccugaucggcgccgagcacgugaacaacagcuacgagugcgacauccccaucggcgccggcaucugugccagcuaccagacccagaccaauucacaccggagggcaaggagcguggccagccagagcaucaucgccuacaccaugagccugggcgccgagaacagcguggccuacagcaacaacagcaucgccauccccaucaacuucaccaucagcgugaccaccgagauucugcccgugagcaugaccaagaccagcguggacugcaccauguacaucugcggcgacagcaccgagugcagcaaccugcugcugcaguacggcagcuucugcacccagcugaaccgggcccugaccggcaucgccguggagcaggacaagaacacccaggagguguucgcccaggugaagcagaucuacaagaccccucccaucaaggacuucggcggcuucaacuucagccagauccugcccgaccccagcaagcccagcaagcggagcuucaucgaggaccugcuguucaacaaggugacccuagccgacgccggcuucaucaagcaguacggcgacugccucggcgacauagccgcccgggaccugaucugcgcccagaaguucaacggccugaccgugcugccuccccugcugaccgacgagaugaucgcccaguacaccagcgcccuguuagccggaaccaucaccagcggcuggacuuucggcgcuggagccgcucugcagauccccuucgccaugcagauggccuaccgguucaacggcaucggcgugacccagaacgugcuguacgagaaccagaagcugaucgccaaccaguucaacagcgccaucggcaagauccaggacagccugagcagcaccgcuagcgcccugggcaagcugcaggacguggugaaccagaacgcccaggcccugaacacccuggugaagcagcugagcagcaacuucggcgccaucagcagcgugcugaacgacauccuggcccggcuggacccucccgaggccgaggugcagaucgaccggcugaucacuggccggcugcagagccugcagaccuacgugacccagcagcugauccgggccgccgagauucgggccagcgccaaccuggccgccaccaagaugagcgagugcgugcugggccagagcaagcggguggacuucugcggcaagggcuaccaccugaugagcuuuccccagagcgcaccccacggagugguguuccugcacgugaccuacgugcccgcccaggagaagaacuucaccaccgccccagccaucugccacgacggcaaggcccacuuuccccgggagggcguguucgugagcaacggcacccacugguucgugacccagcggaacuucuacgagccccagaucaucaccacccacaacaccuucgugagcggcaacugcgacguggugaucggcaucgugaacaacaccguguacgauccccugcagcccgagcuggacagcuucaaggaggagcuggacaaguacuucaagaaucacaccagccccgacguggaccugggcgacaucagcggcaucaacgccagcguggugaacauccagaaggagaucgaucggcugaacgagguggccaagaaccugaacgagagccugaucgaccugcaggagcugggcaaguacgagcaguacaucaaguggcccugguacaucuggcugggcuucaucgccggccugaucgccaucgugauggugaccaucaugcugugcugcaugaccagcugcugcagcugccugaagggcuguugcagcugcggcagcugcugcaaguucgacgaggacgacagcgagcccgugcugaagggcgugaagcugcacuacaccugaggacuaguuauaagacugacuagcccgaugggccucccaacgggcccuccuccccuccuugcaccgagauuaauagaucuaaaaaaaaaaaaaaaaaaaaaaaaaaaaaaaaaaaaaaaaaaaaaaaaaaaaaaaaaaaaaaaaaaaaaaaaaaaaaaaaaaaaaaaaaaaaaaaaaaaa

SEQ ID NO: 25766 - RNA, 4017 nt, Artificial Sequence
  SARS-CoV-2/Wuhan/WIV05/2019__EPI_ISL_402128 spike protein mRNA gc (1-1273)(K986P_V987P_K986P_V987P_K417N_E484K_N501Y_D614G)
aggagaaagcuuaccauguucguguuccuggugcugcugccccuggugagcagccagugcgugaaccugaccacccggacccagcugccaccagccuacaccaacagcuucacccggggcgucuacuaccccgacaagguguuccggagcagcguccugcacagcacccaggaccuguuccugcccuucuucagcaacgugaccugguuccacgccauccacgugagcggcaccaacggcaccaagcgguucgacaaccccgugcugcccuucaacgacggcguguacuucgccagcaccgagaagagcaacaucauccggggcuggaucuucggcaccacccuggacagcaagacccagagccugcugaucgugaauaacgccaccaacguggugaucaaggugugcgaguuccaguucugcaacgaccccuuccugggcguguacuaccacaagaacaacaagagcuggauggagagcgaguuccggguguacagcagcgccaacaacugcaccuucgaguacgugagccagcccuuccugauggaccuggagggcaagcagggcaacuucaagaaccugcgggaguucguguucaagaacaucgacggcuacuucaagaucuacagcaagcacaccccaaucaaccuggugcgggaucugccccagggcuucucagcccuggagccccugguggaccugcccaucggcaucaacaucacccgguuccagacccugcuggcccugcaccggagcuaccugaccccaggcgacagcagcagcggguggacagcaggcgcggcugcuuacuacgugggcuaccugcagccccggaccuuccugcugaaguacaacgagaacggcaccaucaccgacgccguggacugcgcccuggacccucugagcgagaccaagugcacccugaagagcuucaccguggagaagggcaucuaccagaccagcaacuuccgggugcagcccaccgagagcaucgugcgguuccccaacaucaccaaccugugccccuucggcgagguguucaacgccacccgguucgccagcguguacgccuggaaccggaagcggaucagcaacugcguggccgacuacagcgugcuguacaacagcgccagcuucagcaccuucaagugcuacggcgugagccccaccaagcugaacgaccugugcuucaccaacguguacgccgacagcuucgugauccguggcgacgaggugcggcagaucgcacccggccagacaggcaacaucgccgacuacaacuacaagcugcccgacgacuucaccggcugcgugaucgccuggaacagcaacaaccucgacagcaaggugggcggcaacuacaacuaccuguaccggcuguuccggaagagcaaccugaagcccuucgagcgggacaucagcaccgagaucuaccaagccggcuccaccccuugcaacggcgugaagggcuucaacugcuacuucccucugcagagcuacggcuuccagcccaccuacggcgugggcuaccagcccuaccgggugguggugcugagcuucgagcugcugcacgccccagccaccguguguggccccaagaagagcaccaaccuggugaagaacaagugcgugaacuucaacuucaacggccuuaccggcaccggcgugcugaccgagagcaacaagaaauuccugcccuuucagcaguucggccgggacaucgccgacaccaccgacgcugugcgggauccccagacccuggagauccuggacaucaccccuugcagcuucggcggcgugagcgugaucaccccaggcaccaacaccagcaaccagguggccgugcuguaccagggcgugaacugcaccgaggugcccguggccauccacgccgaccagcugacacccaccuggcgggucuacagcaccggcagcaacguguuccagacccgggccgguugccugaucggcgccgagcacgugaacaacagcuacgagugcgacauccccaucggcgccggcaucugugccagcuaccagacccagaccaauucaccccggagggcaaggagcguggccagccagagcaucaucgccuacaccaugagccugggcgccgagaacagcguggccuacagcaacaacagcaucgccauccccaccaacuucaccaucagcgugaccaccgagauucugcccgugagcaugaccaagaccagcguggacugcaccauguacaucugcggcgacagcaccgagugcagcaaccugcugcugcaguacggcagcuucugcacccagcugaaccgggcccugaccggcaucgccguggagcaggacaagaacacccaggagguguucgcccaggugaagcagaucuacaagaccccucccaucaaggacuucggcggcuucaacuucagccagauccugcccgaccccagcaagcccagcaagcggagcuucaucgaggaccugcuguucaacaaggugacccuagccgacgccggcuucaucaagcaguacggcgacugccucggcgacauagccgcccgggaccugaucugcgcccagaaguucaacggccugaccgugcugccuccccugcugaccgacgagaugaucgcccaguacaccagcgcccuguuagccggaaccaucaccagcggcuggacuuucggcgcuggagccgcucugcagauccccuucgccaugcagauggccuaccgguucaacggcaucggcgugacccagaacgugcuguacgagaaccagaagcugaucgccaaccaguucaacagcgccaucggcaagauccaggacagccugagcagcaccgcuagcgcccugggcaagcugcaggacguggugaaccagaacgcccaggcccugaacacccuggugaagcagcugagcagcaacuucggcgccaucagcagcgugcugaacgacauccugagccggcuggacccucccgaggccgaggugcagaucgaccggcugaucacuggccggcugcagagccugcagaccuacgugacccagcagcugauccgggccgccgagauucgggccagcgccaaccuggccgccaccaagaugagcgagugcgugcugggccagagcaagcggguggacuucugcggcaagggcuaccaccugaugagcuuuccccagagcgcaccccacggagugguguuccugcacgugaccuacgugcccgcccaggagaagaacuucaccaccgccccagccaucugccacgacggcaaggcccacuuuccccgggagggcguguucgugagcaacggcacccacugguucgugacccagcggaacuucuacgagccccagaucaucaccaccgacaacaccuucgugagcggcaacugcgacguggugaucggcaucgugaacaacaccguguacgauccccugcagcccgagcuggacagcuucaaggaggagcuggacaaguacuucaagaaucacaccagccccgacguggaccugggcgacaucagcggcaucaacgccagcguggugaacauccagaaggagaucgaucggcugaacgagguggccaagaaccugaacgagagccugaucgaccugcaggagcugggcaaguacgagcaguacaucaaguggcccugguacaucuggcugggcuucaucgccggccugaucgccaucgugauggugaccaucaugcugugcugcaugaccagcugcugcagcugccugaagggcuguugcagcugcggcagcugcugcaaguucgacgaggacgacagcgagcccgugcugaagggcgugaagcugcacuacaccugaggacuaguuauaagacugacuagcccgaugggccucccaacgggcccuccuccccuccuugcaccgagauuaauagaucuaaaaaaaaaaaaaaaaaaaaaaaaaaaaaaaaaaaaaaaaaaaaaaaaaaaaaaaaaaaaaaaaaaaaaaaaaaaaaaaaaaaaaaaaaaaaaaaaaaaa

SEQ ID NO: 25767 - RNA, 4008 nt, Artificial Sequence
  SARS-CoV-2/Wuhan/WIV05/2019__EPI_ISL_402128 spike protein mRNA gc (1-1273)(K986P_V987P_K986P_V987P_L18F_D80A_D215G_L242del_A243del_ L244del_R246I_K417N_E484K_N501Y_D614G_A701V)
aggagaaagcuuaccauguucguguuccuggugcugcugccccuggugagcagccagugcgugaacuucaccacccggacccagcugccaccagccuacaccaacagcuucacccggggcgucuacuaccccgacaagguguuccggagcagcguccugcacagcacccaggaccuguuccugcccuucuucagcaacgugaccugguuccacgccauccacgugagcggcaccaacggcaccaagcgguucgccaaccccgugcugcccuucaacgacggcguguacuucgccagcaccgagaagagcaacaucauccggggcuggaucuucggcaccacccuggacagcaagacccagagccugcugaucgugaauaacgccaccaacguggugaucaaggugugcgaguuccaguucugcaacgaccccuuccugggcguguacuaccacaagaacaacaagagcuggauggagagcgaguuccggguguacagcagcgccaacaacugcaccuucgaguacgugagccagcccuuccugauggaccuggagggcaagcagggcaacuucaagaaccugcgggaguucguguucaagaacaucgacggcuacuucaagaucuacagcaagcacaccccaaucaaccuggugcggggccugccccagggcuucucagcccuggagccccugguggaccugcccaucggcaucaacaucacccgguuccagacccugcacaucagcuaccugaccccaggcgacagcagcagcggguggacagcaggcgcggcugcuuacuacgugggcuaccugcagccccggaccuuccugcugaaguacaacgagaacggcaccaucaccgacgccguggacugcgcccuggacccucugagcgagaccaagugcacccugaagagcuucaccguggagaagggcaucuaccagaccagcaacuuccgggugcagcccaccgagagcaucgugcgguuccccaacaucaccaaccugugccccuucggcgagguguucaacgccacccgguucgccagcguguacgccuggaaccggaagcggaucagcaacugcguggccgacuacagcgugcuguacaacagcgccagcuucagcaccuucaagugcuacggcgugagccccaccaagcugaacgaccugugcuucaccaacguguacgccgacagcuucgugauccguggcgacgaggugcggcagaucgcacccggccagacaggcaacaucgccgacuacaacuacaagcugcccgacgacuucaccggcugcgugaucgccuggaacagcaacaaccucgacagcaaggugggcggcaacuacaacuaccuguaccggcuguuccggaagagcaaccugaagcccuucgagcgggacaucagcaccgagaucuaccaagccggcuccaccccuugcaacggcgugaagggcuucaacugcuacuucccucugcagagcuacggcuuccagcccaccuacggcgugggcuaccagcccuaccgggugguggugcugagcuucgagcugcugcacgccccagccaccguguguggccccaagaagagcaccaaccuggugaagaacaagugcgugaacuucaacuucaacggccuuaccggcaccggcgugcugaccgagagcaacaagaaauuccugcccuuucagcaguucggccgggacaucgccgacaccaccgacgcugugcgggauccccagacccuggagauccuggacaucaccccuugcagcuucggcggcgugagcgugaucaccccaggcaccaacaccagcaaccagguggccgugcuguaccagggcgugaacugcaccgaggugcccguggccauccacgccgaccagcugacacccaccuggcgggucuacagcaccggcagcaacguguuccagacccgggccgguugccugaucggcgccgagcacgugaacaacagcuacgagugcgacauccccaucggcgccggcaucugugccagcuaccagacccagaccaauucaccccggagggcaaggagcguggccagccagagcaucaucgccuacaccaugagccugggcguggagaacagcguggccuacagcaacaacagcaucgccauccccaccaacuucaccaucagcgugaccaccgagauucugcccgugagcaugaccaagaccagcguggacugcaccauguacaucugcggcgacagcaccgagugcagcaaccugcugcugcaguacggcagcuucugcacccagcugaaccgggcccugaccggcaucgccguggagcaggacaagaacacccaggagguguucgcccaggugaagcagaucuacaagaccccucccaucaaggacuucggcggcuucaacuucagccagauccugcccgaccccagcaagcccagcaagcggagcuucaucgaggaccugcuguucaacaaggugacccuagccgacgccggcuucaucaagcaguacggcgacugccucggcgacauagccgcccgggaccugaucugcgcccagaaguucaacggccugaccgugcugccuccccugcugaccgacgagaugaucgcccaguacaccagcgcccuguuagccggaaccaucaccagcggcuggacuuucggcgcuggagccgcucugcagauccccuucgccaugcagauggccuaccgguucaacggcaucggcgugacccagaacgugcuguacgagaaccagaagcugaucgccaaccaguucaacagcgccaucggcaagauccaggacagccugagcagcaccgcuagcgcccugggcaagcugcaggacguggugaaccagaacgcccaggcccugaacacccuggugaagcagcugagcagcaacuucggcgccaucagcagcgugcugaacgacauccugagccggcuggacccucccgaggccgaggugcagaucgaccggcugaucacuggccggcugcagagccugcagaccuacgugacccagcagcugauccgggccgccgagauucgggccagcgccaaccuggccgccaccaagaugagcgagugcgugcugggccagagcaagcggguggacuucugcggcaagggcuaccaccugaugagcuuuccccagagcgcaccccacggagugguguuccugcacgugaccuacgugcccgcccaggagaagaacuucaccaccgccccagccaucugccacgacggcaaggcccacuuuccccgggagggcguguucgugagcaacggcacccacugguucgugacccagcggaacuucuacgagccccagaucaucaccaccgacaacaccuucgugagcggcaacugcgacguggugaucggcaucgugaacaacaccguguacgauccccugcagcccgagcuggacagcuucaaggaggagcuggacaaguacuucaagaaucacaccagccccgacguggaccugggcgacaucagcggcaucaacgccagcguggugaacauccagaaggagaucgaucggcugaacgagguggccaagaaccugaacgagagccugaucgaccugcaggagcugggcaaguacgagcaguacaucaaguggcccugguacaucuggcugggcuucaucgccggccugaucgccaucgugauggugaccaucaugcugugcugcaugaccagcugcugcagcugccugaagggcuguugcagcugcggcagcugcugcaaguucgacgaggacgacagcgagcccgugcugaagggcgugaagcugcacuacaccugaggacuaguuauaagacugacuagcccgaugggccucccaacgggcccuccuccccuccuugcaccgagauuaauagaucuaaaaaaaaaaaaaaaaaaaaaaaaaaaaaaaaaaaaaaaaaaaaaaaaaaaaaaaaaaaaaaaaaaaaaaaaaaaaaaaaaaaaaaaaaaaaaaaaaaaa

SEQ ID NO: 25768 - RNA, 4017 nt, Artificial Sequence
  SARS-CoV-2/Wuhan/WIV05/2019__EPI_ISL_402128 spike protein mRNA gc (1-1273)(K986P_V987P_K986P_V987P_E484K_D614G)
aggagaaagcuuaccauguucguguuccuggugcugcugccccuggugagcagccagugcgugaaccugaccacccggacccagcugccaccagccuacaccaacagcuucacccggggcgucuacuaccccgacaagguguuccggagcagcguccugcacagcacccaggaccuguuccugcccuucuucagcaacgugaccugguuccacgccauccacgugagcggcaccaacggcaccaagcgguucgacaaccccgugcugcccuucaacgacggcguguacuucgccagcaccgagaagagcaacaucauccggggcuggaucuucggcaccacccuggacagcaagacccagagccugcugaucgugaauaacgccaccaacguggugaucaaggugugcgaguuccaguucugcaacgaccccuuccugggcguguacuaccacaagaacaacaagagcuggauggagagcgaguuccggguguacagcagcgccaacaacugcaccuucgaguacgugagccagcccuuccugauggaccuggagggcaagcagggcaacuucaagaaccugcgggaguucguguucaagaacaucgacggcuacuucaagaucuacagcaagcacaccccaaucaaccuggugcgggaucugccccagggcuucucagcccuggagccccugguggaccugcccaucggcaucaacaucacccgguuccagacccugcuggcccugcaccggagcuaccugaccccaggcgacagcagcagcggguggacagcaggcgcggcugcuuacuacgugggcuaccugcagccccggaccuuccugcugaaguacaacgagaacggcaccaucaccgacgccguggacugcgcccuggacccucugagcgagaccaagugcacccugaagagcuucaccguggagaagggcaucuaccagaccagcaacuuccgggugcagcccaccgagagcaucgugcgguuccccaacaucaccaaccugugccccuucggcgagguguucaacgccacccgguucgccagcguguacgccuggaaccggaagcggaucagcaacugcguggccgacuacagcgugcuguacaacagcgccagcuucagcaccuucaagugcuacggcgugagccccaccaagcugaacgaccugugcuucaccaacguguacgccgacagcuucgugauccguggcgacgaggugcggcagaucgcacccggccagacaggcaagaucgccgacuacaacuacaagcugcccgacgacuucaccggcugcgugaucgccuggaacagcaacaaccucgacagcaaggugggcggcaacuacaacuaccuguaccggcuguuccggaagagcaaccugaagcccuucgagcgggacaucagcaccgagaucuaccaagccggcuccaccccuugcaacggcgugaagggcuucaacugcuacuucccucugcagagcuacggcuuccagcccaccaacggcgugggcuaccagcccuaccgggugguggugcugagcuucgagcugcugcacgccccagccaccguguguggccccaagaagagcaccaaccuggugaagaacaagugcgugaacuucaacuucaacggccuuaccggcaccggcgugcugaccgagagcaacaagaaauuccugcccuuucagcaguucggccgggacaucgccgacaccaccgacgcugugcgggauccccagacccuggagauccuggacaucaccccuugcagcuucggcggcgugagcgugaucaccccaggcaccaacaccagcaaccagguggccgugcuguaccagggcgugaacugcaccgaggugcccguggccauccacgccgaccagcugacacccaccuggcgggucuacagcaccggcagcaacguguuccagacccgggccgguugccugaucggcgccgagcacgugaacaacagcuacgagugcgacauccccaucggcgccggcaucugugccagcuaccagacccagaccaauucaccccggagggcaaggagcguggccagccagagcaucaucgccuacaccaugagccugggcgccgagaacagcguggccuacagcaacaacagcaucgccauccccaccaacuucaccaucagcgugaccaccgagauucugcccgugagcaugaccaagaccagcguggacugcaccauguacaucugcggcgacagcaccgagugcagcaaccugcugcugcaguacggcagcuucugcacccagcugaaccgggcccugaccggcaucgccguggagcaggacaagaacacccaggagguguucgcccaggugaagcagaucuacaagaccccucccaucaaggacuucggcggcuucaacuucagccagauccugcccgaccccagcaagcccagcaagcggagcuucaucgaggaccugcuguucaacaaggugacccuagccgacgccggcuucaucaagcaguacggcgacugccucggcgacauagccgcccgggaccugaucugcgcccagaaguucaacggccugaccgugcugccuccccugcugaccgacgagaugaucgcccaguacaccagcgcccuguuagccggaaccaucaccagcggcuggacuuucggcgcuggagccgcucugcagauccccuucgccaugcagauggccuaccgguucaacggcaucggcgugacccagaacgugcuguacgagaaccagaagcugaucgccaaccaguucaacagcgccaucggcaagauccaggacagccugagcagcaccgcuagcgcccugggcaagcugcaggacguggugaaccagaacgcccaggcccugaacacccuggugaagcagcugagcagcaacuucggcgccaucagcagcgugcugaacgacauccugagccggcuggacccucccgaggccgaggugcagaucgaccggcugaucacuggccggcugcagagccugcagaccuacgugacccagcagcugauccgggccgccgagauucgggccagcgccaaccuggccgccaccaagaugagcgagugcgugcugggccagagcaagcggguggacuucugcggcaagggcuaccaccugaugagcuuuccccagagcgcaccccacggagugguguuccugcacgugaccuacgugcccgcccaggagaagaacuucaccaccgccccagccaucugccacgacggcaaggcccacuuuccccgggagggcguguucgugagcaacggcacccacugguucgugacccagcggaacuucuacgagccccagaucaucaccaccgacaacaccuucgugagcggcaacugcgacguggugaucggcaucgugaacaacaccguguacgauccccugcagcccgagcuggacagcuucaaggaggagcuggacaaguacuucaagaaucacaccagccccgacguggaccugggcgacaucagcggcaucaacgccagcguggugaacauccagaaggagaucgaucggcugaacgagguggccaagaaccugaacgagagccugaucgaccugcaggagcugggcaaguacgagcaguacaucaaguggcccugguacaucuggcugggcuucaucgccggccugaucgccaucgugauggugaccaucaugcugugcugcaugaccagcugcugcagcugccugaagggcuguugcagcugcggcagcugcugcaaguucgacgaggacgacagcgagcccgugcugaagggcgugaagcugcacuacaccugaggacuaguuauaagacugacuagcccgaugggccucccaacgggcccuccuccccuccuugcaccgagauuaauagaucuaaaaaaaaaaaaaaaaaaaaaaaaaaaaaaaaaaaaaaaaaaaaaaaaaaaaaaaaaaaaaaaaaaaaaaaaaaaaaaaaaaaaaaaaaaaaaaaaaaaa

SEQ ID NO: 25769 - RNA, 4017 nt, Artificial Sequence
  SARS-CoV-2/Wuhan/WIV05/2019__EPI_ISL_402128 spike protein mRNA gc (1-1273)(K986P_V987P_K986P_V987P_L18F_T20N_P26S_D138Y_R190S_K417T _E484K_N501Y_D614G_H655Y_T1027I)
aggagaaagcuuaccauguucguguuccuggugcugcugccccuggugagcagccagugcgugaacuucaccaaccggacccagcugccaagcgccuacaccaacagcuucacccggggcgucuacuaccccgacaagguguuccggagcagcguccugcacagcacccaggaccuguuccugcccuucuucagcaacgugaccugguuccacgccauccacgugagcggcaccaacggcaccaagcgguucgacaaccccgugcugcccuucaacgacggcguguacuucgccagcaccgagaagagcaacaucauccggggcuggaucuucggcaccacccuggacagcaagacccagagccugcugaucgugaauaacgccaccaacguggugaucaaggugugcgaguuccaguucugcaacuaccccuuccugggcguguacuaccacaagaacaacaagagcuggauggagagcgaguuccggguguacagcagcgccaacaacugcaccuucgaguacgugagccagcccuuccugauggaccuggagggcaagcagggcaacuucaagaaccugagcgaguucguguucaagaacaucgacggcuacuucaagaucuacagcaagcacaccccaaucaaccuggugcgggaucugccccagggcuucucagcccuggagccccugguggaccugcccaucggcaucaacaucacccgguuccagacccugcuggcccugcaccggagcuaccugaccccaggcgacagcagcagcggguggacagcaggcgcggcugcuuacuacgugggcuaccugcagccccggaccuuccugcugaaguacaacgagaacggcaccaucaccgacgccguggacugcgcccuggacccucugagcgagaccaagugcacccugaagagcuucaccguggagaagggcaucuaccagaccagcaacuuccgggugcagcccaccgagagcaucgugcgguuccccaacaucaccaaccugugccccuucggcgagguguucaacgccacccgguucgccagcguguacgccuggaaccggaagcggaucagcaacugcguggccgacuacagcgugcuguacaacagcgccagcuucagcaccuucaagugcuacggcgugagccccaccaagcugaacgaccugugcuucaccaacguguacgccgacagcuucgugauccguggcgacgaggugcggcagaucgcacccggccagacaggcaccaucgccgacuacaacuacaagcugcccgacgacuucaccggcugcgugaucgccuggaacagcaacaaccucgacagcaaggugggcggcaacuacaacuaccuguaccggcuguuccggaagagcaaccugaagcccuucgagcgggacaucagcaccgagaucuaccaagccggcuccaccccuugcaacggcgugaagggcuucaacugcuacuucccucugcagagcuacggcuuccagcccaccuacggcgugggcuaccagcccuaccgggugguggugcugagcuucgagcugcugcacgccccagccaccguguguggccccaagaagagcaccaaccuggugaagaacaagugcgugaacuucaacuucaacggccuuaccggcaccggcgugcugaccgagagcaacaagaaauuccugcccuuucagcaguucggccgggacaucgccgacaccaccgacgcugugcgggauccccagacccuggagauccuggacaucaccccuugcagcuucggcggcgugagcgugaucaccccaggcaccaacaccagcaaccagguggccgugcuguaccagggcgugaacugcaccgaggugcccguggccauccacgccgaccagcugacacccaccuggcgggucuacagcaccggcagcaacguguuccagacccgggccgguugccugaucggcgccgaguacgugaacaacagcuacgagugcgacauccccaucggcgccggcaucugugccagcuaccagacccagaccaauucaccccggagggcaaggagcguggccagccagagcaucaucgccuacaccaugagccugggcgccgagaacagcguggccuacagcaacaacagcaucgccauccccaccaacuucaccaucagcgugaccaccgagauucugcccgugagcaugaccaagaccagcguggacugcaccauguacaucugcggcgacagcaccgagugcagcaaccugcugcugcaguacggcagcuucugcacccagcugaaccgggcccugaccggcaucgccguggagcaggacaagaacacccaggagguguucgcccaggugaagcagaucuacaagaccccucccaucaaggacuucggcggcuucaacuucagccagauccugcccgaccccagcaagcccagcaagcggagcuucaucgaggaccugcuguucaacaaggugacccuagccgacgccggcuucaucaagcaguacggcgacugccucggcgacauagccgcccgggaccugaucugcgcccagaaguucaacggccugaccgugcugccuccccugcugaccgacgagaugaucgcccaguacaccagcgcccuguuagccggaaccaucaccagcggcuggacuuucggcgcuggagccgcucugcagauccccuucgccaugcagauggccuaccgguucaacggcaucggcgugacccagaacgugcuguacgagaaccagaagcugaucgccaaccaguucaacagcgccaucggcaagauccaggacagccugagcagcaccgcuagcgcccugggcaagcugcaggacguggugaaccagaacgcccaggcccugaacacccuggugaagcagcugagcagcaacuucggcgccaucagcagcgugcugaacgacauccugagccggcuggacccucccgaggccgaggugcagaucgaccggcugaucacuggccggcugcagagccugcagaccuacgugacccagcagcugauccgggccgccgagauucgggccagcgccaaccuggccgccaucaagaugagcgagugcgugcugggccagagcaagcggguggacuucugcggcaagggcuaccaccugaugagcuuuccccagagcgcaccccacggagugguguuccugcacgugaccuacgugcccgcccaggagaagaacuucaccaccgccccagccaucugccacgacggcaaggcccacuuuccccgggagggcguguucgugagcaacggcacccacugguucgugacccagcggaacuucuacgagccccagaucaucaccaccgacaacaccuucgugagcggcaacugcgacguggugaucggcaucgugaacaacaccguguacgauccccugcagcccgagcuggacagcuucaaggaggagcuggacaaguacuucaagaaucacaccagccccgacguggaccugggcgacaucagcggcaucaacgccagcguggugaacauccagaaggagaucgaucggcugaacgagguggccaagaaccugaacgagagccugaucgaccugcaggagcugggcaaguacgagcaguacaucaaguggcccugguacaucuggcugggcuucaucgccggccugaucgccaucgugauggugaccaucaugcugugcugcaugaccagcugcugcagcugccugaagggcuguugcagcugcggcagcugcugcaaguucgacgaggacgacagcgagcccgugcugaagggcgugaagcugcacuacaccugaggacuaguuauaagacugacuagcccgaugggccucccaacgggcccuccuccccuccuugcaccgagauuaauagaucuaaaaaaaaaaaaaaaaaaaaaaaaaaaaaaaaaaaaaaaaaaaaaaaaaaaaaaaaaaaaaaaaaaaaaaaaaaaaaaaaaaaaaaaaaaaaaaaaaaaa

SEQ ID NO: 25770 - RNA, 4017 nt, Artificial Sequence
  SARS-CoV-2/Wuhan/WIV05/2019__EPI_ISL_402128 spike protein mRNA gc (1-1273)(K986P_V987P_K986P_V987P_S13I_W152C_L452R_D614G)
aggagaaagcuuaccauguucguguuccuggugcugcugccccuggugagcauccagugcgugaaccugaccacccggacccagcugccaccagccuacaccaacagcuucacccggggcgucuacuaccccgacaagguguuccggagcagcguccugcacagcacccaggaccuguuccugcccuucuucagcaacgugaccugguuccacgccauccacgugagcggcaccaacggcaccaagcgguucgacaaccccgugcugcccuucaacgacggcguguacuucgccagcaccgagaagagcaacaucauccggggcuggaucuucggcaccacccuggacagcaagacccagagccugcugaucgugaauaacgccaccaacguggugaucaaggugugcgaguuccaguucugcaacgaccccuuccugggcguguacuaccacaagaacaacaagagcugcauggagagcgaguuccggguguacagcagcgccaacaacugcaccuucgaguacgugagccagcccuuccugauggaccuggagggcaagcagggcaacuucaagaaccugcgggaguucguguucaagaacaucgacggcuacuucaagaucuacagcaagcacaccccaaucaaccuggugcgggaucugccccagggcuucucagcccuggagccccugguggaccugcccaucggcaucaacaucacccgguuccagacccugcuggcccugcaccggagcuaccugaccccaggcgacagcagcagcggguggacagcaggcgcggcugcuuacuacgugggcuaccugcagccccggaccuuccugcugaaguacaacgagaacggcaccaucaccgacgccguggacugcgcccuggacccucugagcgagaccaagugcacccugaagagcuucaccguggagaagggcaucuaccagaccagcaacuuccgggugcagcccaccgagagcaucgugcgguuccccaacaucaccaaccugugccccuucggcgagguguucaacgccacccgguucgccagcguguacgccuggaaccggaagcggaucagcaacugcguggccgacuacagcgugcuguacaacagcgccagcuucagcaccuucaagugcuacggcgugagccccaccaagcugaacgaccugugcuucaccaacguguacgccgacagcuucgugauccguggcgacgaggugcggcagaucgcacccggccagacaggcaagaucgccgacuacaacuacaagcugcccgacgacuucaccggcugcgugaucgccuggaacagcaacaaccucgacagcaaggugggcggcaacuacaacuaccgcuaccggcuguuccggaagagcaaccugaagcccuucgagcgggacaucagcaccgagaucuaccaagccggcuccaccccuugcaacggcguggagggcuucaacugcuacuucccucugcagagcuacggcuuccagcccaccaacggcgugggcuaccagcccuaccgggugguggugcugagcuucgagcugcugcacgccccagccaccguguguggccccaagaagagcaccaaccuggugaagaacaagugcgugaacuucaacuucaacggccuuaccggcaccggcgugcugaccgagagcaacaagaaauuccugcccuuucagcaguucggccgggacaucgccgacaccaccgacgcugugcgggauccccagacccuggagauccuggacaucaccccuugcagcuucggcggcgugagcgugaucaccccaggcaccaacaccagcaaccagguggccgugcuguaccagggcgugaacugcaccgaggugcccguggccauccacgccgaccagcugacacccaccuggcgggucuacagcaccggcagcaacguguuccagacccgggccgguugccugaucggcgccgagcacgugaacaacagcuacgagugcgacauccccaucggcgccggcaucugugccagcuaccagacccagaccaauucaccccggagggcaaggagcguggccagccagagcaucaucgccuacaccaugagccugggcgccgagaacagcguggccuacagcaacaacagcaucgccauccccaccaacuucaccaucagcgugaccaccgagauucugcccgugagcaugaccaagaccagcguggacugcaccauguacaucugcggcgacagcaccgagugcagcaaccugcugcugcaguacggcagcuucugcacccagcugaaccgggcccugaccggcaucgccguggagcaggacaagaacacccaggagguguucgcccaggugaagcagaucuacaagaccccucccaucaaggacuucggcggcuucaacuucagccagauccugcccgaccccagcaagcccagcaagcggagcuucaucgaggaccugcuguucaacaaggugacccuagccgacgccggcuucaucaagcaguacggcgacugccucggcgacauagccgcccgggaccugaucugcgcccagaaguucaacggccugaccgugcugccuccccugcugaccgacgagaugaucgcccaguacaccagcgcccuguuagccggaaccaucaccagcggcuggacuuucggcgcuggagccgcucugcagauccccuucgccaugcagauggccuaccgguucaacggcaucggcgugacccagaacgugcuguacgagaaccagaagcugaucgccaaccaguucaacagcgccaucggcaagauccaggacagccugagcagcaccgcuagcgcccugggcaagcugcaggacguggugaaccagaacgcccaggcccugaacacccuggugaagcagcugagcagcaacuucggcgccaucagcagcgugcugaacgacauccugagccggcuggacccucccgaggccgaggugcagaucgaccggcugaucacuggccggcugcagagccugcagaccuacgugacccagcagcugauccgggccgccgagauucgggccagcgccaaccuggccgccaccaagaugagcgagugcgugcugggccagagcaagcggguggacuucugcggcaagggcuaccaccugaugagcuuuccccagagcgcaccccacggagugguguuccugcacgugaccuacgugcccgcccaggagaagaacuucaccaccgccccagccaucugccacgacggcaaggcccacuuuccccgggagggcguguucgugagcaacggcacccacugguucgugacccagcggaacuucuacgagccccagaucaucaccaccgacaacaccuucgugagcggcaacugcgacguggugaucggcaucgugaacaacaccguguacgauccccugcagcccgagcuggacagcuucaaggaggagcuggacaaguacuucaagaaucacaccagccccgacguggaccugggcgacaucagcggcaucaacgccagcguggugaacauccagaaggagaucgaucggcugaacgagguggccaagaaccugaacgagagccugaucgaccugcaggagcugggcaaguacgagcaguacaucaaguggcccugguacaucuggcugggcuucaucgccggccugaucgccaucgugauggugaccaucaugcugugcugcaugaccagcugcugcagcugccugaagggcuguugcagcugcggcagcugcugcaaguucgacgaggacgacagcgagcccgugcugaagggcgugaagcugcacuacaccugaggacuaguuauaagacugacuagcccgaugggccucccaacgggcccuccuccccuccuugcaccgagauuaauagaucuaaaaaaaaaaaaaaaaaaaaaaaaaaaaaaaaaaaaaaaaaaaaaaaaaaaaaaaaaaaaaaaaaaaaaaaaaaaaaaaaaaaaaaaaaaaaaaaaaaaa

SEQ ID NO: 25771 - RNA, 4017 nt, Artificial Sequence
  SARS-CoV-2/Wuhan/WIV05/2019__EPI_ISL_402128 spike protein mRNA gc (1-1273)(K986P_V987P)
aggagaaagcuuaccauguucguguuccuggugcugcugccccuggugagcagccagugcgugaaccugaccacccggacccagcugcccccugccuacaccaacagcuucacccggggcguguacuaccccgacaagguguuccggagcagcgugcugcacagcacccaggaccuguuccugcccuucuucagcaacgugaccugguuccacgccauccacgugagcggcaccaacggcaccaagcgguucgacaacccagugcugcccuucaacgacggcguguacuucgccagcaccgagaagucaaacaucauccggggcuggaucuucggcaccacccuggacagcaagacacagagccugcugaucgugaacaacgccaccaacguggugaucaaggugugcgaguuucaguucugcaacgaccccuuccugggcguguacuaccacaagaacaacaagagcuggauggagagcgaguuccgggucuacagcagcgcuaacaauugcaccuucgaguacgugagccagcccuuccugauggaccucgagggcaagcagggcaacuucaagaaccugcgggaguucguguucaagaacaucgauggcuacuucaagaucuacagcaagcacacccccaucaaccuggugcgggaccugccccagggauucagcgcccuggagccucugguggaccugcccaucggcaucaacaucaccagguuccagacccugcuggcccugcaccggagcuaccugacccccggcgacagcagcagcggcuggaccgccggcgccgccgcauacuacgugggcuaccugcagccacggaccuuccugcugaaguacaacgagaacggcaccaucaccgacgccguggacugcgcccuggacccccugagcgagaccaagugcacccuaaagagcuucaccguggagaagggcaucuaccagaccagcaacuuccgggugcagcccacugagagcaucgugcgguuccccaacauuaccaaccugugucccuucggcgagguguucaacgccacccgguucgccagcguguacgccuggaaccggaagcggaucagcaacugcguggccgacuacagcgugcuguacaacagcgccagcuucagcaccuucaagugcuacggcgugagcccuaccaagcugaacgaccugugcuucaccaacguguacgcugacagcuucgugauccggggcgacgaggugcggcagaucgcccccggccagaccggcaagaucgccgacuacaacuacaagcugcccgacgacuucaccggcugcgugaucgccuggaacagcaacaaccuggacagcaaggugggcggcaacuacaacuaccuguaccggcuguuccguaagagcaaccugaagccauucgagcgggacaucagcaccgagaucuaccaggccggcagcacccccugcaacgguguggagggcuuuaacugcuacuucccccugcagagcuacggcuuccagcccaccaacggcgugggcuaccagcccuaccgggugguggugcugagcuucgagcugcugcacgcccccgccaccgugugcggcccuaaaaagagcaccaaccuggugaagaacaagugcgugaacuucaauuucaacggccugaccggcaccggcgugcugaccgagagcaacaagaaguuccugcccuuccagcaguucggccgggauaucgccgacaccaccgacgcagugcgggacccccagacccuggagauccuggacaucaccccaugcagcuucggcggcgugagcgucaucacccccggcacaaacaccagcaaccagguggccgugcuguaccaggacgugaacugcaccgaggugcccguggccauccacgccgaccagcugacccccaccuggcggguguacagcaccggaagcaacguguuccagacccgggccggcugccugaucggcgccgagcacgugaacaacuccuacgagugcgacauccccaucggcgcuggcaucugcgccagcuaccagacccagaccaacagcccccggcgggcccggagcguggccagccagagcaucaucgccuacaccaugagcuuaggcgccgagaacagcguggccuacagcaacaacagcaucgcgaucccuaccaacuucaccaucagcgugaccaccgagauacugcccgugagcaugaccaagaccagcguggacuguaccauguacaucugcggcgacagcaccgagugcagcaaccugcugcugcaguacggcagcuucugcacccagcugaaccgggcccugaccggcaucgccguggagcaggacaagaacacccaagagguguucgcccaggugaagcagaucuacaagacucccccaaucaaggacuucggcggcuucaacuucagccagauccugcccgaccccagcaagcccagcaagcggagcuucaucgaggaccugcuguucaacaaggugacccuggccgacgccggcuucaucaagcaguacggcgauugccugggcgacaucgccgcucgggaccugaucugcgcccagaaguucaacgggcugaccgugcugcccccucugcugaccgacgagaugaucgcccaguacaccagcgcccugcuugccggcaccaucaccagcggcuggaccuucggcgccggcgcagcccugcagauccccuucgccaugcagauggccuaccgguucaacggcaucggcgugacccagaacgugcuguacgagaaccagaagcugaucgccaaccaguucaacagcgccaucggcaagauccaggacagccugagcagcaccgccagcgcccugggcaagcugcaggacguggugaaccagaacgcucaggcccugaacacccuggugaagcagcugagcagcaacuucggcgccaucagcucagugcugaaugacauccugagcaggcuggaucccccagaggccgaggugcagaucgaccggcugaucaccggccggcugcagagccugcagaccuacgugacccagcagcugauccgggccgccgagauccgggccagcgccaaccuggcagccaccaagaugagcgagugcgugcugggccagagcaagcggguggacuuuugcggcaagggcuaccaccugaugagcuucccccagagcgcuccccacggcgugguguuccuccacgugacauacguccccgcccaggagaagaacuucaccaccgcccccgccauuugccacgacggcaaggcccacuucccccgggagggcguguucgugagcaacggaacccacugguucgugacccagcggaacuucuacgagccucagaucaucaccaccgacaacaccuucgugagcggcaacugcgacguggugaucggcaucgugaacaacaccguguacgacccccugcagcccgagcuggacagcuucaaggaggagcuggacaaguacuucaagaaccacaccagcccagacguggaccugggcgacaucagcggcaucaacgccagcguggugaacauccagaaggagaucgaccggcugaacgagguggccaagaaccugaacgagagccugaucgaccugcaggagcugggcaaguacgagcaguacaucaaguggcccugguacaucuggcugggcuucaucgccggccugaucgccaucgugauggugaccaucaugcugugcugcaugaccagcugcuguagcugccugaagggcugcugcagcugcggcagcugcugcaaguucgacgaggacgacagcgagcccgugcugaagggcgugaagcugcacuacaccugaggacuaguuauaagacugacuagcccgaugggccucccaacgggcccuccuccccuccuugcaccgagauuaauagaucuaaaaaaaaaaaaaaaaaaaaaaaaaaaaaaaaaaaaaaaaaaaaaaaaaaaaaaaaaaaaaaaaaaaaaaaaaaaaaaaaaaaaaaaaaaaaaaaaaaaa

SEQ ID NO: 25772 - RNA, 4017 nt, Artificial Sequence
  SARS-CoV-2/Wuhan/WIV05/2019__EPI_ISL_402128 spike protein mRNA gc (1-1273)(K986P_V987P_ D614G)
aggagaaagcuuaccauguucguguuccuggugcugcugccccuggugagcagccagugcgugaaccugaccacccggacccagcugcccccugccuacaccaacagcuucacccggggcguguacuaccccgacaagguguuccggagcagcgugcugcacagcacccaggaccuguuccugcccuucuucagcaacgugaccugguuccacgccauccacgugagcggcaccaacggcaccaagcgguucgacaacccagugcugcccuucaacgacggcguguacuucgccagcaccgagaagucaaacaucauccggggcuggaucuucggcaccacccuggacagcaagacacagagccugcugaucgugaacaacgccaccaacguggugaucaaggugugcgaguuucaguucugcaacgaccccuuccugggcguguacuaccacaagaacaacaagagcuggauggagagcgaguuccgggucuacagcagcgcuaacaauugcaccuucgaguacgugagccagcccuuccugauggaccucgagggcaagcagggcaacuucaagaaccugcgggaguucguguucaagaacaucgauggcuacuucaagaucuacagcaagcacacccccaucaaccuggugcgggaccugccccagggauucagcgcccuggagccucugguggaccugcccaucggcaucaacaucaccagguuccagacccugcuggcccugcaccggagcuaccugacccccggcgacagcagcagcggcuggaccgccggcgccgccgcauacuacgugggcuaccugcagccacggaccuuccugcugaaguacaacgagaacggcaccaucaccgacgccguggacugcgcccuggacccccugagcgagaccaagugcacccuaaagagcuucaccguggagaagggcaucuaccagaccagcaacuuccgggugcagcccacugagagcaucgugcgguuccccaacauuaccaaccugugucccuucggcgagguguucaacgccacccgguucgccagcguguacgccuggaaccggaagcggaucagcaacugcguggccgacuacagcgugcuguacaacagcgccagcuucagcaccuucaagugcuacggcgugagcccuaccaagcugaacgaccugugcuucaccaacguguacgcugacagcuucgugauccggggcgacgaggugcggcagaucgcccccggccagaccggcaagaucgccgacuacaacuacaagcugcccgacgacuucaccggcugcgugaucgccuggaacagcaacaaccuggacagcaaggugggcggcaacuacaacuaccuguaccggcuguuccguaagagcaaccugaagccauucgagcgggacaucagcaccgagaucuaccaggccggcagcacccccugcaacgguguggagggcuuuaacugcuacuucccccugcagagcuacggcuuccagcccaccaacggcgugggcuaccagcccuaccgggugguggugcugagcuucgagcugcugcacgcccccgccaccgugugcggcccuaaaaagagcaccaaccuggugaagaacaagugcgugaacuucaauuucaacggccugaccggcaccggcgugcugaccgagagcaacaagaaguuccugcccuuccagcaguucggccgggauaucgccgacaccaccgacgcagugcgggacccccagacccuggagauccuggacaucaccccaugcagcuucggcggcgugagcgucaucacccccggcacaaacaccagcaaccagguggccgugcuguaccagggagugaacugcaccgaggugcccguggccauccacgccgaccagcugacccccaccuggcggguguacagcaccggcagcaacguguuccagacccgggccggcugccugaucggcgccgagcacgugaacaacuccuacgagugcgacauccccaucggcgcuggcaucugcgccagcuaccagacccagaccaacagcccccggcgggcccggagcguggccagccagagcaucaucgccuacaccaugagcuuaggcgccgagaacagcguggccuacagcaacaacagcaucgcgaucccuaccaacuucaccaucagcgugaccaccgagauacugcccgugagcaugaccaagaccagcguggacuguaccauguacaucugcggcgacagcaccgagugcagcaaccugcugcugcaguacggcagcuucugcacccagcugaaccgggcccugaccggcaucgccguggagcaggacaagaacacccaagagguguucgcccaggugaagcagaucuacaagacucccccaaucaaggacuucggcggcuucaacuucagccagauccugcccgaccccagcaagcccagcaagcggagcuucaucgaggaccugcuguucaacaaggugacccuggccgacgccggcuucaucaagcaguacggcgacugccugggggauaucgccgcucgggaccugaucugcgcccagaaguucaacggccugaccgugcugcccccucugcugaccgacgagaugaucgcccaguacaccagcgcccugcuugccggcaccaucaccagcggcuggaccuucggcgccggcgcagcccugcagauccccuucgccaugcagauggccuaccgguucaacggcaucggcgugacccagaacgugcuguacgagaaccagaagcugaucgccaaccaguucaacagcgccaucggcaagauccaggacagccugagcagcaccgccagcgcccugggcaagcugcaggacguggugaaccagaacgcucaggcccugaacacccuggugaagcagcugagcagcaacuucggcgccaucagcucagugcugaaugacauccugagcaggcuggaucccccagaggccgaggugcagaucgaccggcugaucaccggccggcugcagagccugcagaccuacgugacccagcagcugauccgggccgccgagauccgggccagcgccaaccuggcagccaccaagaugagcgagugcgugcugggccagagcaagcggguggacuuuugcggcaagggcuaccaccugaugagcuucccccagagcgcuccccacggcgugguguuccuccacgugacauacguccccgcccaggagaagaacuucaccaccgcccccgccauuugccacgacggcaaggcccacuucccccgggagggaguguucgugagcaacggcacccacugguucgugacccagcggaacuucuacgagccucagaucaucaccaccgacaacaccuucgugagcggcaacugcgacguggugaucggcaucgugaacaacaccguguacgacccccugcagcccgagcuggacagcuucaaggaggagcuggacaaguacuucaagaaccacaccagcccagacguggaccugggcgacaucagcggcaucaacgccagcguggugaacauccagaaggagaucgaccggcugaacgagguggccaagaaccugaacgagagccugaucgaccugcaggagcugggcaaguacgagcaguacaucaaguggcccugguacaucuggcugggcuucaucgccggccugaucgccaucgugauggugaccaucaugcugugcugcaugaccagcugcuguagcugccugaagggcugcugcagcugcggcagcugcugcaaguucgacgaggacgacagcgagcccgugcugaagggcgugaagcugcacuacaccugaggacuaguuauaagacugacuagcccgaugggccucccaacgggcccuccuccccuccuugcaccgagauuaauagaucuaaaaaaaaaaaaaaaaaaaaaaaaaaaaaaaaaaaaaaaaaaaaaaaaaaaaaaaaaaaaaaaaaaaaaaaaaaaaaaaaaaaaaaaaaaaaaaaaaaaa

SEQ ID NO: 25773 - RNA, 4017 nt, Artificial Sequence
  SARS-CoV-2/Wuhan/WIV05/2019__EPI_ISL_402128 spike protein mRNA gc (1-1273)(K986P_V987P_A222V_D614G)
aggagaaagcuuaccauguucguguuccuggugcugcugccccuggugagcagccagugcgugaaccugaccacccggacccagcugcccccugccuacaccaacagcuucacccggggcguguacuaccccgacaagguguuccggagcagcgugcugcacagcacccaggaccuguuccugcccuucuucagcaacgugaccugguuccacgccauccacgugagcggcaccaacggcaccaagcgguucgacaacccagugcugcccuucaacgacggcguguacuucgccagcaccgagaagucaaacaucauccggggcuggaucuucggcaccacccuggacagcaagacacagagccugcugaucgugaacaacgccaccaacguggugaucaaggugugcgaguuucaguucugcaacgaccccuuccugggcguguacuaccacaagaacaacaagagcuggauggagagcgaguuccgggucuacagcagcgcuaacaauugcaccuucgaguacgugagccagcccuuccugauggaccucgagggcaagcagggcaacuucaagaaccugcgggaguucguguucaagaacaucgauggcuacuucaagaucuacagcaagcacacccccaucaaccuggugcgggaccugccccagggauucagcgugcuggagccucugguggaccugcccaucggcaucaacaucaccagguuccagacccugcuggcccugcaccggagcuaccugacccccggcgacagcagcagcggcuggaccgccggcgccgccgccuacuacgugggcuaccugcagccacggaccuuccugcugaaguacaacgagaacggcaccaucaccgacgcaguggacugcgcccuggacccccugagcgagaccaagugcacccuaaagagcuucaccguggagaagggcaucuaccagaccagcaacuuccgggugcagcccacugagagcaucgugcgguuccccaacauuaccaaccugugucccuucggcgagguguucaacgccacccgguucgccagcguguacgccuggaaccggaagcggaucagcaacugcguggccgacuacagcgugcuguacaacagcgccagcuucagcaccuucaagugcuacggcgugagcccuaccaagcugaacgaccugugcuucaccaacguguacgccgacagcuucgugauccggggcgacgaggugcggcagaucgcucccggccagaccggcaagaucgccgacuacaacuacaagcugcccgacgacuucaccggcugcgugaucgccuggaacagcaacaaccuggacagcaaggugggcggcaacuacaacuaccuguaccggcuguuccguaagagcaaccugaagccauucgagcgggacaucagcaccgagaucuaccaggccggcagcacccccugcaacgguguggagggcuuuaacugcuacuucccccugcagagcuacggcuuccagcccaccaacggcgugggcuaccagcccuaccgggugguggugcugagcuucgagcugcugcacgcccccgccaccgugugcggcccuaaaaagagcaccaaccuggugaagaacaagugcgugaacuucaauuucaacggccugaccggcaccggcgugcugaccgagagcaacaagaaguuccugcccuuccagcaguucggccgggauaucgccgacaccaccgacgccgugcgggacccccagacccuggagauccuggacaucaccccaugcagcuucggcggcgucagcgugaucacccccggcacaaacaccagcaaccagguggcagugcuguaccagggagugaacugcaccgaggugcccguggccauccacgccgaccagcugacccccaccuggcggguguacagcaccggcagcaacguguuccagacccgggccggcugccugaucggcgccgagcacgugaacaacuccuacgagugcgacauccccaucggcgccggcaucugcgcuagcuaccagacccagaccaacagcccccggcgggcccggagcguggccagccagagcaucaucgccuacaccaugagcuuaggcgccgagaacagcguggccuacagcaacaacagcaucgccaucccuaccaacuucaccaucagcgugaccaccgagauacugcccgugagcaugaccaagaccagcguggacuguaccauguacaucugcggcgacagcaccgagugcagcaaccugcugcugcaguacggcagcuucugcacccagcugaaccgggcgcugaccggcaucgccguggagcaggacaagaacacccaagagguguucgcccaggugaagcagaucuacaagacucccccaaucaaggacuucggcggcuucaacuucagccagauccugcccgaccccagcaagcccagcaagcggagcuucaucgaggaccugcuguucaacaaggugacccuggccgacgccggcuucaucaagcaguacggcgacugccugggggauaucgccgcccgggaccugaucugcgcucagaaguucaacggccugaccgugcugcccccucugcugaccgacgagaugaucgcccaguacaccagcgcccugcuugccggcaccaucaccagcggcuggaccuucggcgccggcgccgcacugcagauccccuucgccaugcagauggccuaccgguucaacggcaucggcgugacccagaacgugcuguacgagaaccagaagcugaucgccaaccaguucaacagcgccaucggcaagauccaggacagccugagcagcaccgccagcgcccugggcaagcugcaggacguggugaaccagaacgcccaggcucugaacacccuggugaagcagcugagcagcaacuucggcgccaucagcucagugcugaaugacauccugagcaggcuggaucccccagaggccgaggugcagaucgaccggcugaucaccggccggcugcagagccugcagaccuacgugacccagcagcugauccgggccgccgagauccgggccagcgccaaccuggccgcaaccaagaugagcgagugcgugcugggccagagcaagcggguggacuuuugcggcaagggcuaccaccugaugagcuucccccagagcgcuccccacggcgugguguuccuccacgucacauacgugcccgcccaggagaagaacuucaccaccgcccccgccauuugccacgacggcaaggcccacuucccccgggagggaguguucgugagcaacggcacccacugguucgugacccagcggaacuucuacgagccucagaucaucaccaccgacaacaccuucgugagcggcaacugcgacguggugaucggcaucgugaacaacaccguguacgacccccugcagcccgagcuggacagcuucaaggaggagcuggacaaguacuucaagaaccacaccagcccagacguggaccugggcgacaucagcggcaucaacgccagcguggugaacauccagaaggagaucgaccggcugaacgagguggccaagaaccugaacgagagccugaucgaccugcaggagcugggcaaguacgagcaguacaucaaguggcccugguacaucuggcugggcuucaucgccggccugaucgccaucgugauggugaccaucaugcugugcugcaugaccagcugcuguagcugccugaagggcugcugcagcugcggcagcugcugcaaguucgacgaggacgacagcgagcccgugcugaagggcgugaagcugcacuacaccugaggacuaguuauaagacugacuagcccgaugggccucccaacgggcccuccuccccuccuugcaccgagauuaauagaucuaaaaaaaaaaaaaaaaaaaaaaaaaaaaaaaaaaaaaaaaaaaaaaaaaaaaaaaaaaaaaaaaaaaaaaaaaaaaaaaaaaaaaaaaaaaaaaaaaaaa

SEQ ID NO: 25774 - RNA, 4017 nt, Artificial Sequence
  SARS-CoV-2/Wuhan/WIV05/2019__EPI_ISL_402128 spike protein mRNA gc (1-1273)(K986P_V987P_N439K_D614G)
aggagaaagcuuaccauguucguguuccuggugcugcugccccuggugagcagccagugcgugaaccugaccacccggacccagcugcccccugccuacaccaacagcuucacccggggcguguacuaccccgacaagguguuccggagcagcgugcugcacagcacccaggaccuguuccugcccuucuucagcaacgugaccugguuccacgccauccacgugagcggcaccaacggcaccaagcgguucgacaacccagugcugcccuucaacgacggcguguacuucgccagcaccgagaagucaaacaucauccggggcuggaucuucggcaccacccuggacagcaagacacagagccugcugaucgugaacaacgccaccaacguggugaucaaggugugcgaguuucaguucugcaacgaccccuuccugggcguguacuaccacaagaacaacaagagcuggauggagagcgaguuccgggucuacagcagcgcuaacaauugcaccuucgaguacgugagccagcccuuccugauggaccucgagggcaagcagggcaacuucaagaaccugcgggaguucguguucaagaacaucgauggcuacuucaagaucuacagcaagcacacccccaucaaccuggugcgggaccugccccagggauucagcgcccuggagccucugguggaccugcccaucggcaucaacaucaccagguuccagacccugcuggcccugcaccggagcuaccugacccccggcgacagcagcagcggcuggaccgccggcgccgccgcauacuacgugggcuaccugcagccacggaccuuccugcugaaguacaacgagaacggcaccaucaccgacgccguggacugcgcccuggacccccugagcgagaccaagugcacccuaaagagcuucaccguggagaagggcaucuaccagaccagcaacuuccgggugcagcccacugagagcaucgugcgguuccccaacauuaccaaccugugucccuucggcgagguguucaacgccacccgguucgccagcguguacgccuggaaccggaagcggaucagcaacugcguggccgacuacagcgugcuguacaacagcgccagcuucagcaccuucaagugcuacggcgugagcccuaccaagcugaacgaccugugcuucaccaacguguacgcugacagcuucgugauccggggcgacgaggugcggcagaucgcccccggccagaccggcaagaucgccgacuacaacuacaagcugcccgacgacuucaccggcugcgugaucgccuggaacagcaagaaccuggacagcaaggugggcggcaacuacaacuaccuguaccggcuguuccguaagagcaaccugaagccauucgagcgggacaucagcaccgagaucuaccaggccggcagcacccccugcaacgguguggagggcuuuaacugcuacuucccccugcagagcuacggcuuccagcccaccaacggcgugggcuaccagcccuaccgggugguggugcugagcuucgagcugcugcacgcccccgccaccgugugcggcccuaaaaagagcaccaaccuggugaagaacaagugcgugaacuucaacuucaauggccugaccggcaccggcgugcugaccgagagcaacaagaaguuccugcccuuccagcaguucggccgggauaucgccgacaccaccgacgcagugcgggacccccagacccuggagauccuggacaucaccccaugcagcuucggcggcgugagcgucaucacccccggcacaaacaccagcaaccagguggccgugcuguaccagggagugaacugcaccgaggugcccguggccauccacgccgaccagcugacccccaccuggcggguguacagcaccggcagcaacguguuccagacccgggccggcugccugaucggcgccgagcacgugaacaacuccuacgagugcgacauccccaucggcgcuggcaucugcgccagcuaccagacccagaccaacagcccccggcgggcccggagcguggccagccagagcaucaucgccuacaccaugagcuuaggcgccgagaacagcguggccuacagcaacaacagcaucgcgaucccuaccaacuucaccaucagcgugaccaccgagauacugcccgugagcaugaccaagaccagcguggacuguaccauguacaucugcggcgacagcaccgagugcagcaaccugcugcugcaguacggcagcuucugcacccagcugaaccgggcccugaccggcaucgccguggagcaggacaagaacacccaagagguguucgcccaggugaagcagaucuacaagacucccccaaucaaggacuucggcggcuucaacuucagccagauccugcccgaccccagcaagcccagcaagcggagcuucaucgaggaccugcuguucaacaaggugacccuggccgacgccggcuucaucaagcaguacggcgacugccugggggauaucgccgcucgggaccugaucugcgcccagaaguucaacggccugaccgugcugcccccucugcugaccgacgagaugaucgcccaguacaccagcgcccugcuugccggcaccaucaccagcggcuggaccuucggcgccggcgcagcccugcagauccccuucgccaugcagauggccuaccgguucaacggcaucggcgugacccagaacgugcuguacgagaaccagaagcugaucgccaaccaguucaacagcgccaucggcaagauccaggacagccugagcagcaccgccagcgcccugggcaagcugcaggacguggugaaccagaacgcucaggcccugaacacccuggugaagcagcugagcagcaacuucggcgccaucagcucagugcugaacgacauccugagcaggcuggaucccccagaggccgaggugcagaucgaccggcugaucaccggccggcugcagagccugcagaccuacgugacccagcagcugauccgggccgccgagauccgggccagcgccaaucuggcagccaccaagaugagcgagugcgugcugggccagagcaagcggguggacuuuugcggcaagggcuaccaccugaugagcuucccccagagcgcuccccacggcgugguguuccuccacgugacauacguccccgcccaggagaagaacuucaccaccgcccccgccauuugccacgacggcaaggcccacuucccccgggagggaguguucgugagcaacggcacccacugguucgugacccagcggaacuucuacgagccucagaucaucaccaccgacaacaccuucgugagcggcaacugcgacguggugaucggcaucgugaacaacaccguguacgacccccugcagcccgagcuggacagcuucaaggaggagcuggacaaguacuucaagaaccacaccagcccagacguggaccugggcgacaucagcggcaucaacgccagcguggugaacauccagaaggagaucgaccggcugaacgagguggccaagaaccugaacgagagccugaucgaccugcaggagcugggcaaguacgagcaguacaucaaguggcccugguacaucuggcugggcuucaucgccggccugaucgccaucgugauggugaccaucaugcugugcugcaugaccagcugcuguagcugccugaagggcugcugcagcugcggcagcugcugcaaguucgacgaggacgacagcgagcccgugcugaagggcgugaagcugcacuacaccugaggacuaguuauaagacugacuagcccgaugggccucccaacgggcccuccuccccuccuugcaccgagauuaauagaucuaaaaaaaaaaaaaaaaaaaaaaaaaaaaaaaaaaaaaaaaaaaaaaaaaaaaaaaaaaaaaaaaaaaaaaaaaaaaaaaaaaaaaaaaaaaaaaaaaaaa

SEQ ID NO: 25775 - RNA, 4017 nt, Artificial Sequence
  SARS-CoV-2/Wuhan/WIV05/2019__EPI_ISL_402128 spike protein mRNA gc (1-1273)(K986P_V987P_S477N_D614G)
aggagaaagcuuaccauguucguguuccuggugcugcugccccuggugagcagccagugcgugaaccugaccacccggacccagcugcccccugccuacaccaacagcuucacccggggcguguacuaccccgacaagguguuccggagcagcgugcugcacagcacccaggaccuguuccugcccuucuucagcaacgugaccugguuccacgccauccacgugagcggcaccaacggcaccaagcgguucgacaacccagugcugcccuucaacgacggcguguacuucgccagcaccgagaagucaaacaucauccggggcuggaucuucggcaccacccuggacagcaagacacagagccugcugaucgugaacaacgccaccaacguggugaucaaggugugcgaguuucaguucugcaacgaccccuuccugggcguguacuaccacaagaacaacaagagcuggauggagagcgaguuccgggucuacagcagcgcuaacaauugcaccuucgaguacgugagccagcccuuccugauggaccucgagggcaagcagggcaacuucaagaaccugcgggaguucguguucaagaacaucgauggcuacuucaagaucuacagcaagcacacccccaucaaccuggugcgggaccugccccagggauucagcgcccuggagccucugguggaccugcccaucggcaucaacaucaccagguuccagacccugcuggcccugcaccggagcuaccugacccccggcgacagcagcagcggcuggaccgccggcgccgccgcauacuacgugggcuaccugcagccacggaccuuccugcugaaguacaacgagaacggcaccaucaccgacgccguggacugcgcccuggacccccugagcgagaccaagugcacccuaaagagcuucaccguggagaagggcaucuaccagaccagcaacuuccgggugcagcccacugagagcaucgugcgguuccccaacauuaccaaccugugucccuucggcgagguguucaacgccacccgguucgccagcguguacgccuggaaccggaagcggaucagcaacugcguggccgacuacagcgugcuguacaacagcgccagcuucagcaccuucaagugcuacggcgugagcccuaccaagcugaacgaccugugcuucaccaacguguacgcugacagcuucgugauccggggcgacgaggugcggcagaucgcccccggccagaccggcaagaucgccgacuacaacuacaagcugcccgacgacuucaccggcugcgugaucgccuggaacagcaacaaccuggacagcaaggugggcggcaacuacaacuaccuguaccggcuguuccguaagagcaaccugaagccauucgagcgggacaucagcaccgagaucuaccaggccggcaacacccccugcaacgguguggagggcuuuaacugcuacuucccccugcagagcuacggcuuccagcccaccaacggcgugggcuaccagcccuaccgggugguggugcugagcuucgagcugcugcacgcccccgccaccgugugcggcccuaaaaagagcaccaaccuggugaagaacaagugcgugaauuucaacuucaacggccugaccggcaccggcgugcugaccgagagcaacaagaaguuccugcccuuccagcaguucggccgggauaucgccgacaccaccgacgcagugcgggacccccagacccuggagauccuggacaucaccccaugcagcuucggcggcgugagcgucaucacccccggcacaaacaccagcaaccagguggccgugcuguaccagggagugaacugcaccgaggugcccguggccauccacgccgaccagcugacccccaccuggcggguguacagcaccggcagcaacguguuccagacccgggccggcugccugaucggcgccgagcacgugaacaacagcuacgagugcgacauccccaucggcgcuggcaucugcgccuccuaccagacccagaccaacagcccccggcgggcccggagcguggccagccagagcaucaucgccuacaccaugagcuuaggcgccgagaacagcguggccuacagcaacaacagcaucgcgaucccuaccaacuucaccaucagcgugaccaccgagauacugcccgugagcaugaccaagaccagcguggacuguaccauguacaucugcggcgacagcaccgagugcagcaaccugcugcugcaguacggcagcuucugcacccagcugaaccgggcccugaccggcaucgccguggagcaggacaagaacacccaagagguguucgcccaggugaagcagaucuacaagacucccccaaucaaggacuucggcggcuucaacuucagccagauccugcccgaccccagcaagcccagcaagcggagcuucaucgaggaccugcuguucaacaaggugacccuggccgacgccggcuucaucaagcaguacggcgacugccugggggauaucgccgcucgggaccugaucugcgcccagaaguucaacggccugaccgugcugcccccucugcugaccgacgagaugaucgcccaguacaccagcgcccugcuugccggcaccaucaccagcggcuggaccuucggcgccggcgcagcccugcagauccccuucgccaugcagauggccuaccgguucaacggcaucggcgugacccagaacgugcuguacgagaaccagaagcugaucgccaaccaguucaacagcgccaucggcaagauccaggacagccugagcagcaccgccagcgcccugggcaagcugcaggacguggugaaccagaacgcucaggcccugaacacccuggugaagcagcugagcagcaauuucggcgccaucagcagcgugcugaacgacauccugucaaggcuggaucccccagaggccgaggugcagaucgaccggcugaucaccggccggcugcagagccugcagaccuacgugacccagcagcugauccgggccgccgagauccgggccagcgccaaccuggcagccaccaagaugagcgagugcgugcugggccagagcaagcggguggacuuuugcggcaagggcuaccaccugaugagcuucccccagagcgcuccccacggcgugguguuccuccacgugacauacguccccgcccaggagaagaacuucaccaccgcccccgccauuugccacgacggcaaggcccacuucccccgggagggaguguucgugagcaacggcacccacugguucgugacccagcggaacuucuacgagccucagaucaucaccaccgacaacaccuucgugagcggcaacugcgacguggugaucggcaucgugaacaacaccguguacgacccccugcagcccgagcuggacagcuucaaggaggagcuggacaaguacuucaagaaccacaccagcccagacguggaccugggcgacaucagcggcaucaacgccagcguggugaacauccagaaggagaucgaccggcugaacgagguggccaagaaccugaacgagagccugaucgaccugcaggagcugggcaaguacgagcaguacaucaaguggcccugguacaucuggcugggcuucaucgccggccugaucgccaucgugauggugaccaucaugcugugcugcaugaccagcugcuguagcugccugaagggcugcugcagcugcggcagcugcugcaaguucgacgaggacgacagcgagcccgugcugaagggcgugaagcugcacuacaccugaggacuaguuauaagacugacuagcccgaugggccucccaacgggcccuccuccccuccuugcaccgagauuaauagaucuaaaaaaaaaaaaaaaaaaaaaaaaaaaaaaaaaaaaaaaaaaaaaaaaaaaaaaaaaaaaaaaaaaaaaaaaaaaaaaaaaaaaaaaaaaaaaaaaaaaa

SEQ ID NO: 25776 - RNA, 4017 nt, Artificial Sequence
  SARS-CoV-2/Wuhan/WIV05/2019__EPI_ISL_402128 spike protein mRNA gc (1-1273)(K986P_V987P_N501Y_D614G)
aggagaaagcuuaccauguucguguuccuggugcugcugccccuggugagcagccagugcgugaaccugaccacccggacccagcugcccccugccuacaccaacagcuucacccggggcguguacuaccccgacaagguguuccggagcagcgugcugcacagcacccaggaccuguuccugcccuucuucagcaacgugaccugguuccacgccauccacgugagcggcaccaacggcaccaagcgguucgacaacccagugcugcccuucaacgacggcguguacuucgccagcaccgagaagucaaacaucauccggggcuggaucuucggcaccacccuggacagcaagacacagagccugcugaucgugaacaacgccaccaacguggugaucaaggugugcgaguuucaguucugcaacgaccccuuccugggcguguacuaccacaagaacaacaagagcuggauggagagcgaguuccgggucuacagcagcgcuaacaauugcaccuucgaguacgugagccagcccuuccugauggaccucgagggcaagcagggcaacuucaagaaccugcgggaguucguguucaagaacaucgauggcuacuucaagaucuacagcaagcacacccccaucaaccuggugcgggaccugccccagggauucagcgcccuggagccucugguggaccugcccaucggcaucaacaucaccagguuccagacccugcuggcccugcaccggagcuaccugacccccggcgacagcagcagcggcuggaccgccggcgccgccgcauacuacgugggcuaccugcagccacggaccuuccugcugaaguacaacgagaacggcaccaucaccgacgccguggacugcgcccuggacccccugagcgagaccaagugcacccuaaagagcuucaccguggagaagggcaucuaccagaccagcaacuuccgggugcagcccacugagagcaucgugcgguuccccaacauuaccaaccugugucccuucggcgagguguucaacgccacccgguucgccagcguguacgccuggaaccggaagcggaucagcaacugcguggccgacuacagcgugcuguacaacagcgccagcuucagcaccuucaagugcuacggcgugagcccuaccaagcugaacgaccugugcuucaccaacguguacgcugacagcuucgugauccggggcgacgaggugcggcagaucgcccccggccagaccggcaagaucgccgacuacaacuacaagcugcccgacgacuucaccggcugcgugaucgccuggaacagcaacaaccuggacagcaaggugggcggcaacuacaacuaccuguaccggcuguuccguaagagcaaccugaagccauucgagcgggacaucagcaccgagaucuaccaggccggcagcacccccugcaacgguguggagggcuuuaacugcuacuucccccugcagagcuacggcuuccagcccaccuacggcgugggcuaccagcccuaccgggugguggugcugagcuucgagcugcugcacgcccccgccaccgugugcggcccuaaaaagagcaccaaccuggugaagaacaagugcgugaacuucaacuucaauggccugaccggcaccggcgugcugaccgagagcaacaagaaguuccugcccuuccagcaguucggccgggauaucgccgacaccaccgacgcagugcgggacccccagacccuggagauccuggacaucaccccaugcagcuucggcggcgugagcgucaucacccccggcacaaacaccagcaaccagguggccgugcuguaccagggagugaacugcaccgaggugcccguggccauccacgccgaccagcugacccccaccuggcggguguacagcaccggcagcaacguguuccagacccgggccggcugccugaucggcgccgagcacgugaacaacuccuacgagugcgacauccccaucggcgcuggcaucugcgccagcuaccagacccagaccaacagcccccggcgggcccggagcguggccagccagagcaucaucgccuacaccaugagcuuaggcgccgagaacagcguggccuacagcaacaacagcaucgcgaucccuaccaacuucaccaucagcgugaccaccgagauacugcccgugagcaugaccaagaccagcguggacuguaccauguacaucugcggcgacagcaccgagugcagcaaccugcugcugcaguacggcagcuucugcacccagcugaaccgggcccugaccggcaucgccguggagcaggacaagaacacccaagagguguucgcccaggugaagcagaucuacaagacucccccaaucaaggacuucggcggcuucaacuucagccagauccugcccgaccccagcaagcccagcaagcggagcuucaucgaggaccugcuguucaacaaggugacccuggccgacgccggcuucaucaagcaguacggcgacugccugggggauaucgccgcucgggaccugaucugcgcccagaaguucaacggccugaccgugcugcccccucugcugaccgacgagaugaucgcccaguacaccagcgcccugcuugccggcaccaucaccagcggcuggaccuucggcgccggcgcagcccugcagauccccuucgccaugcagauggccuaccgguucaacggcaucggcgugacccagaacgugcuguacgagaaccagaagcugaucgccaaccaguucaacagcgccaucggcaagauccaggacagccugagcagcaccgccagcgcccugggcaagcugcaggacguggugaaccagaacgcucaggcccugaacacccuggugaagcagcugagcagcaacuucggcgccaucagcucagugcugaacgacauccugagcaggcuggaucccccagaggccgaggugcagaucgaccggcugaucaccggccggcugcagagccugcagaccuacgugacccagcagcugauccgggccgccgagauccgggccagcgccaaucuggcagccaccaagaugagcgagugcgugcugggccagagcaagcggguggacuuuugcggcaagggcuaccaccugaugagcuucccccagagcgcuccccacggcgugguguuccuccacgugacauacguccccgcccaggagaagaacuucaccaccgcccccgccauuugccacgacggcaaggcccacuucccccgggagggaguguucgugagcaacggcacccacugguucgugacccagcggaacuucuacgagccucagaucaucaccaccgacaacaccuucgugagcggcaacugcgacguggugaucggcaucgugaacaacaccguguacgacccccugcagcccgagcuggacagcuucaaggaggagcuggacaaguacuucaagaaccacaccagcccagacguggaccugggcgacaucagcggcaucaacgccagcguggugaacauccagaaggagaucgaccggcugaacgagguggccaagaaccugaacgagagccugaucgaccugcaggagcugggcaaguacgagcaguacaucaaguggcccugguacaucuggcugggcuucaucgccggccugaucgccaucgugauggugaccaucaugcugugcugcaugaccagcugcuguagcugccugaagggcugcugcagcugcggcagcugcugcaaguucgacgaggacgacagcgagcccgugcugaagggcgugaagcugcacuacaccugaggacuaguuauaagacugacuagcccgaugggccucccaacgggcccuccuccccuccuugcaccgagauuaauagaucuaaaaaaaaaaaaaaaaaaaaaaaaaaaaaaaaaaaaaaaaaaaaaaaaaaaaaaaaaaaaaaaaaaaaaaaaaaaaaaaaaaaaaaaaaaaaaaaaaaaa

SEQ ID NO: 25777 - RNA, 4011 nt, Artificial Sequence
  SARS-CoV-2/Wuhan/WIV05/2019__EPI_ISL_402128 spike protein mRNA gc (1-1273)(K986P_V987P_H69del_V70del_D614G)
aggagaaagcuuaccauguucguguuccuggugcugcugccccuggugagcagccagugcgugaaccugaccacccggacccagcugcccccugccuacaccaacagcuucacccggggcguguacuaccccgacaagguguuccggagcagcgugcugcacagcacccaggaccuguuccugcccuucuucagcaacgugaccugguuccacgccaucagcggcaccaacggcaccaagcgguucgacaacccagugcugcccuucaacgacggcguguacuucgccagcaccgagaagucaaacaucauccggggcuggaucuucggcaccacccuggacagcaagacacagagccugcugaucgugaacaacgccaccaacguggugaucaaggugugcgaguuucaguucugcaacgaccccuuccugggcguguacuaccacaagaacaacaagagcuggauggagagcgaguuccggguguacagcagcgcuaacaauugcaccuucgaguacgucagccagcccuuccugauggaccucgagggcaagcagggcaacuucaagaaccugcgggaguucguguucaagaacaucgauggcuacuucaagaucuacagcaagcacacccccaucaaccuggugcgggaccugccccagggauucagcgcccuggagccucugguggaccugcccaucggcaucaacaucaccagguuccagacccugcuggcccugcaccggagcuaccugacccccggcgacagcagcagcggcuggaccgccggcgccgccgcauacuacgugggcuaccugcagccacggaccuuccugcugaaguacaacgagaacggcaccaucaccgacgccguggacugcgcccuggacccccugagcgagaccaagugcacccuaaagagcuucaccguggagaagggcaucuaccagaccagcaacuuccgggugcagcccacugagagcaucgugcgguuccccaacauuaccaaccugugucccuucggcgagguguucaacgccacccgguucgccagcguguacgccuggaaccggaagcggaucagcaacugcguggccgacuacagcgugcuguacaacagcgccagcuucagcaccuucaagugcuacggcgugagcccuaccaagcugaacgaccugugcuucaccaacguguacgcugacagcuucgugauccggggcgacgaggugcggcagaucgcccccggccagaccggcaagaucgccgacuacaacuacaagcugcccgacgacuucaccggcugcgugaucgccuggaacagcaacaaccuggacagcaaggugggcggcaacuacaacuaccuguaccggcuguuccguaagagcaaccugaagccauucgagcgggacaucagcaccgagaucuaccaggccggcagcacccccugcaacgguguggagggcuuuaacugcuacuucccccugcagagcuacggcuuccagcccaccaacggcgugggcuaccagcccuaccgggugguggugcugagcuucgagcugcugcacgcccccgccaccgugugcggcccuaaaaagagcaccaaccuggugaagaacaagugcgugaacuucaauuucaacggccugaccggcaccggcgugcugaccgagagcaacaagaaguuccugcccuuccagcaguucggccgggauaucgccgacaccaccgacgcagugcgggacccccagacccuggagauccuggacaucaccccaugcagcuucggcggcgugagcgugaucacccccggcacaaacaccagcaaccaggucgccgugcuguaccagggagugaacugcaccgaggugcccguggccauccacgccgaccagcugacccccaccuggcggguguacagcaccggcagcaacguguuccagacccgggccggcugccugaucggcgccgagcacgugaacaacuccuacgagugcgacauccccaucggcgcuggcaucugcgccagcuaccagacccagaccaacagcccccggcgggcccggagcguggccagccagagcaucaucgccuacaccaugagcuuaggcgccgagaacagcguggccuacagcaacaacagcaucgcgaucccuaccaacuucaccaucagcgugaccaccgagauacugcccgugagcaugaccaagaccagcguggacuguaccauguacaucugcggcgacagcaccgagugcagcaaccugcugcugcaguacggcagcuucugcacccagcugaaccgggcccugaccggcaucgccguggagcaggacaagaacacccaagagguguucgcccaggugaagcagaucuacaagacucccccaaucaaggacuucggcggcuucaacuucagccagauccugcccgaccccagcaagcccagcaagcggagcuucaucgaggaccugcuguucaacaaggugacccuggccgacgccggcuucaucaagcaguacggcgacugccugggggauaucgccgcucgggaccugaucugcgcccagaaguucaacggccugaccgugcugcccccucugcugaccgacgagaugaucgcccaguacaccagcgcccugcuugccggcaccaucaccagcggcuggaccuucggcgccggcgcagcccugcagauccccuucgccaugcagauggccuaccgguucaacggcaucggcgugacccagaacgugcuguacgagaaccagaagcugaucgccaaccaguucaacagcgccaucggcaagauccaggacagccugagcagcaccgccagcgcccugggcaagcugcaggacguggugaaccagaacgcucaggcccugaacacccuggugaagcagcugagcagcaacuucggcgccaucagcucagugcugaaugacauccugagcaggcuggaucccccagaggccgaggugcagaucgaccggcugaucaccggccggcugcagagccugcagaccuacgugacccagcagcugauccgggccgccgagauccgggccagcgccaaccuggcagccaccaagaugagcgagugcgugcugggccagagcaagcggguggacuuuugcggcaagggcuaccaccugaugagcuucccccagagcgcuccccacggcgugguguuccuccacgugacauacgugcccgcccaggagaagaacuucaccaccgcccccgccauuugccacgacggcaaggcccacuucccccgggagggagucuucgugagcaacggcacccacugguucgugacccagcggaacuucuacgagccucagaucaucaccaccgacaacaccuucgugagcggcaacugcgacguggugaucggcaucgugaacaacaccguguacgacccccugcagcccgagcuggacagcuucaaggaggagcuggacaaguacuucaagaaccacaccagcccagacguggaccugggcgacaucagcggcaucaacgccagcguggugaacauccagaaggagaucgaccggcugaacgagguggccaagaaccugaacgagagccugaucgaccugcaggagcugggcaaguacgagcaguacaucaaguggcccugguacaucuggcugggcuucaucgccggccugaucgccaucgugauggugaccaucaugcugugcugcaugaccagcugcuguagcugccugaagggcugcugcagcugcggcagcugcugcaaguucgacgaggacgacagcgagcccgugcugaagggcgugaagcugcacuacaccugaggacuaguuauaagacugacuagcccgaugggccucccaacgggcccuccuccccuccuugcaccgagauuaauagaucuaaaaaaaaaaaaaaaaaaaaaaaaaaaaaaaaaaaaaaaaaaaaaaaaaaaaaaaaaaaaaaaaaaaaaaaaaaaaaaaaaaaaaaaaaaaaaaaaaaaa

SEQ ID NO: 25778 - RNA, 4017 nt, Artificial Sequence
  SARS-CoV-2/Wuhan/WIV05/2019__EPI_ISL_402128 spike protein mRNA gc (1-1273)(K986P_V987P_Y453F_D614G)
aggagaaagcuuaccauguucguguuccuggugcugcugccccuggugagcagccagugcgugaaccugaccacccggacccagcugcccccugccuacaccaacagcuucacccggggcguguacuaccccgacaagguguuccggagcagcgugcugcacagcacccaggaccuguuccugcccuucuucagcaacgugaccugguuccacgccauccacgugagcggcaccaacggcaccaagcgguucgacaacccagugcugcccuucaacgacggcguguacuucgccagcaccgagaagucaaacaucauccggggcuggaucuucggcaccacccuggacagcaagacacagagccugcugaucgugaacaacgccaccaacguggugaucaaggugugcgaguuucaguucugcaacgaccccuuccugggcguguacuaccacaagaacaacaagagcuggauggagagcgaguuccgggucuacagcagcgcuaacaauugcaccuucgaguacgugagccagcccuuccugauggaccucgagggcaagcagggcaacuucaagaaccugcgggaguucguguucaagaacaucgauggcuacuucaagaucuacagcaagcacacccccaucaaccuggugcgggaccugccccagggauucagcgcccuggagccucugguggaccugcccaucggcaucaacaucaccagguuccagacccugcuggcccugcaccggagcuaccugacccccggcgacagcagcagcggcuggaccgccggcgccgccgcauacuacgugggcuaccugcagccacggaccuuccugcugaaguacaacgagaacggcaccaucaccgacgccguggacugcgcccuggacccccugagcgagaccaagugcacccuaaagagcuucaccguggagaagggcaucuaccagaccagcaacuuccgggugcagcccacugagagcaucgugcgguuccccaacauuaccaaccugugucccuucggcgagguguucaacgccacccgguucgccagcguguacgccuggaaccggaagcggaucagcaacugcguggccgacuacagcgugcuguacaacagcgccagcuucagcaccuucaagugcuacggcgugagcccuaccaagcugaacgaccugugcuucaccaacguguacgcugacagcuucgugauccggggcgacgaggugcggcagaucgcccccggccagaccggcaagaucgccgacuacaacuacaagcugcccgacgacuucaccggcugcgugaucgccuggaacagcaacaaccuggacagcaaggugggcggcaacuacaacuaccuguuccggcuguuccguaagagcaaccugaagccauuugagcgggacaucagcaccgagaucuaccaggccggcagcacccccugcaacgguguggagggcuucaacugcuacuucccccugcagagcuacggcuuccagcccaccaacggcgugggcuaccagcccuaccgggugguggugcugagcuucgagcugcugcacgcccccgccaccgugugcggcccuaaaaagagcaccaaccuggugaagaacaagugcgugaacuucaauuucaacggccugaccggcaccggcgugcugaccgagagcaacaagaaguuccugcccuuccagcaguucggccgggauaucgccgacaccaccgacgcagugcgggacccccagacccuggagauccuggacaucaccccaugcagcuucggcggcgugagcgucaucacccccggcacaaacaccagcaaccagguggccgugcuguaccagggagugaacugcaccgaggugcccguggccauccacgccgaccagcugacccccaccuggcggguguacagcaccggcagcaacguguuccagacccgggccggcugccugaucggcgccgagcacgugaacaacuccuacgagugcgacauccccaucggcgcuggcaucugcgccagcuaccagacccagaccaacagcccccggcgggcccggagcguggccagccagagcaucaucgccuacaccaugagcuuaggcgccgagaacagcguggccuacagcaacaacagcaucgcgaucccuaccaacuucaccaucagcgugaccaccgagauacugcccgugagcaugaccaagaccagcguggacuguaccauguacaucugcggcgacagcaccgagugcagcaaccugcugcugcaguacggcagcuucugcacccagcugaaccgggcccugaccggcaucgccguggagcaggacaagaacacccaagagguguucgcccaggugaagcagaucuacaagacucccccaaucaaggacuucggcggcuucaacuucagccagauccugcccgaccccagcaagcccagcaagcggagcuucaucgaggaccugcuguucaacaaggugacccuggccgacgccggcuucaucaagcaguacggcgacugccugggggauaucgccgcucgggaccugaucugcgcccagaaguucaacggccugaccgugcugcccccucugcugaccgacgagaugaucgcccaguacaccagcgcccugcuugccggcaccaucaccagcggcuggaccuucggcgccggcgcagcccugcagauccccuucgccaugcagauggccuaccgguucaacggcaucggcgugacccagaacgugcuguacgagaaccagaagcugaucgccaaccaguucaacagcgccaucggcaagauccaggacagccugagcagcaccgccagcgcccugggcaagcugcaggacguggugaaccagaacgcucaggcccugaacacccuggugaagcagcugagcagcaacuuuggcgccaucagcucagugcugaaugacauccugagcaggcuggaucccccagaggccgaggugcagaucgaccggcugaucaccggccggcugcagagccugcagaccuacgugacccagcagcugauccgggccgccgagauccgggccagcgccaaccuggcagccaccaagaugagcgagugcgugcugggccagagcaagcggguggacuucugcggcaagggcuaccaccugaugagcuucccccagagcgcuccccacggcgugguguuccuccacgugacauacguccccgcccaggagaagaacuucaccaccgcccccgccauuugccacgacggcaaggcccacuucccccgggagggaguguucgugagcaacggcacccacugguucgugacccagcggaacuucuacgagccucagaucaucaccaccgacaacaccuucgugagcggcaacugcgacguggugaucggcaucgugaacaacaccguguacgacccccugcagcccgagcuggacagcuucaaggaggagcuggacaaguacuucaagaaccacaccagcccagacguggaccugggcgacaucagcggcaucaacgccagcguggugaacauccagaaggagaucgaccggcugaacgagguggccaagaaccugaacgagagccugaucgaccugcaggagcugggcaaguacgagcaguacaucaaguggcccugguacaucuggcugggcuucaucgccggccugaucgccaucgugauggugaccaucaugcugugcugcaugaccagcugcuguagcugccugaagggcugcugcagcugcggcagcugcugcaaguucgacgaggacgacagcgagcccgugcugaagggcgugaagcugcacuacaccugaggacuaguuauaagacugacuagcccgaugggccucccaacgggcccuccuccccuccuugcaccgagauuaauagaucuaaaaaaaaaaaaaaaaaaaaaaaaaaaaaaaaaaaaaaaaaaaaaaaaaaaaaaaaaaaaaaaaaaaaaaaaaaaaaaaaaaaaaaaaaaaaaaaaaaaa

SEQ ID NO: 25779 - RNA, 4017 nt, Artificial Sequence
  SARS-CoV-2/Wuhan/WIV05/2019__EPI_ISL_402128 spike protein mRNA gc (1-1273)(K986P_V987P_D614G_I692V)
aggagaaagcuuaccauguucguguuccuggugcugcugccccuggugagcagccagugcgugaaccugaccacccggacccagcugcccccugccuacaccaacagcuucacccggggcguguacuaccccgacaagguguuccggagcagcgugcugcacagcacccaggaccuguuccugcccuucuucagcaacgugaccugguuccacgccauccacgugagcggcaccaacggcaccaagcgguucgacaacccagugcugcccuucaacgacggcguguacuucgccagcaccgagaagucaaacaucauccggggcuggaucuucggcaccacccuggacagcaagacacagagccugcugaucgugaacaacgccaccaacguggugaucaaggugugcgaguuucaguucugcaacgaccccuuccugggcguguacuaccacaagaacaacaagagcuggauggagagcgaguuccgggucuacagcagcgcuaacaauugcaccuucgaguacgugagccagcccuuccugauggaccucgagggcaagcagggcaacuucaagaaccugcgggaguucguguucaagaacaucgauggcuacuucaagaucuacagcaagcacacccccaucaaccuggugcgggaccugccccagggauucagcgcccuggagccucugguggaccugcccaucggcaucaacaucaccagguuccagacccugcuggcccugcaccggagcuaccugacccccggcgacagcagcagcggcuggaccgccggcgccgccgcauacuacgugggcuaccugcagccacggaccuuccugcugaaguacaacgagaacggcaccaucaccgacgccguggacugcgcccuggacccccugagcgagaccaagugcacccuaaagagcuucaccguggagaagggcaucuaccagaccagcaacuuccgggugcagcccacugagagcaucgugcgguuccccaacauuaccaaccugugucccuucggcgagguguucaacgccacccgguucgccagcguguacgccuggaaccggaagcggaucagcaacugcguggccgacuacagcgugcuguacaacagcgccagcuucagcaccuucaagugcuacggcgugagcccuaccaagcugaacgaccugugcuucaccaacguguacgcugacagcuucgugauccggggcgacgaggugcggcagaucgcccccggccagaccggcaagaucgccgacuacaacuacaagcugcccgacgacuucaccggcugcgugaucgccuggaacagcaacaaccuggacagcaaggugggcggcaacuacaacuaccuguaccggcuguuccguaagagcaaccugaagccauucgagcgggacaucagcaccgagaucuaccaggccggcagcacccccugcaacgguguggagggcuuuaacugcuacuucccccugcagagcuacggcuuccagcccaccaacggcgugggcuaccagcccuaccgggugguggugcugagcuucgagcugcugcacgcccccgccaccgugugcggcccuaaaaagagcaccaaccuggugaagaacaagugcgugaacuucaauuucaacggccugaccggcaccggcgugcugaccgagagcaacaagaaguuccugcccuuccagcaguucggccgggauaucgccgacaccaccgacgcagugcgggacccccagacccuggagauccuggacaucaccccaugcagcuucggcggcgugagcgucaucacccccggcacaaacaccagcaaccagguggccgugcuguaccagggagugaacugcaccgaggugcccguggccauccacgccgaccagcugacccccaccuggcggguguacagcaccggcagcaacguguuccagacccgggccggcugccugaucggcgccgagcacgugaacaacuccuacgagugcgacauccccaucggcgcuggcaucugcgccagcuaccagacccagaccaacagcccccggcgggcccggagcguggccagccagagcgugaucgccuacaccaugagcuuaggcgccgagaacagcguggccuacagcaacaacagcaucgcgaucccuaccaacuucaccaucagcgugaccaccgagauccugcccgugagcaugaccaagaccagcguggacuguaccauguacauaugcggcgacagcaccgagugcagcaaccugcugcugcaguacggcagcuucugcacccagcugaaccgggcccugaccggcaucgccguggagcaggacaagaacacccaagagguguucgcccaggugaagcagaucuacaagacucccccaaucaaggacuucggcggcuucaacuucagccagauccugcccgaccccagcaagcccagcaagcggagcuucaucgaggaccugcuguucaacaaggugacccuggccgacgccggcuucaucaagcaguacggcgacugccugggggauaucgccgcucgggaccugaucugcgcccagaaguucaacggccugaccgugcugcccccucugcugaccgacgagaugaucgcccaguacaccagcgcccugcuugccggcaccaucaccagcggcuggaccuucggcgccggcgcagcccugcagauccccuucgccaugcagauggccuaccgguucaacggcaucggcgugacccagaacgugcuguacgagaaccagaagcugaucgccaaccaguucaacagcgccaucggcaagauccaggacagccugagcagcaccgccagcgcccugggcaagcugcaggacguggugaaccagaacgcucaggcccugaacacccuggugaagcagcugagcagcaacuucggcgccaucagcucagugcugaaugacauccugagcaggcuggaucccccagaggccgaggugcagaucgaccggcugaucaccggccggcugcagagccugcagaccuacgugacccagcagcugauccgggccgccgagauccgggccagcgccaaccuggcagccaccaagaugagcgagugcgugcugggccagagcaagcggguggacuuuugcggcaagggcuaccaccugaugagcuucccccagagcgcuccccacggcgugguguuccuccacgucacauacgugcccgcccaggagaagaacuucaccaccgcccccgccaucugccacgacggcaaggcccacuucccccgggagggaguguucgugagcaacggcacccacugguucgugacccagcggaacuucuacgagccucagauuaucaccaccgacaacaccuucgugagcggcaacugcgacguggugaucggcaucgugaacaacaccguguacgacccccugcagcccgagcuggacagcuucaaggaggagcuggacaaguacuucaagaaccacaccagcccagacguggaccugggcgacaucagcggcaucaacgccagcguggugaacauccagaaggagaucgaccggcugaacgagguggccaagaaccugaacgagagccugaucgaccugcaggagcugggcaaguacgagcaguacaucaaguggcccugguacaucuggcugggcuucaucgccggccugaucgccaucgugauggugaccaucaugcugugcugcaugaccagcugcuguagcugccugaagggcugcugcagcugcggcagcugcugcaaguucgacgaggacgacagcgagcccgugcugaagggcgugaagcugcacuacaccugaggacuaguuauaagacugacuagcccgaugggccucccaacgggcccuccuccccuccuugcaccgagauuaauagaucuaaaaaaaaaaaaaaaaaaaaaaaaaaaaaaaaaaaaaaaaaaaaaaaaaaaaaaaaaaaaaaaaaaaaaaaaaaaaaaaaaaaaaaaaaaaaaaaaaaaa

SEQ ID NO: 25780 - RNA, 4017 nt, Artificial Sequence
  SARS-CoV-2/Wuhan/WIV05/2019__EPI_ISL_402128 spike protein mRNA gc (1-1273)(K986P_V987P_D614G_M1229I)
aggagaaagcuuaccauguucguguuccuggugcugcugccccuggugagcagccagugcgugaaccugaccacccggacccagcugcccccugccuacaccaacagcuucacccggggcguguacuaccccgacaagguguuccggagcagcgugcugcacagcacccaggaccuguuccugcccuucuucagcaacgugaccugguuccacgccauccacgugagcggcaccaacggcaccaagcgguucgacaacccagugcugcccuucaacgacggcguguacuucgccagcaccgagaagucaaacaucauccggggcuggaucuucggcaccacccuggacagcaagacacagagccugcugaucgugaacaacgccaccaacguggugaucaaggugugcgaguuucaguucugcaacgaccccuuccugggcguguacuaccacaagaacaacaagagcuggauggagagcgaguuccgggucuacagcagcgcuaacaauugcaccuucgaguacgugagccagcccuuccugauggaccucgagggcaagcagggcaacuucaagaaccugcgggaguucguguucaagaacaucgauggcuacuucaagaucuacagcaagcacacccccaucaaccuggugcgggaccugccccagggauucagcgcccuggagccucugguggaccugcccaucggcaucaacaucaccagguuccagacccugcuggcccugcaccggagcuaccugacccccggcgacagcagcagcggcuggaccgccggcgccgccgcauacuacgugggcuaccugcagccacggaccuuccugcugaaguacaacgagaacggcaccaucaccgacgccguggacugcgcccuggacccccugagcgagaccaagugcacccuaaagagcuucaccguggagaagggcaucuaccagaccagcaacuuccgggugcagcccacugagagcaucgugcgguuccccaacauuaccaaccugugucccuucggcgagguguucaacgccacccgguucgccagcguguacgccuggaaccggaagcggaucagcaacugcguggccgacuacagcgugcuguacaacagcgccagcuucagcaccuucaagugcuacggcgugagcccuaccaagcugaacgaccugugcuucaccaacguguacgcugacagcuucgugauccggggcgacgaggugcggcagaucgcccccggccagaccggcaagaucgccgacuacaacuacaagcugcccgacgacuucaccggcugcgugaucgccuggaacagcaacaaccuggacagcaaggugggcggcaacuacaacuaccuguaccggcuguuccguaagagcaaccugaagccauucgagcgggacaucagcaccgagaucuaccaggccggcagcacccccugcaacgguguggagggcuuuaacugcuacuucccccugcagagcuacggcuuccagcccaccaacggcgugggcuaccagcccuaccgggugguggugcugagcuucgagcugcugcacgcccccgccaccgugugcggcccuaaaaagagcaccaaccuggugaagaacaagugcgugaacuucaauuucaacggccugaccggcaccggcgugcugaccgagagcaacaagaaguuccugcccuuccagcaguucggccgggauaucgccgacaccaccgacgcagugcgggacccccagacccuggagauccuggacaucaccccaugcagcuucggcggcgugagcgucaucacccccggcacaaacaccagcaaccagguggccgugcuguaccagggagugaacugcaccgaggugcccguggccauccacgccgaccagcugacccccaccuggcggguguacagcaccggcagcaacguguuccagacccgggccggcugccugaucggcgccgagcacgugaacaacuccuacgagugcgacauccccaucggcgcuggcaucugcgccagcuaccagacccagaccaacagcccccggcgggcccggagcguggccagccagagcaucaucgccuacaccaugagcuuaggcgccgagaacagcguggccuacagcaacaacagcaucgcgaucccuaccaacuucaccaucagcgugaccaccgagauacugcccgugagcaugaccaagaccagcguggacuguaccauguacaucugcggcgacagcaccgagugcagcaaccugcugcugcaguacggcagcuucugcacccagcugaaccgggcccugaccggcaucgccguggagcaggacaagaacacccaagagguguucgcccaggugaagcagaucuacaagacucccccaaucaaggacuucggcggcuucaacuucagccagauccugcccgaccccagcaagcccagcaagcggagcuucaucgaggaccugcuguucaacaaggugacccuggccgacgccggcuucaucaagcaguacggcgacugccugggggauaucgccgcucgggaccugaucugcgcccagaaguucaacggccugaccgugcugcccccucugcugaccgacgagaugaucgcccaguacaccagcgcccugcuugccggcaccaucaccagcggcuggaccuucggcgccggcgcagcccugcagauccccuucgccaugcagauggccuaccgguucaacggcaucggcgugacccagaacgugcuguacgagaaccagaagcugaucgccaaccaguucaacagcgccaucggcaagauccaggacagccugagcagcaccgccagcgcccugggcaagcugcaggacguggugaaccagaacgcucaggcccugaacacccuggugaagcagcugagcagcaacuucggcgccaucagcucagugcugaaugacauccugagcaggcuggaucccccagaggccgaggugcagaucgaccggcugaucaccggccggcugcagagccugcagaccuacgugacccagcagcugauccgggccgccgagauccgggccagcgccaaccuggcagccaccaagaugagcgagugcgugcugggccagagcaagcggguggacuuuugcggcaagggcuaccaccugaugagcuucccccagagcgcuccccacggcgugguguuccuccacgugacauacguccccgcccaggagaagaacuucaccaccgcccccgccauuugccacgacggcaaggcccacuucccccgggagggaguguucgugagcaacggcacccacugguucgugacccagcggaacuucuacgagccucagaucaucaccaccgacaacaccuucgugagcggcaacugcgacguggugaucggcaucgugaacaacaccguguacgacccccugcagcccgagcuggacagcuucaaggaggagcuggacaaguacuucaagaaccacaccagcccagacguggaccugggcgacaucagcggcaucaacgccagcguggugaacauccagaaggagaucgaccggcugaacgagguggccaagaaccugaacgagagccugaucgaccugcaggagcugggcaaguacgagcaguacaucaaguggcccugguacaucuggcugggcuucaucgccggccugaucgccaucgugaucgugaccaucaugcugugcugcaugaccagcugcuguagcugccugaagggcugcugcagcugcggcagcugcugcaaguucgacgaggacgacagcgagcccgugcugaagggcgugaagcugcacuacaccugaggacuaguuauaagacugacuagcccgaugggccucccaacgggcccuccuccccuccuugcaccgagauuaauagaucuaaaaaaaaaaaaaaaaaaaaaaaaaaaaaaaaaaaaaaaaaaaaaaaaaaaaaaaaaaaaaaaaaaaaaaaaaaaaaaaaaaaaaaaaaaaaaaaaaaaa

SEQ ID NO: 25781 - RNA, 4011 nt, Artificial Sequence
  SARS-CoV-2/Wuhan/WIV05/2019__EPI_ISL_402128 spike protein mRNA gc (1-1273)(K986P_V987P_H69del_V70del_A222V_Y453F_S477N_D614G_I692V)
aggagaaagcuuaccauguucguguuccuggugcugcugccccuggugagcagccagugcgugaaccugaccacccggacccagcugcccccugccuacaccaacagcuucacccggggcguguacuaccccgacaagguguuccggagcagcgugcugcacagcacccaggaccuguuccugcccuucuucagcaacgugaccugguuccacgccaucagcggcaccaacggcaccaagcgguucgacaacccagugcugcccuucaacgacggcguguacuucgccagcaccgagaagucaaacaucauccggggcuggaucuucggcaccacccuggacagcaagacacagagccugcugaucgugaacaacgccaccaacguggugaucaaggugugcgaguuucaguucugcaacgaccccuuccugggcguguacuaccacaagaacaacaagagcuggauggagagcgaguuccggguguacagcagcgcuaacaauugcaccuucgaguacgucagccagcccuuccugauggaccucgagggcaagcagggcaacuucaagaaccugcgggaguucguguucaagaacaucgauggcuacuucaagaucuacagcaagcacacccccaucaaccuggugcgggaccugccccagggauucagcgugcuggagccucugguggaccugcccaucggcaucaacaucaccagguuccagacccugcuggcccugcaccggagcuaccugacccccggcgacagcagcagcggcuggaccgccggcgccgccgccuacuacgugggcuaccugcagccacggaccuuccugcugaaguacaacgagaacggcaccaucaccgacgcaguggacugcgcccuggacccccugagcgagaccaagugcacccuaaagagcuucaccguggagaagggcaucuaccagaccagcaacuuccgggugcagcccacugagagcaucgugcgguuccccaacauuaccaaccugugucccuucggcgagguguucaacgccacccgguucgccagcguguacgccuggaaccggaagcggaucagcaacugcguggccgacuacagcgugcuguacaacagcgccagcuucagcaccuucaagugcuacggcgugagcccuaccaagcugaacgaccugugcuucaccaacguguacgccgacagcuucgugauccggggcgacgaggugcggcagaucgcucccggccagaccggcaagaucgccgacuacaacuacaagcugcccgacgacuucaccggcugcgugaucgccuggaacagcaacaaccuggacagcaaggugggcggcaacuacaacuaccuguuccggcuguuccguaagagcaaccugaagccauuugagcgggacaucagcaccgagaucuaccaggccggcaacacccccugcaacgguguggagggcuucaacugcuacuucccccugcagagcuacggcuuccagcccaccaacggcgugggcuaccagcccuaccgggugguggugcugagcuucgagcugcugcacgcccccgccaccgugugcggcccuaaaaagagcaccaaccuggugaagaacaagugcgugaauuucaacuucaacggccugaccggcaccggcgugcugaccgagagcaacaagaaguuccugcccuuccagcaguucggccgggauaucgccgacaccaccgacgccgugcgggacccccagacccuggagauccuggacaucaccccaugcagcuucggcggcgugagcgucaucacccccggcacaaacaccagcaaccagguggcagugcuguaccagggagugaacugcaccgaggugcccguggccauccacgccgaccagcugacccccaccuggcggguguacagcaccggcagcaacguguuccagacccgggccggcugccugaucggcgccgagcacgugaacaacagcuacgagugcgacauccccaucggcgccggcaucugcgcuuccuaccagacccagaccaacagcccccggcgggcccggagcguggccagccagagcgugaucgccuacaccaugagcuuaggcgccgagaacagcguggccuacagcaacaacagcaucgccaucccuaccaacuucaccaucagcgugaccaccgagauccugcccgugagcaugaccaagaccagcguggacuguaccauguacauaugcggcgacagcaccgagugcagcaaccugcugcugcaguacggcagcuucugcacccagcugaaccgggcgcugaccggcaucgccguggagcaggacaagaacacccaagagguguucgcccaggugaagcagaucuacaagacucccccaaucaaggacuucggcggcuucaacuucagccagauccugcccgaccccagcaagcccagcaagcggagcuucaucgaggaccugcuguucaacaaggugacccuggccgacgccggcuucaucaagcaguacggcgacugccugggggauaucgccgcccgggaccugaucugcgcucagaaguucaacggccugaccgugcugcccccucugcugaccgacgagaugaucgcccaguacaccagcgcccugcuugccggcaccaucaccagcggcuggaccuucggcgccggcgccgcacugcagauccccuucgccaugcagauggccuaccgguucaacggcaucggcgugacccagaacgugcuguacgagaaccagaagcugaucgccaaccaguucaacagcgccaucggcaagauccaggacagccugagcagcaccgccagcgcccugggcaagcugcaggacguggugaaccagaacgcccaggcucugaacacccuggugaagcagcugagcagcaauuuuggcgccaucagcagcgugcugaacgacauccugucaaggcuggaucccccagaggccgaggugcagaucgaccggcugaucaccggccggcugcagagccugcagaccuacgugacccagcagcugauccgggccgccgagauccgggccagcgccaaccuggccgcaaccaagaugagcgagugcgugcugggccagagcaagcggguggacuucugcggcaagggcuaccaccugaugagcuucccccagagcgcuccccacggcgugguguuccuccacgucacauacgugcccgcccaggagaagaacuucaccaccgcccccgccaucugccacgacggcaaggcccacuucccccgggagggaguguucgugagcaacggcacccacugguucgugacccagcggaacuucuacgagccucagauuaucaccaccgacaacaccuucgugagcggcaacugcgacguggugaucggcaucgugaacaacaccguguacgacccccugcagcccgagcuggacagcuucaaggaggagcuggacaaguacuucaagaaccacaccagcccagacguggaccugggcgacaucagcggcaucaacgccagcguggugaacauccagaaggagaucgaccggcugaacgagguggccaagaaccugaacgagagccugaucgaccugcaggagcugggcaaguacgagcaguacaucaaguggcccugguacaucuggcugggcuucaucgccggccugaucgccaucgugauggugaccaucaugcugugcugcaugaccagcugcuguagcugccugaagggcugcugcagcugcggcagcugcugcaaguucgacgaggacgacagcgagcccgugcugaagggcgugaagcugcacuacaccugaggacuaguuauaagacugacuagcccgaugggccucccaacgggcccuccuccccuccuugcaccgagauuaauagaucuaaaaaaaaaaaaaaaaaaaaaaaaaaaaaaaaaaaaaaaaaaaaaaaaaaaaaaaaaaaaaaaaaaaaaaaaaaaaaaaaaaaaaaaaaaaaaaaaaaaa

SEQ ID NO: 25782 - RNA, 4011 nt, Artificial Sequence
  SARS-CoV-2/Wuhan/WIV05/2019__EPI_ISL_402128 spike protein mRNA gc (1-1273)(K986P_V987P_H69del_V70del_Y453F_D614G_I692V_M1229I)
aggagaaagcuuaccauguucguguuccuggugcugcugccccuggugagcagccagugcgugaaccugaccacccggacccagcugcccccugccuacaccaacagcuucacccggggcguguacuaccccgacaagguguuccggagcagcgugcugcacagcacccaggaccuguuccugcccuucuucagcaacgugaccugguuccacgccaucagcggcaccaacggcaccaagcgguucgacaacccagugcugcccuucaacgacggcguguacuucgccagcaccgagaagucaaacaucauccggggcuggaucuucggcaccacccuggacagcaagacacagagccugcugaucgugaacaacgccaccaacguggugaucaaggugugcgaguuucaguucugcaacgaccccuuccugggcguguacuaccacaagaacaacaagagcuggauggagagcgaguuccggguguacagcagcgcuaacaauugcaccuucgaguacgucagccagcccuuccugauggaccucgagggcaagcagggcaacuucaagaaccugcgggaguucguguucaagaacaucgauggcuacuucaagaucuacagcaagcacacccccaucaaccuggugcgggaccugccccagggauucagcgcccuggagccucugguggaccugcccaucggcaucaacaucaccagguuccagacccugcuggcccugcaccggagcuaccugacccccggcgacagcagcagcggcuggaccgccggcgccgccgcauacuacgugggcuaccugcagccacggaccuuccugcugaaguacaacgagaacggcaccaucaccgacgccguggacugcgcccuggacccccugagcgagaccaagugcacccuaaagagcuucaccguggagaagggcaucuaccagaccagcaacuuccgggugcagcccacugagagcaucgugcgguuccccaacauuaccaaccugugucccuucggcgagguguucaacgccacccgguucgccagcguguacgccuggaaccggaagcggaucagcaacugcguggccgacuacagcgugcuguacaacagcgccagcuucagcaccuucaagugcuacggcgugagcccuaccaagcugaacgaccugugcuucaccaacguguacgcugacagcuucgugauccggggcgacgaggugcggcagaucgcccccggccagaccggcaagaucgccgacuacaacuacaagcugcccgacgacuucaccggcugcgugaucgccuggaacagcaacaaccuggacagcaaggugggcggcaacuacaacuaccuguuccggcuguuccguaagagcaaccugaagccauuugagcgggacaucagcaccgagaucuaccaggccggcagcacccccugcaacgguguggagggcuucaacugcuacuucccccugcagagcuacggcuuccagcccaccaacggcgugggcuaccagcccuaccgggugguggugcugagcuucgagcugcugcacgcccccgccaccgugugcggcccuaaaaagagcaccaaccuggugaagaacaagugcgugaacuucaauuucaacggccugaccggcaccggcgugcugaccgagagcaacaagaaguuccugcccuuccagcaguucggccgggauaucgccgacaccaccgacgcagugcgggacccccagacccuggagauccuggacaucaccccaugcagcuucggcggcgugagcgugaucacccccggcacaaacaccagcaaccaggucgccgugcuguaccagggagugaacugcaccgaggugcccguggccauccacgccgaccagcugacccccaccuggcggguguacagcaccggcagcaacguguuccagacccgggccggcugccugaucggcgccgagcacgugaacaacuccuacgagugcgacauccccaucggcgcuggcaucugcgccagcuaccagacccagaccaacagcccccggcgggcccggagcguggccagccagagcgugaucgccuacaccaugagcuuaggcgccgagaacagcguggccuacagcaacaacagcaucgcgaucccuaccaacuucaccaucagcgugaccaccgagauccugcccgugagcaugaccaagaccagcguggacuguaccauguacauaugcggcgacagcaccgagugcagcaaccugcugcugcaguacggcagcuucugcacccagcugaaccgggcccugaccggcaucgccguggagcaggacaagaacacccaagagguguucgcccaggugaagcagaucuacaagacucccccaaucaaggacuucggcggcuucaacuucagccagauccugcccgaccccagcaagcccagcaagcggagcuucaucgaggaccugcuguucaacaaggugacccuggccgacgccggcuucaucaagcaguacggcgacugccugggggauaucgccgcucgggaccugaucugcgcccagaaguucaacggccugaccgugcugcccccucugcugaccgacgagaugaucgcccaguacaccagcgcccugcuugccggcaccaucaccagcggcuggaccuucggcgccggcgcagcccugcagauccccuucgccaugcagauggccuaccgguucaacggcaucggcgugacccagaacgugcuguacgagaaccagaagcugaucgccaaccaguucaacagcgccaucggcaagauccaggacagccugagcagcaccgccagcgcccugggcaagcugcaggacguggugaaccagaacgcucaggcccugaacacccuggugaagcagcugagcagcaacuuuggcgccaucagcucagugcugaaugacauccugagcaggcuggaucccccagaggccgaggugcagaucgaccggcugaucaccggccggcugcagagccugcagaccuacgugacccagcagcugauccgggccgccgagauccgggccagcgccaaccuggcagccaccaagaugagcgagugcgugcugggccagagcaagcggguggacuucugcggcaagggcuaccaccugaugagcuucccccagagcgcuccccacggcgugguguuccuccacgugacauacguccccgcccaggagaagaacuucaccaccgcccccgccaucugccacgacggcaaggcccacuucccccgggagggaguguucgugagcaacggcacccacugguucgugacccagcggaacuucuacgagccucagauuaucaccaccgacaacaccuucgugagcggcaacugcgacguggugaucggcaucgugaacaacaccguguacgacccccugcagcccgagcuggacagcuucaaggaggagcuggacaaguacuucaagaaccacaccagcccagacguggaccugggcgacaucagcggcaucaacgccagcguggugaacauccagaaggagaucgaccggcugaacgagguggccaagaaccugaacgagagccugaucgaccugcaggagcugggcaaguacgagcaguacaucaaguggcccugguacaucuggcugggcuucaucgccggccugaucgccaucgugaucgugaccaucaugcugugcugcaugaccagcugcuguagcugccugaagggcugcugcagcugcggcagcugcugcaaguucgacgaggacgacagcgagcccgugcugaagggcgugaagcugcacuacaccugaggacuaguuauaagacugacuagcccgaugggccucccaacgggcccuccuccccuccuugcaccgagauuaauagaucuaaaaaaaaaaaaaaaaaaaaaaaaaaaaaaaaaaaaaaaaaaaaaaaaaaaaaaaaaaaaaaaaaaaaaaaaaaaaaaaaaaaaaaaaaaaaaaaaaaaa

SEQ ID NO: 25783 - RNA, 4008 nt, Artificial Sequence
  SARS-CoV-2/Wuhan/WIV05/2019__EPI_ISL_402128 spike protein mRNA gc (1-1273)(K986P_V987P_K986P_V987P_H69del_V70del_Y144del_N501Y_A570 D_D614G_P681H_T716I_S982A_D1118H)
aggagaaagcuuaccauguucguguuccuggugcugcugccccuggugagcagccagugcgugaaccugaccacccggacccagcugcccccugccuacaccaacagcuucacccggggcguguacuaccccgacaagguguuccggagcagcgugcugcacagcacccaggaccuguuccugcccuucuucagcaacgugaccugguuccacgccaucagcggcaccaacggcaccaagcgguucgacaacccagugcugcccuucaacgacggcguguacuucgccagcaccgagaagucaaacaucauccggggcuggaucuucggcaccacccuggacagcaagacacagagccugcugaucgugaacaacgccaccaacguggugaucaaggugugcgaguuucaguucugcaacgaccccuuccugggcguguaccacaagaacaacaagagcuggauggagagcgaguuccggguguacagcagcgcuaacaauugcaccuucgaguacgucagccagcccuuccugauggaccucgagggcaagcagggcaacuucaagaaccugcgggaguucguguucaagaacaucgauggcuacuucaagaucuacagcaagcacacccccaucaaccuggugcgggaccugccccagggauucagcgcccuggagccucugguggaccugcccaucggcaucaacaucaccagguuccagacccugcuggcccugcaccggagcuaccugacccccggcgacagcagcagcggcuggaccgccggcgccgccgcauacuacgugggcuaccugcagccacggaccuuccugcugaaguacaacgagaacggcaccaucaccgacgccguggacugcgcccuggacccccugagcgagaccaagugcacccuaaagagcuucaccguggagaagggcaucuaccagaccagcaacuuccgggugcagcccacugagagcaucgugcgguuccccaacauuaccaaccugugucccuucggcgagguguucaacgccacccgguucgccagcguguacgccuggaaccggaagcggaucagcaacugcguggccgacuacagcgugcuguacaacagcgccagcuucagcaccuucaagugcuacggcgugagcccuaccaagcugaacgaccugugcuucaccaacguguacgcugacagcuucgugauccggggcgacgaggugcggcagaucgcccccggccagaccggcaagaucgccgacuacaacuacaagcugcccgacgacuucaccggcugcgugaucgccuggaacagcaacaaccuggacagcaaggugggcggcaacuacaacuaccuguaccggcuguuccguaagagcaaccugaagccauucgagcgggacaucagcaccgagaucuaccaggccggcagcacccccugcaacgguguggagggcuuuaacugcuacuucccccugcagagcuacggcuuccagcccaccuacggcgugggcuaccagcccuaccgggugguggugcugagcuucgagcugcugcacgcccccgccaccgugugcggcccuaaaaagagcaccaaccuggugaagaacaagugcgugaacuucaacuucaauggccugaccggcaccggcgugcugaccgagagcaacaagaaguuccugcccuuccagcaguucggccgggauaucgacgacaccaccgacgccgugcgggacccccagacccuggagauccuggacaucaccccaugcagcuucggcggcgugagcgugaucacccccggcacaaacaccagcaaccaggucgcagugcuguaccagggagugaacugcaccgaggugcccguggccauccacgccgaccagcugacccccaccuggcggguguacagcaccggcagcaacguguuccagacccgggccggcugccugaucggcgccgagcacgugaacaacuccuacgagugcgacauccccaucggcgccggcaucugcgcuagcuaccagacccagaccaacagccaccggcgggcccggagcguggccagccagagcaucaucgccuacaccaugagcuuaggcgccgagaacagcguggccuacagcaacaacagcaucgccauccccaucaacuucaccauaagcgugaccaccgagauccugccugugagcaugaccaagaccagcguggacuguaccauguacaucugcggcgacagcaccgagugcagcaaccugcugcugcaguacggcagcuucugcacccagcugaaccgggcgcugaccggcaucgccguggagcaggacaagaacacccaagagguguucgcccaggugaagcagaucuacaagaccccacccaucaaggacuucggcggcuucaacuucagccagauccugcccgaccccagcaagcccagcaagcggagcuucaucgaggaccugcuguucaacaaggugacucuggccgacgccggcuucaucaagcaguacggcgauugccugggggacaucgccgcccgggaccugaucugcgcucagaaguucaacggccugaccgugcugccuccccugcugaccgacgagaugaucgcccaguacaccagcgcccugcuugccggcaccaucaccagcggcuggaccuucggcgccggcgccgcacugcagauccccuucgccaugcagauggccuaccgguucaacggcaucggcgugacccagaacgugcuguacgagaaccagaagcugaucgccaaccaguucaacagcgccaucggcaagauccaggacagccugagcagcaccgccagcgcccugggcaagcugcaggacguggugaaccagaacgcccaggcucugaacacccuggugaagcagcugagcagcaacuucggcgccaucagcucagugcugaacgacauccuggccaggcuggacccacccgaggccgaggugcagaucgaccggcugaucaccggccggcugcagagccugcagaccuacgugacccagcagcugauccgggccgccgagauucgggccagcgccaaucuggcagccaccaagaugagcgagugcgugcugggccagagcaagcggguggacuuuugcggcaagggcuaccaccugaugagcuucccccagagcgcuccccacggcgugguguuccuccacgugaccuacgugcccgcccaggagaagaacuucacaaccgcccccgccaucugccacgacggcaaggcccacuucccccgggagggagucuucgugagcaacggcacccacugguucgugacccagcggaacuucuacgagccccagaucaucaccacccacaacaccuucgugagcggcaacugcgacguggugaucggcaucgugaacaacaccguguacgacccucugcagcccgagcuggacagcuucaaggaggagcuggacaaguacuucaagaaccacaccagccccgacguggaucugggcgacaucagcggcaucaacgccagcguggugaacauccagaaggagaucgaccggcugaacgagguggccaagaaccugaacgagagccugaucgaccugcaggagcugggcaaguacgagcaguacaucaaguggccaugguacaucuggcugggcuucaucgccggccugaucgccaucgugauggugaccaucaugcugugcugcaugaccagcugcuguagcugccugaagggcugcugcagcugcggcagcugcugcaaguucgacgaggacgacagcgagcccgugcugaagggcgugaagcugcacuacaccugaggacuaguuauaagacugacuagcccgaugggccucccaacgggcccuccuccccuccuugcaccgagauuaauagaucuaaaaaaaaaaaaaaaaaaaaaaaaaaaaaaaaaaaaaaaaaaaaaaaaaaaaaaaaaaaaaaaaaaaaaaaaaaaaaaaaaaaaaaaaaaaaaaaaaaaa

SEQ ID NO: 25784 - RNA, 4017 nt, Artificial Sequence
  SARS-CoV-2/Wuhan/WIV05/2019__EPI_ISL_402128 spike protein mRNA gc (1-1273)(K986P_V987P_K986P_V987P_K417N_E484K_N501Y_D614G)
aggagaaagcuuaccauguucguguuccuggugcugcugccccuggugagcagccagugcgugaaccugaccacccggacccagcugcccccugccuacaccaacagcuucacccggggcguguacuaccccgacaagguguuccggagcagcgugcugcacagcacccaggaccuguuccugcccuucuucagcaacgugaccugguuccacgccauccacgugagcggcaccaacggcaccaagcgguucgacaacccagugcugcccuucaacgacggcguguacuucgccagcaccgagaagucaaacaucauccggggcuggaucuucggcaccacccuggacagcaagacacagagccugcugaucgugaacaacgccaccaacguggugaucaaggugugcgaguuucaguucugcaacgaccccuuccugggcguguacuaccacaagaacaacaagagcuggauggagagcgaguuccgggucuacagcagcgcuaacaauugcaccuucgaguacgugagccagcccuuccugauggaccucgagggcaagcagggcaacuucaagaaccugcgggaguucguguucaagaacaucgauggcuacuucaagaucuacagcaagcacacccccaucaaccuggugcgggaccugccccagggauucagcgcccuggagccucugguggaccugcccaucggcaucaacaucaccagguuccagacccugcuggcccugcaccggagcuaccugacccccggcgacagcagcagcggcuggaccgccggcgccgccgcauacuacgugggcuaccugcagccacggaccuuccugcugaaguacaacgagaacggcaccaucaccgacgccguggacugcgcccuggacccccugagcgagaccaagugcacccuaaagagcuucaccguggagaagggcaucuaccagaccagcaacuuccgggugcagcccacugagagcaucgugcgguuccccaacauuaccaaccugugucccuucggcgagguguucaacgccacccgguucgccagcguguacgccuggaaccggaagcggaucagcaacugcguggccgacuacagcgugcuguacaacagcgccagcuucagcaccuucaagugcuacggcgugagcccuaccaagcugaacgaccugugcuucaccaacguguacgcugacagcuucgugauccggggcgacgaggugcggcagaucgcccccggccagaccggcaacaucgccgacuacaacuacaagcugcccgacgacuucaccggcugcgugaucgccuggaacagcaacaaccuggacagcaaggugggcggcaacuacaacuaccuguaccggcuguuccguaagagcaaccugaagccauucgagcgggacaucagcaccgagaucuaccaggccggcagcacccccugcaacggugugaagggcuuuaacugcuacuucccccugcagagcuacggcuuccagcccaccuacggcgugggcuaccagcccuaccgggugguggugcugagcuucgagcugcugcacgcccccgccaccgugugcggcccuaaaaagagcaccaaccuggugaagaacaagugcgugaacuucaauuucaacggccugaccggcaccggcgugcugaccgagagcaacaagaaguuccugcccuuccagcaguucggccgggauaucgccgacaccaccgacgcagugcgggacccccagacccuggagauccuggacaucaccccaugcagcuucggcggcgugagcgucaucacccccggcacaaacaccagcaaccagguggccgugcuguaccagggagugaacugcaccgaggugcccguggccauccacgccgaccagcugacccccaccuggcggguguacagcaccggcagcaacguguuccagacccgggccggcugccugaucggcgccgagcacgugaacaacuccuacgagugcgacauccccaucggcgcuggcaucugcgccagcuaccagacccagaccaacagcccccggcgggcccggagcguggccagccagagcaucaucgccuacaccaugagcuuaggcgccgagaacagcguggccuacagcaacaacagcaucgcgaucccuaccaacuucaccaucagcgugaccaccgagauacugcccgugagcaugaccaagaccagcguggacuguaccauguacaucugcggcgacagcaccgagugcagcaaccugcugcugcaguacggcagcuucugcacccagcugaaccgggcccugaccggcaucgccguggagcaggacaagaacacccaagagguguucgcccaggugaagcagaucuacaagacucccccaaucaaggacuucggcggcuucaacuucagccagauccugcccgaccccagcaagcccagcaagcggagcuucaucgaggaccugcuguucaacaaggugacccuggccgacgccggcuucaucaagcaguacggcgacugccugggggauaucgccgcucgggaccugaucugcgcccagaaguucaacggccugaccgugcugcccccucugcugaccgacgagaugaucgcccaguacaccagcgcccugcuugccggcaccaucaccagcggcuggaccuucggcgccggcgcagcccugcagauccccuucgccaugcagauggccuaccgguucaacggcaucggcgugacccagaacgugcuguacgagaaccagaagcugaucgccaaccaguucaacagcgccaucggcaagauccaggacagccugagcagcaccgccagcgcccugggcaagcugcaggacguggugaaccagaacgcucaggcccugaacacccuggugaagcagcugagcagcaacuucggcgccaucagcucagugcugaaugacauccugagcaggcuggaucccccagaggccgaggugcagaucgaccggcugaucaccggccggcugcagagccugcagaccuacgugacccagcagcugauccgggccgccgagauccgggccagcgccaaccuggcagccaccaagaugagcgagugcgugcugggccagagcaagcggguggacuuuugcggcaagggcuaccaccugaugagcuucccccagagcgcuccccacggcgugguguuccuccacgugacauacguccccgcccaggagaagaacuucaccaccgcccccgccauuugccacgacggcaaggcccacuucccccgggagggaguguucgugagcaacggcacccacugguucgugacccagcggaacuucuacgagccucagaucaucaccaccgacaacaccuucgugagcggcaacugcgacguggugaucggcaucgugaacaacaccguguacgacccccugcagcccgagcuggacagcuucaaggaggagcuggacaaguacuucaagaaccacaccagcccagacguggaccugggcgacaucagcggcaucaacgccagcguggugaacauccagaaggagaucgaccggcugaacgagguggccaagaaccugaacgagagccugaucgaccugcaggagcugggcaaguacgagcaguacaucaaguggcccugguacaucuggcugggcuucaucgccggccugaucgccaucgugauggugaccaucaugcugugcugcaugaccagcugcuguagcugccugaagggcugcugcagcugcggcagcugcugcaaguucgacgaggacgacagcgagcccgugcugaagggcgugaagcugcacuacaccugaggacuaguuauaagacugacuagcccgaugggccucccaacgggcccuccuccccuccuugcaccgagauuaauagaucuaaaaaaaaaaaaaaaaaaaaaaaaaaaaaaaaaaaaaaaaaaaaaaaaaaaaaaaaaaaaaaaaaaaaaaaaaaaaaaaaaaaaaaaaaaaaaaaaaaaa

SEQ ID NO: 25785 - RNA, 4008 nt, Artificial Sequence
  SARS-CoV-2/Wuhan/WIV05/2019__EPI_ISL_402128 spike protein mRNA gc (1-1273)(K986P_V987P_K986P_V987P_L18F_D80A_D215G_L242del_A243del_ L244del_R246I_K417N_E484K_N501Y_D614G_A701V)
aggagaaagcuuaccauguucguguuccuggugcugcugccccuggugagcagccagugcgugaacuucaccacccggacccagcugcccccugccuacaccaacagcuucacccggggcguguacuaccccgacaagguguuccggagcagcgugcugcacagcacccaggaccuguuccugcccuucuucagcaacgugaccugguuccacgccauccacgugagcggcaccaacggcaccaagcgguucgccaacccagugcugcccuucaacgacggcguguacuucgccagcaccgagaagucaaacaucauccggggcuggaucuuuggcaccacccuggacagcaagacacagagccugcugaucgugaacaacgcuaccaacguggugaucaaggugugcgaguuccaguucugcaacgaccccuuccugggcguguacuaccacaagaacaacaagagcuggauggagagcgaguuccgggucuacagcagcgccaacaauugcaccuucgaguacgugagccagcccuuccugauggaccuggagggcaagcagggcaacuucaagaaccuccgggaguucguguucaagaacaucgacggcuacuucaagaucuacagcaagcacacccccaucaaccuggugcggggacugccccagggcuucagcgcccuggagccucugguggaucugcccaucggcaucaacaucaccagguuccagacccugcacaucagcuaccugacccccggcgacagcagcagcggcuggaccgccggcgccgccgcauacuacgugggcuaccugcagccacggaccuuccugcugaaguacaacgagaacggcaccaucaccgacgccguggacugcgcccuggacccccugagcgagaccaagugcacccuuaagagcuucaccguggagaagggcaucuaccagaccagcaacuuccgggugcagcccacugagagcauugugcgguuccccaacaucaccaaccugugucccuucggcgagguguucaacgccacccgguucgccagcguguacgccuggaaccggaagcggaucagcaacugcguggccgacuacagcgugcuguacaacagcgccagcuucagcaccuucaagugcuacggcgugagcccuaccaagcugaacgaccugugcuucaccaacguguacgcugacagcuucgugauccggggcgacgaggugcggcagaucgcccccggccagaccggcaacaucgccgacuacaacuacaagcugcccgacgacuucaccggcugcgugaucgccuggaacagcaacaaccuggacagcaaggugggcggcaacuacaacuaccuguaccggcuauuccguaagagcaaccugaagccauuugagcgggacaucagcaccgagaucuaccaggccgguagcacccccugcaacggcgugaagggcuucaacugcuacuucccccugcagagcuacggcuuccagcccaccuacggcgugggcuaccagcccuaccgggugguggugcugagcuucgagcugcugcacgcccccgccaccgugugcggcccuaaaaagagcaccaaccuggugaagaacaagugcgugaacuucaauuucaacggccugaccggcaccggcgugcugaccgagagcaacaagaaguuccugcccuuccagcaguucggccgggacaucgccgacaccaccgaugcagugcgggacccccagacccuggagauccuggacaucaccccaugcagcuucggcggcgugagcgucaucacccccggaacaaacaccagcaaccagguggccgugcuguaccagggcgugaacugcaccgaggugcccguggccauccacgccgaccagcugacccccaccuggcggguguacagcaccggcagcaacguguuccagacccgggccggcugccugaucggcgccgagcacgugaacaacuccuacgagugcgacauccccaucggcgcuggcaucugcgccagcuaccagacccagaccaacagcccccggcgggcccggagcguggccagccagagcaucaucgccuacaccaugagccugggcguggagaacagcguggccuacagcaacaacagcaucgccaucccuaccaacuucaccauaagcgugaccaccgagauccugcccgugagcaugaccaagaccagcguggacuguaccauguacaucugcggcgacagcaccgagugcagcaaccuguuacugcaguacggcagcuucugcacccagcugaaccgggcgcugaccggcaucgccguggagcaggacaagaacacccaagagguguucgcccaggugaagcagaucuacaagacucccccaaucaaggacuucggcggcuucaacuucagccagauccugcccgaccccagcaagcccagcaagcggagcuucaucgaggaccugcuguucaacaaggugacccuggccgacgccggcuucaucaagcaguacggggacugccugggcgacaucgccgcccgggaccugaucugcgcucagaaguucaacggccugaccgugcugcccccucugcugaccgaugagaugaucgcccaguacaccagcgcccugcuggccggcaccaucaccagcggcuggaccuucggcgccggcgccgcacugcagauccccuucgccaugcagauggccuaccgguucaacggcaucggcgugacccagaacgugcuguacgagaaccagaagcugaucgccaaccaguucaacagcgccaucggcaagauccaggacagccugagcagcaccgccagcgcccugggcaagcugcaggacguggugaaccagaacgcccaggcucugaacacccuggugaagcagcugagcagcaacuuuggcgccaucagcucagugcugaaugacauccugagccggcuggaucccccagaggccgaggugcagaucgacaggcugaucaccggccggcugcagagccugcagaccuacgugacccagcagcugauccgggccgccgagauucgggccagcgccaaccuggccgcaaccaagaugagcgagugcgugcugggccagagcaagcggguggacuucugcggcaagggcuaccaccugaugagcuucccccagagcgcuccccacggcgugguguuccugcacgucacauacgugcccgcccaggagaagaacuucaccaccgcccccgccaucugccacgacggaaaggcccacuucccccgggagggcguguucgugagcaacggcacccacugguucgugacccagcggaacuucuacgagccucagaucaucaccaccgacaacaccuucgugagcggcaacugcgacguggugaucggcaucgugaacaacaccguguacgacccccugcagcccgagcuggacagcuucaaggaggagcucgacaaguacuucaagaaccacaccagcccagacguggaccugggcgacaucagcggcaucaacgccagcguggugaacauccagaaggagaucgaccggcugaacgagguggccaagaaccugaacgagagccugaucgaccugcaggagcugggcaaguacgagcaguacaucaaguggcccugguacaucuggcugggcuucaucgccggccugaucgccaucgugauggugaccaucaugcugugcugcaugaccagcugcuguagcugccugaagggcugcugcagcugcggcagcugcugcaaguucgacgaggacgacagcgagcccgugcugaagggcgugaagcugcacuacaccugaggacuaguuauaagacugacuagcccgaugggccucccaacgggcccuccuccccuccuugcaccgagauuaauagaucuaaaaaaaaaaaaaaaaaaaaaaaaaaaaaaaaaaaaaaaaaaaaaaaaaaaaaaaaaaaaaaaaaaaaaaaaaaaaaaaaaaaaaaaaaaaaaaaaaaaa

SEQ ID NO: 25786 - RNA, 4017 nt, Artificial Sequence
  SARS-CoV-2/Wuhan/WIV05/2019__EPI_ISL_402128 spike protein mRNA gc (1-1273)(K986P_V987P_K986P_V987P_E484K_D614G)
aggagaaagcuuaccauguucguguuccuggugcugcugccccuggugagcagccagugcgugaaccugaccacccggacccagcugcccccugccuacaccaacagcuucacccggggcguguacuaccccgacaagguguuccggagcagcgugcugcacagcacccaggaccuguuccugcccuucuucagcaacgugaccugguuccacgccauccacgugagcggcaccaacggcaccaagcgguucgacaacccagugcugcccuucaacgacggcguguacuucgccagcaccgagaagucaaacaucauccggggcuggaucuucggcaccacccuggacagcaagacacagagccugcugaucgugaacaacgccaccaacguggugaucaaggugugcgaguuucaguucugcaacgaccccuuccugggcguguacuaccacaagaacaacaagagcuggauggagagcgaguuccgggucuacagcagcgcuaacaauugcaccuucgaguacgugagccagcccuuccugauggaccucgagggcaagcagggcaacuucaagaaccugcgggaguucguguucaagaacaucgauggcuacuucaagaucuacagcaagcacacccccaucaaccuggugcgggaccugccccagggauucagcgcccuggagccucugguggaccugcccaucggcaucaacaucaccagguuccagacccugcuggcccugcaccggagcuaccugacccccggcgacagcagcagcggcuggaccgccggcgccgccgcauacuacgugggcuaccugcagccacggaccuuccugcugaaguacaacgagaacggcaccaucaccgacgccguggacugcgcccuggacccccugagcgagaccaagugcacccuaaagagcuucaccguggagaagggcaucuaccagaccagcaacuuccgggugcagcccacugagagcaucgugcgguuccccaacauuaccaaccugugucccuucggcgagguguucaacgccacccgguucgccagcguguacgccuggaaccggaagcggaucagcaacugcguggccgacuacagcgugcuguacaacagcgccagcuucagcaccuucaagugcuacggcgugagcccuaccaagcugaacgaccugugcuucaccaacguguacgcugacagcuucgugauccggggcgacgaggugcggcagaucgcccccggccagaccggcaagaucgccgacuacaacuacaagcugcccgacgacuucaccggcugcgugaucgccuggaacagcaacaaccuggacagcaaggugggcggcaacuacaacuaccuguaccggcuguuccguaagagcaaccugaagccauucgagcgggacaucagcaccgagaucuaccaggccggcagcacccccugcaacggugugaagggcuuuaacugcuacuucccccugcagagcuacggcuuccagcccaccaacggcgugggcuaccagcccuaccgggugguggugcugagcuucgagcugcugcacgcccccgccaccgugugcggcccuaaaaagagcaccaaccuggugaagaacaagugcgugaacuucaauuucaacggccugaccggcaccggcgugcugaccgagagcaacaagaaguuccugcccuuccagcaguucggccgggauaucgccgacaccaccgacgcagugcgggacccccagacccuggagauccuggacaucaccccaugcagcuucggcggcgugagcgucaucacccccggcacaaacaccagcaaccagguggccgugcuguaccagggagugaacugcaccgaggugcccguggccauccacgccgaccagcugacccccaccuggcggguguacagcaccggcagcaacguguuccagacccgggccggcugccugaucggcgccgagcacgugaacaacuccuacgagugcgacauccccaucggcgcuggcaucugcgccagcuaccagacccagaccaacagcccccggcgggcccggagcguggccagccagagcaucaucgccuacaccaugagcuuaggcgccgagaacagcguggccuacagcaacaacagcaucgcgaucccuaccaacuucaccaucagcgugaccaccgagauacugcccgugagcaugaccaagaccagcguggacuguaccauguacaucugcggcgacagcaccgagugcagcaaccugcugcugcaguacggcagcuucugcacccagcugaaccgggcccugaccggcaucgccguggagcaggacaagaacacccaagagguguucgcccaggugaagcagaucuacaagacucccccaaucaaggacuucggcggcuucaacuucagccagauccugcccgaccccagcaagcccagcaagcggagcuucaucgaggaccugcuguucaacaaggugacccuggccgacgccggcuucaucaagcaguacggcgacugccugggggauaucgccgcucgggaccugaucugcgcccagaaguucaacggccugaccgugcugcccccucugcugaccgacgagaugaucgcccaguacaccagcgcccugcuugccggcaccaucaccagcggcuggaccuucggcgccggcgcagcccugcagauccccuucgccaugcagauggccuaccgguucaacggcaucggcgugacccagaacgugcuguacgagaaccagaagcugaucgccaaccaguucaacagcgccaucggcaagauccaggacagccugagcagcaccgccagcgcccugggcaagcugcaggacguggugaaccagaacgcucaggcccugaacacccuggugaagcagcugagcagcaacuucggcgccaucagcucagugcugaaugacauccugagcaggcuggaucccccagaggccgaggugcagaucgaccggcugaucaccggccggcugcagagccugcagaccuacgugacccagcagcugauccgggccgccgagauccgggccagcgccaaccuggcagccaccaagaugagcgagugcgugcugggccagagcaagcggguggacuuuugcggcaagggcuaccaccugaugagcuucccccagagcgcuccccacggcgugguguuccuccacgugacauacguccccgcccaggagaagaacuucaccaccgcccccgccauuugccacgacggcaaggcccacuucccccgggagggaguguucgugagcaacggcacccacugguucgugacccagcggaacuucuacgagccucagaucaucaccaccgacaacaccuucgugagcggcaacugcgacguggugaucggcaucgugaacaacaccguguacgacccccugcagcccgagcuggacagcuucaaggaggagcuggacaaguacuucaagaaccacaccagcccagacguggaccugggcgacaucagcggcaucaacgccagcguggugaacauccagaaggagaucgaccggcugaacgagguggccaagaaccugaacgagagccugaucgaccugcaggagcugggcaaguacgagcaguacaucaaguggcccugguacaucuggcugggcuucaucgccggccugaucgccaucgugauggugaccaucaugcugugcugcaugaccagcugcuguagcugccugaagggcugcugcagcugcggcagcugcugcaaguucgacgaggacgacagcgagcccgugcugaagggcgugaagcugcacuacaccugaggacuaguuauaagacugacuagcccgaugggccucccaacgggcccuccuccccuccuugcaccgagauuaauagaucuaaaaaaaaaaaaaaaaaaaaaaaaaaaaaaaaaaaaaaaaaaaaaaaaaaaaaaaaaaaaaaaaaaaaaaaaaaaaaaaaaaaaaaaaaaaaaaaaaaaa

SEQ ID NO: 25787 - RNA, 4017 nt, Artificial Sequence
  SARS-CoV-2/Wuhan/WIV05/2019__EPI_ISL_402128 spike protein mRNA gc (1-1273)(K986P_V987P_K986P_V987P_L18F_T20N_P26S_D138Y_R190S_K417T _E484K_N501Y_D614G_H655Y_T1027I)
aggagaaagcuuaccauguucguguuccuggugcugcugccccuggugagcagccagugcgugaacuucaccaaccggacccagcugcccagcgccuacaccaacagcuucacccggggcguguacuacccugacaagguguuccggagcagcgugcugcacagcacccaggaccuguuccugcccuucuucagcaacgugaccugguuccacgccauccacgugagcggcaccaacggcaccaagcgguucgacaaccccgugcugccauucaacgacggcguguacuucgccagcaccgagaagucaaacaucauccggggcuggaucuuuggcaccacccuggacagcaagacccagagccugcugaucgugaacaacgccacaaacguggugaucaaggugugcgaguuccaguucugcaacuaccccuuccugggcguguacuaccacaagaacaacaagagcuggauggagagcgaguuccgggucuacagcagcgcuaauaacugcaccuucgaguacgugagccagcccuuccugauggaccuggagggcaagcagggcaacuucaagaaccucagcgaguucguguucaagaacaucgacggcuacuucaagaucuacagcaagcacacccccaucaaccuggugcgggaucugccccagggauucagcgcccuggagccccugguggaccugccuaucggcaucaacaucacccgguuccagacccugcuggcccugcacaggagcuaccugacccccggcgacagcagcagcggcuggaccgccggcgccgccgcauacuacgugggcuaccugcagccccggaccuuccugcugaaguacaacgagaacggcaccaucaccgacgccguggacugcgcccuggacccacugagcgagaccaagugcacccuaaagagcuucaccguggagaagggcaucuaccagaccagcaacuuccgggugcagcccaccgagagcaucgugcgguuccccaacauuacuaaccugugucccuucggcgagguguucaacgccacccgguucgccagcguguacgccuggaaccggaagcggaucagcaacugcguggccgacuacagcgugcuguacaacagcgccagcuucagcaccuucaagugcuacggcgugagccccaccaagcugaacgaccugugcuucaccaacguguacgcugacagcuucgugauccggggcgacgaggugcggcagaucgccccuggccagaccggcaccaucgccgacuacaacuacaagcugcccgacgacuucaccggcugcgugaucgccuggaacagcaacaaccuggacagcaaggugggcggcaacuacaacuaccuguaccggcuguuccguaagagcaaccugaagcccuuugagcgggacaucagcaccgagaucuaccaggccggcagcaccccaugcaacggugugaagggcuucaacugcuacuucccccugcagagcuacggcuuccagcccaccuacggcgugggcuaccagcccuaccgggugguggugcugagcuucgagcugcugcacgcccccgccaccgugugcggccccaaaaagagcaccaaccuggugaagaacaagugcgugaacuucaauuucaacggccugaccggcaccggcgugcugaccgagagcaacaagaaguuccugccuuuccagcaguucggccgggacaucgccgauaccaccgacgcagugcgggacccccagacccuggagauccuggacaucacccccugcagcuucggcggcgugagcgucaucaccccaggcacaaacaccagcaaccagguggccgugcuguaccagggagugaacugcaccgaggugcccguggccauccacgccgaccagcugacccccaccuggcggguguacuccaccggcagcaacguguuccagacccgggccggcugccugaucggcgccgaguacgugaacaacagcuacgagugcgacauccccaucggcgcuggcaucugcgccagcuaccagacccagaccaacagcccccggcgggcccggagcguggccagccagagcaucaucgccuacaccaugagccugggcgccgagaacagcguggccuacagcaacaacagcaucgcgauccccaccaacuucaccaucagcgugaccaccgagauauuaccugugagcaugaccaagaccagcguggacuguaccauguacaucugcggcgacagcaccgagugcagcaaccugcugcugcaguacggcagcuucugcacccagcugaaccgggcccugaccggcaucgccguggagcaggacaagaacacccaagagguguucgcccaggugaagcagaucuacaagacuccacccaucaaggacuucggcggcuucaacuucagccagauccugcccgaccccagcaagcccagcaagcggagcuucaucgaggaccugcuguucaacaaggugacccuggccgacgccggcuucaucaagcaguacggcgacugccugggggacaucgccgcucgggaucugaucugcgcccagaaguucaacggccugaccgugcugccuccccugcugaccgacgagaugaucgcccaguacaccagcgcccugcuggccggcaccaucaccagcggcuggaccuucggcgccggcgcagcccuucagauccccuucgccaugcagauggccuaccgguucaacggcaucggcgugacccagaacgugcuguacgagaaccagaagcugaucgccaaccaguucaacagcgccaucggcaagauccaggacagccugagcagcaccgccagcgcccugggcaagcugcaggacguggugaaccagaacgcucaggcccugaacacccuggugaagcagcugagcucaaacuuuggcgccaucagcagcgugcugaaugacauccugagccggcuggacccacccgaggccgaggugcagaucgacaggcugaucaccggccggcugcagagccugcagaccuacgugacccagcagcugauccgggccgccgagauccgggccagcgccaaccuggcagccauuaagaugagcgagugcgugcugggccagagcaagcggguggacuucugcggcaagggcuaccaccugaugagcuucccccagagcgcuccccacggcgugguguuccugcacgugaccuacguccccgcccaggagaagaacuucacaaccgcccccgccaucugccacgacggcaaggcccacuucccccgggagggaguguucgugagcaacggcacccacugguucgugacccagcggaacuucuacgagccccagaucaucaccaccgacaacaccuucgugagcggcaacugcgacguggugaucggcaucgugaacaacaccguguacgacccucuccagcccgagcuggacagcuucaaggaggagcuggacaaguacuucaagaaccacaccagccccgacguggaccugggcgauaucagcggcaucaacgccagcguggugaacauccagaaggagaucgaccggcugaacgagguggccaagaaccugaacgagagccugaucgaccugcaggagcugggcaaguacgagcaguacaucaaguggccaugguacaucuggcugggcuucaucgccggccugaucgccaucgugauggugaccaucaugcugugcugcaugaccagcugcuguagcugccugaagggcugcugcagcugcggcagcugcugcaaguucgacgaggacgacagcgagcccgugcugaagggcgugaagcugcacuacaccugaggacuaguuauaagacugacuagcccgaugggccucccaacgggcccuccuccccuccuugcaccgagauuaauagaucuaaaaaaaaaaaaaaaaaaaaaaaaaaaaaaaaaaaaaaaaaaaaaaaaaaaaaaaaaaaaaaaaaaaaaaaaaaaaaaaaaaaaaaaaaaaaaaaaaaaa

SEQ ID NO: 25788 - RNA, 4017 nt, Artificial Sequence
  SARS-CoV-2/Wuhan/WIV05/2019__EPI_ISL_402128 spike protein mRNA gc (1-1273)(K986P_V987P_K986P_V987P_S13I_W152C_L452R_D614G)
aggagaaagcuuaccauguucguguuccuggugcugcugccccuggugagcauccagugcgugaaccugaccacccggacccagcugcccccugccuacaccaacagcuucacccggggcguguacuaccccgacaagguguuccggagcagcgugcugcacagcacccaggaccuguuccugcccuucuucagcaacgugaccugguuccacgccauccacgugagcggcaccaacggcaccaagcgguucgacaacccagugcugcccuucaacgacggcguguacuucgccagcaccgagaagucaaacaucauccggggcuggaucuucggcaccacccuggacagcaagacacagagccugcugaucgugaacaacgccaccaacguggugaucaaggugugcgaguuucaguucugcaacgaccccuuccugggcguguacuaccacaagaacaacaagagcugcauggagagcgaguuccgggucuacagcagcgcuaacaauugcaccuucgaguacgugagccagcccuuccugauggaccucgagggcaagcagggcaacuucaagaaccugcgggaguucguguucaagaacaucgauggcuacuucaagaucuacagcaagcacacccccaucaaccuggugcgggaccugccccagggauucagcgcccuggagccucugguggaccugcccaucggcaucaacaucaccagguuccagacccugcuggcccugcaccggagcuaccugacccccggcgacagcagcagcggcuggaccgccggcgccgccgcauacuacgugggcuaccugcagccacggaccuuccugcugaaguacaacgagaacggcaccaucaccgacgccguggacugcgcccuggacccccugagcgagaccaaguguacccuaaagagcuucaccguggagaagggcaucuaccagaccagcaacuuccgggugcagcccacugagagcauugugcgguuccccaacaucaccaaccugugccccuucggcgagguguucaacgccacccgguucgccagcguguacgccuggaaccggaagcggaucagcaacugcguggccgacuacagcgugcuguacaacagcgccagcuucagcaccuucaagugcuacggcgugagcccuaccaagcugaacgaccugugcuucaccaacguguacgcugacagcuucgugauccggggcgacgaggugcggcagaucgcccccggccagaccggcaagaucgccgacuacaacuacaagcugcccgacgacuucaccggcugcgugaucgccuggaacagcaacaaccuggacagcaaggugggcggcaacuacaacuaccgguaccggcuguuccguaagagcaaccugaagccauucgagcgggacaucagcaccgagaucuaccaggccggcagcacccccugcaacgguguggagggcuuuaacugcuacuucccccugcagagcuacggcuuccagcccaccaacggcgugggcuaccagcccuaccgggugguggugcugagcuucgagcugcugcacgcccccgccaccgugugcggcccuaaaaagagcaccaaccuggugaagaacaagugcgugaacuucaauuucaacggccugaccggcaccggcgugcugaccgagagcaacaagaaguuccugcccuuccagcaguucggccgggauaucgccgacaccaccgacgcagugcgggacccccagacccuggagauccuggacaucaccccaugcagcuucggcggcgugagcgucaucacccccggcacaaacaccagcaaccagguggccgugcuguaccagggagugaacugcaccgaggugcccguggccauccacgccgaccagcugacccccaccuggcggguguacagcaccggcagcaacguguuccagacccgggccggcugccugaucggcgccgagcacgugaacaacagcuacgagugcgacauccccaucggcgcuggcaucugugccuccuaccagacccagaccaacagcccccggcgggcccggagcguggccagccagagcaucaucgccuacaccaugagccugggcgccgagaacagcguggccuacagcaacaacagcaucgcgaucccuaccaacuucaccauaagcgugaccaccgagaucuuacccgugagcaugaccaagaccagcguggacugcaccauguacaucugcggcgacagcaccgagugcagcaaccugcugcugcaguacggcagcuucugcacccagcugaaccgggcccugaccggcaucgccguggagcaggacaagaacacccaagagguguucgcccaggugaagcagaucuacaagacucccccaaucaaggacuucggcggcuucaacuucagccagauccugcccgaccccagcaagcccagcaagcggagcuucaucgaggaccugcuguucaacaaggugacccuggccgacgccggcuucaucaagcaguacggcgacugccugggggauaucgccgcucgggaccugaucugcgcccagaaguucaacggccugaccgugcugcccccucugcugaccgacgagaugaucgcccaguacaccagcgcccugcuggccggcaccaucaccagcggcuggaccuucggcgccggcgcagcccuucagauccccuucgccaugcagauggccuacagguucaacggcaucggcgugacccagaacgugcuguacgagaaccagaagcugaucgccaaccaguucaacagcgccaucggcaagauccaggacagccugagcagcaccgccagcgcccugggcaagcugcaggacguggugaaccagaacgcucaggcccugaacacccuggugaagcagcugagcagcaacuucggcgccaucagcagcgugcugaaugacauccugucacggcuggaucccccagaggccgaggugcagaucgaccggcugaucaccggccggcugcagagccugcagaccuacgugacccagcagcugauccgggccgccgagauucgggccagcgccaaccuggcagccaccaagaugagcgagugcgugcugggccagagcaagcggguggacuuuugcggcaagggcuaccaccugaugagcuucccccagagcgcuccccacggcgugguguuccugcacgugacauacguccccgcccaggagaagaacuucaccaccgcccccgccaucugccacgacggcaaggcccacuucccccgggagggaguguucgugagcaacggcacccacugguucgugacccagcggaacuucuacgagccucagaucaucaccaccgacaacaccuucgugagcggcaacugcgacguggugaucggcaucgugaacaacaccguguacgacccccuccagcccgagcuggacagcuucaaggaggagcuggacaaguacuucaagaaccacaccagcccagacguggaccugggcgacaucagcggcaucaacgccagcguggugaacauccagaaggagaucgaccggcugaacgagguggccaagaaccugaacgagagccugaucgaccugcaggagcugggcaaguacgagcaguacaucaaguggcccugguacaucuggcugggcuucaucgccggccugaucgccaucgugauggugaccaucaugcugugcugcaugaccagcuguugcagcugccugaagggcugcugcagcugcggcagcugcugcaaguucgacgaggacgacagcgagcccgugcugaagggcgugaagcugcacuacaccugaggacuaguuauaagacugacuagcccgaugggccucccaacgggcccuccuccccuccuugcaccgagauuaauagaucuaaaaaaaaaaaaaaaaaaaaaaaaaaaaaaaaaaaaaaaaaaaaaaaaaaaaaaaaaaaaaaaaaaaaaaaaaaaaaaaaaaaaaaaaaaaaaaaaaaaa

SEQ ID NO: 25789 - RNA, 4017 nt, Artificial Sequence
  SARS-CoV-2/Wuhan/WIV05/2019__EPI_ISL_402128 spike protein mRNA gc mod (1-1273)(K986P_V987P)
aggagaaagcuuaccauguucguguuucuggugcugcugccccugguguccagccagugugugaaccugaccaccagaacacagcugccuccagccuacaccaacagcuucaccagaggcguguacuaccccgacaagguguucagauccagcgugcugcacucuacccaggaccuguuccugccuuucuucagcaacgugaccugguuccacgccauccacguguccggcaccaauggcaccaagagauucgacaaccccgugcugcccuucaacgacgggguguacuuugccagcaccgagaaguccaacaucaucagaggcuggaucuucggcaccacacuggacagcaagacccagagccugcugaucgugaacaacgccaccaacguggucaucaaagugugcgaguuccaguucugcaacgaccccuuccugggcgucuacuaccacaagaacaacaagagcuggauggaaagcgaguuccggguguacagcagcgccaacaacugcaccuucgaguacgugucccagccuuuccugauggaccuggaaggcaagcagggcaacuucaagaaccugcgcgaguucguguucaagaacaucgacggcuacuucaaaaucuacagcaagcacaccccuaucaaccucgugcgggaucugccucagggcuucucugcucuggaaccccugguggaucugcccaucggcaucaacaucacccgguuucagacacugcuggcccugcacagaagcuaccugacaccuggcgauagcagcagcggauggacagcuggugccgccgcuuacuaugugggcuaccugcagccuagaaccuuccugcugaaguacaacgagaacggcaccaucaccgacgccguggauugugcucuggauccucugagcgagacaaagugcacccugaaguccuucaccguggaaaagggcaucuaccagaccagcaacuuccgggugcagcccaccgaauccaucgugcgguuccccaauaucaccaaucugugccccuucggcgagguguucaaugccaccagauucgccucuguguacgccuggaaccggaagcggaucagcaauugcguggccgacuacuccgugcuguacaacuccgccagcuucagcaccuucaagugcuacggcguguccccuaccaagcugaacgaccugugcuucacaaacguguacgccgacagcuucgugauccggggagaugaagugcggcagauugccccuggacagacaggcaagaucgccgacuacaacuacaagcugcccgacgacuucaccggcugugugauugccuggaacagcaacaaccuggacuccaaagucggcggcaacuacaauuaccuguaccggcuguuccggaaguccaaucugaagcccuucgagcgggacaucagcaccgaaaucuaucaggccggcagcaccccuugcaacggcguggaaggcuucaacugcuacuucccacugcaguccuacggcuuucagcccacaaauggcgugggcuaucagcccuacagagugguggugcugagcuucgaacugcugcaugcuccugccacagugugcggcccuaagaaaagcaccaaucucgugaagaacaaaugcgugaacuucaacuucaacggccugaccggcaccggcgugcugacagagagcaacaagaaguuccugccauuccagcaguuuggccgggauaucgccgauaccacagacgccguuagagauccccagacacuggaaauccuggacaucaccccaugcagcuucggcggagugucugugaucaccccuggcaccaacaccagcaaucagguggcagugcuguaccaggacgugaacuguaccgaagugcccguggccauucacgccgaucagcugacaccuacauggcggguguacuccaccggcagcaauguguuucagaccagagccggcugucugaucggagccgagcacgugaacaauagcuacgagugcgacauccccaucggcgcuggcaucugugccagcuaccagacacagacaaacagccccagacgggcuagaagcguggccagccagagcaucauugccuacacaaugucucugggcgccgagaacagcguggccuacuccaacaacucuaucgcuauccccaccaacuucaccaucagcgugaccaccgagauccugccuguguccaugaccaagaccagcguggacugcaccauguacaucugcggcgauuccaccgagugcuccaaccugcugcugcaguacggcagcuucugcacccagcugaauagagcccugacagggaucgccguggaacaggacaagaacacccaagagguguucgcccaagugaagcaaaucuacaagaccccuccuaucaaggacuucggcggcuucaauuucagccagauucugcccgauccuagcaagcccagcaagcggagcuucaucgaggaccugcuguucaacaaagugacacuggccgacgccggcuucaucaagcaguauggcgauugucugggcgacauugccgccagggaucugauuugcgcccagaaguuuaacggacugacagugcugccuccucugcugaccgaugagaugaucgcccaguacacaucugcccugcuggccggcacaaucacaagcggcuggacauuuggagcuggcgccgcucugcagauccccuuugcuaugcagauggccuaccgguucaacggcaucggagugacccagaaugugcuguacgagaaccagaagcugaucgccaaccaguucaacagcgccaucggcaagauccaggacagccugagcagcacagcaagcgcccugggaaagcugcaggacguggucaaccagaaugcccaggcacugaacacccuggucaagcagcuguccuccaacuucggcgccaucagcucugugcugaacgauauccugagcagacuggacccuccugaggccgaggugcagaucgacagacugaucacaggcagacugcagagccuccagacauacgugacccagcagcugaucagagccgccgagauuagagccucugccaaucuggccgccaccaagaugucugagugugugcugggccagagcaagagaguggacuuuugcggcaagggcuaccaccugaugagcuucccucagucugccccucacggcgugguguuucugcacgugacauaugugcccgcucaagagaagaauuucaccaccgcuccagccaucugccacgacggcaaagcccacuuuccuagagaaggcguguucguguccaacggcacccauugguucgugacacagcggaacuucuacgagccccagaucaucaccaccgacaacaccuucgugucuggcaacugcgacguugugaucggcauugugaacaauaccguguacgacccucugcagcccgagcuggacagcuucaaagaggaacuggacaaguacuuuaagaaccacacaagccccgacguggaccugggcgauaucagcggaaucaaugccagcgucgugaacauccagaaagagaucgaccggcugaacgagguggccaagaaucugaacgagagccugaucgaccugcaagaacuggggaaguacgagcaguacaucaaguggcccugguacaucuggcugggcuuuaucgccggacugauugccaucgugauggucacaaucaugcuguguugcaugaccagcugcuguagcugccugaagggcuguuguagcuguggcagcugcugcaaguucgacgaggacgauucugagcccgugcugaagggcgugaaacugcacuacaccugaggacuaguuauaagacugacuagcccgaugggccucccaacgggcccuccuccccuccuugcaccgagauuaauagaucuaaaaaaaaaaaaaaaaaaaaaaaaaaaaaaaaaaaaaaaaaaaaaaaaaaaaaaaaaaaaaaaaaaaaaaaaaaaaaaaaaaaaaaaaaaaaaaaaaaaa

SEQ ID NO: 25790 - RNA, 4017 nt, Artificial Sequence
  SARS-CoV-2/Wuhan/WIV05/2019__EPI_ISL_402128 spike protein mRNA gc mod (1-1273)(K986P_V987P_ D614G)
aggagaaagcuuaccauguucguguuucuggugcugcugccccugguguccagccagugugugaaccugaccaccagaacacagcugccuccagccuacaccaacagcuucaccagaggcguguacuaccccgacaagguguucagauccagcgugcugcacucuacccaggaccuguuccugccuuucuucagcaacgugaccugguuccacgccauccacguguccggcaccaauggcaccaagagauucgacaaccccgugcugcccuucaacgacgggguguacuuugccagcaccgagaaguccaacaucaucagaggcuggaucuucggcaccacacuggacagcaagacccagagccugcugaucgugaacaacgccaccaacguggucaucaaagugugcgaguuccaguucugcaacgaccccuuccugggcgucuacuaccacaagaacaacaagagcuggauggaaagcgaguuccggguguacagcagcgccaacaacugcaccuucgaguacgugucccagccuuuccugauggaccuggaaggcaagcagggcaacuucaagaaccugcgcgaguucguguucaagaacaucgacggcuacuucaaaaucuacagcaagcacaccccuaucaaccucgugcgggaucugccucagggcuucucugcucuggaaccccugguggaucugcccaucggcaucaacaucacccgguuucagacacugcuggcccugcacagaagcuaccugacaccuggcgauagcagcagcggauggacagcuggugccgccgcuuacuaugugggcuaccugcagccuagaaccuuccugcugaaguacaacgagaacggcaccaucaccgacgccguggauugugcucuggauccucugagcgagacaaagugcacccugaaguccuucaccguggaaaagggcaucuaccagaccagcaacuuccgggugcagcccaccgaauccaucgugcgguuccccaauaucaccaaucugugccccuucggcgagguguucaaugccaccagauucgccucuguguacgccuggaaccggaagcggaucagcaauugcguggccgacuacuccgugcuguacaacuccgccagcuucagcaccuucaagugcuacggcguguccccuaccaagcugaacgaccugugcuucacaaacguguacgccgacagcuucgugauccggggagaugaagugcggcagauugccccuggacagacaggcaagaucgccgacuacaacuacaagcugcccgacgacuucaccggcugugugauugccuggaacagcaacaaccuggacuccaaagucggcggcaacuacaauuaccuguaccggcuguuccggaaguccaaucugaagcccuucgagcgggacaucagcaccgaaaucuaucaggccggcagcaccccuugcaacggcguggaaggcuucaacugcuacuucccacugcaguccuacggcuuucagcccacaaauggcgugggcuaucagcccuacagagugguggugcugagcuucgaacugcugcaugcuccugccacagugugcggcccuaagaaaagcaccaaucucgugaagaacaaaugcgugaacuucaacuucaacggccugaccggcaccggcgugcugacagagagcaacaagaaguuccugccauuccagcaguuuggccgggauaucgccgauaccacagacgccguuagagauccccagacacuggaaauccuggacaucaccccaugcagcuucggcggagugucugugaucaccccuggcaccaacaccagcaaucagguggcagugcuguaccagggcgugaacuguaccgaagugcccguggccauucacgccgaucagcugacaccuacauggcggguguacuccaccggcagcaauguguuucagaccagagccggcugucugaucggagccgagcacgugaacaauagcuacgagugcgacauccccaucggcgcuggcaucugugccagcuaccagacacagacaaacagccccagacgggcuagaagcguggccagccagagcaucauugccuacacaaugucucugggcgccgagaacagcguggccuacuccaacaacucuaucgcuauccccaccaacuucaccaucagcgugaccaccgagauccugccuguguccaugaccaagaccagcguggacugcaccauguacaucugcggcgauuccaccgagugcuccaaccugcugcugcaguacggcagcuucugcacccagcugaauagagcccugacagggaucgccguggaacaggacaagaacacccaagagguguucgcccaagugaagcaaaucuacaagaccccuccuaucaaggacuucggcggcuucaauuucagccagauucugcccgauccuagcaagcccagcaagcggagcuucaucgaggaccugcuguucaacaaagugacacuggccgacgccggcuucaucaagcaguauggcgauugucugggcgacauugccgccagggaucugauuugcgcccagaaguuuaacggacugacagugcugccuccucugcugaccgaugagaugaucgcccaguacacaucugcccugcuggccggcacaaucacaagcggcuggacauuuggagcuggcgccgcucugcagauccccuuugcuaugcagauggccuaccgguucaacggcaucggagugacccagaaugugcuguacgagaaccagaagcugaucgccaaccaguucaacagcgccaucggcaagauccaggacagccugagcagcacagcaagcgcccugggaaagcugcaggacguggucaaccagaaugcccaggcacugaacacccuggucaagcagcuguccuccaacuucggcgccaucagcucugugcugaacgauauccugagcagacuggacccuccugaggccgaggugcagaucgacagacugaucacaggcagacugcagagccuccagacauacgugacccagcagcugaucagagccgccgagauuagagccucugccaaucuggccgccaccaagaugucugagugugugcugggccagagcaagagaguggacuuuugcggcaagggcuaccaccugaugagcuucccucagucugccccucacggcgugguguuucugcacgugacauaugugcccgcucaagagaagaauuucaccaccgcuccagccaucugccacgacggcaaagcccacuuuccuagagaaggcguguucguguccaacggcacccauugguucgugacacagcggaacuucuacgagccccagaucaucaccaccgacaacaccuucgugucuggcaacugcgacguugugaucggcauugugaacaauaccguguacgacccucugcagcccgagcuggacagcuucaaagaggaacuggacaaguacuuuaagaaccacacaagccccgacguggaccugggcgauaucagcggaaucaaugccagcgucgugaacauccagaaagagaucgaccggcugaacgagguggccaagaaucugaacgagagccugaucgaccugcaagaacuggggaaguacgagcaguacaucaaguggcccugguacaucuggcugggcuuuaucgccggacugauugccaucgugauggucacaaucaugcuguguugcaugaccagcugcuguagcugccugaagggcuguuguagcuguggcagcugcugcaaguucgacgaggacgauucugagcccgugcugaagggcgugaaacugcacuacaccugaggacuaguuauaagacugacuagcccgaugggccucccaacgggcccuccuccccuccuugcaccgagauuaauagaucuaaaaaaaaaaaaaaaaaaaaaaaaaaaaaaaaaaaaaaaaaaaaaaaaaaaaaaaaaaaaaaaaaaaaaaaaaaaaaaaaaaaaaaaaaaaaaaaaaaaa

SEQ ID NO: 25791 - RNA, 4017 nt, Artificial Sequence
  SARS-CoV-2/Wuhan/WIV05/2019__EPI_ISL_402128 spike protein mRNA gc mod (1-1273)(K986P_V987P_A222V_D614G)
aggagaaagcuuaccauguucguguuucuggugcugcugccccugguguccagccagugugugaaccugaccaccagaacacagcugccuccagccuacaccaacagcuucaccagaggcguguacuaccccgacaagguguucagauccagcgugcugcacucuacccaggaccuguuccugccuuucuucagcaacgugaccugguuccacgccauccacguguccggcaccaauggcaccaagagauucgacaaccccgugcugcccuucaacgacgggguguacuuugccagcaccgagaaguccaacaucaucagaggcuggaucuucggcaccacacuggacagcaagacccagagccugcugaucgugaacaacgccaccaacguggucaucaaagugugcgaguuccaguucugcaacgaccccuuccugggcgucuacuaccacaagaacaacaagagcuggauggaaagcgaguuccggguguacagcagcgccaacaacugcaccuucgaguacgugucccagccuuuccugauggaccuggaaggcaagcagggcaacuucaagaaccugcgcgaguucguguucaagaacaucgacggcuacuucaaaaucuacagcaagcacaccccuaucaaccucgugcgggaucugccucagggcuucucugugcuggaaccccugguggaucugcccaucggcaucaacaucacccgguuucagacacugcuggcccugcacagaagcuaccugacaccuggcgauagcagcagcggauggacagcuggugccgccgcuuacuaugugggcuaccugcagccuagaaccuuccugcugaaguacaacgagaacggcaccaucaccgacgccguggauugugcucuggauccucugagcgagacaaagugcacccugaaguccuucaccguggaaaagggcaucuaccagaccagcaacuuccgggugcagcccaccgaauccaucgugcgguuccccaauaucaccaaucugugccccuucggcgagguguucaaugccaccagauucgccucuguguacgccuggaaccggaagcggaucagcaauugcguggccgacuacuccgugcuguacaacuccgccagcuucagcaccuucaagugcuacggcguguccccuaccaagcugaacgaccugugcuucacaaacguguacgccgacagcuucgugauccggggagaugaagugcggcagauugccccuggacagacaggcaagaucgccgacuacaacuacaagcugcccgacgacuucaccggcugugugauugccuggaacagcaacaaccuggacuccaaagucggcggcaacuacaauuaccuguaccggcuguuccggaaguccaaucugaagcccuucgagcgggacaucagcaccgaaaucuaucaggccggcagcaccccuugcaacggcguggaaggcuucaacugcuacuucccacugcaguccuacggcuuucagcccacaaauggcgugggcuaucagcccuacagagugguggugcugagcuucgaacugcugcaugcuccugccacagugugcggcccuaagaaaagcaccaaucucgugaagaacaaaugcgugaacuucaacuucaacggccugaccggcaccggcgugcugacagagagcaacaagaaguuccugccauuccagcaguuuggccgggauaucgccgauaccacagacgccguuagagauccccagacacuggaaauccuggacaucaccccaugcagcuucggcggagugucugugaucaccccuggcaccaacaccagcaaucagguggcagugcuguaccagggcgugaacuguaccgaagugcccguggccauucacgccgaucagcugacaccuacauggcggguguacuccaccggcagcaauguguuucagaccagagccggcugucugaucggagccgagcacgugaacaauagcuacgagugcgacauccccaucggcgcuggcaucugugccagcuaccagacacagacaaacagccccagacgggcuagaagcguggccagccagagcaucauugccuacacaaugucucugggcgccgagaacagcguggccuacuccaacaacucuaucgcuauccccaccaacuucaccaucagcgugaccaccgagauccugccuguguccaugaccaagaccagcguggacugcaccauguacaucugcggcgauuccaccgagugcuccaaccugcugcugcaguacggcagcuucugcacccagcugaauagagcccugacagggaucgccguggaacaggacaagaacacccaagagguguucgcccaagugaagcaaaucuacaagaccccuccuaucaaggacuucggcggcuucaauuucagccagauucugcccgauccuagcaagcccagcaagcggagcuucaucgaggaccugcuguucaacaaagugacacuggccgacgccggcuucaucaagcaguauggcgauugucugggcgacauugccgccagggaucugauuugcgcccagaaguuuaacggacugacagugcugccuccucugcugaccgaugagaugaucgcccaguacacaucugcccugcuggccggcacaaucacaagcggcuggacauuuggagcuggcgccgcucugcagauccccuuugcuaugcagauggccuaccgguucaacggcaucggagugacccagaaugugcuguacgagaaccagaagcugaucgccaaccaguucaacagcgccaucggcaagauccaggacagccugagcagcacagcaagcgcccugggaaagcugcaggacguggucaaccagaaugcccaggcacugaacacccuggucaagcagcuguccuccaacuucggcgccaucagcucugugcugaacgauauccugagcagacuggacccuccugaggccgaggugcagaucgacagacugaucacaggcagacugcagagccuccagacauacgugacccagcagcugaucagagccgccgagauuagagccucugccaaucuggccgccaccaagaugucugagugugugcugggccagagcaagagaguggacuuuugcggcaagggcuaccaccugaugagcuucccucagucugccccucacggcgugguguuucugcacgugacauaugugcccgcucaagagaagaauuucaccaccgcuccagccaucugccacgacggcaaagcccacuuuccuagagaaggcguguucguguccaacggcacccauugguucgugacacagcggaacuucuacgagccccagaucaucaccaccgacaacaccuucgugucuggcaacugcgacguugugaucggcauugugaacaauaccguguacgacccucugcagcccgagcuggacagcuucaaagaggaacuggacaaguacuuuaagaaccacacaagccccgacguggaccugggcgauaucagcggaaucaaugccagcgucgugaacauccagaaagagaucgaccggcugaacgagguggccaagaaucugaacgagagccugaucgaccugcaagaacuggggaaguacgagcaguacaucaaguggcccugguacaucuggcugggcuuuaucgccggacugauugccaucgugauggucacaaucaugcuguguugcaugaccagcugcuguagcugccugaagggcuguuguagcuguggcagcugcugcaaguucgacgaggacgauucugagcccgugcugaagggcgugaaacugcacuacaccugaggacuaguuauaagacugacuagcccgaugggccucccaacgggcccuccuccccuccuugcaccgagauuaauagaucuaaaaaaaaaaaaaaaaaaaaaaaaaaaaaaaaaaaaaaaaaaaaaaaaaaaaaaaaaaaaaaaaaaaaaaaaaaaaaaaaaaaaaaaaaaaaaaaaaaaa

SEQ ID NO: 25792 - RNA, 4017 nt, Artificial Sequence
  SARS-CoV-2/Wuhan/WIV05/2019__EPI_ISL_402128 spike protein mRNA gc mod (1-1273)(K986P_V987P_N439K_D614G)
aggagaaagcuuaccauguucguguuucuggugcugcugccccugguguccagccagugugugaaccugaccaccagaacacagcugccuccagccuacaccaacagcuucaccagaggcguguacuaccccgacaagguguucagauccagcgugcugcacucuacccaggaccuguuccugccuuucuucagcaacgugaccugguuccacgccauccacguguccggcaccaauggcaccaagagauucgacaaccccgugcugcccuucaacgacgggguguacuuugccagcaccgagaaguccaacaucaucagaggcuggaucuucggcaccacacuggacagcaagacccagagccugcugaucgugaacaacgccaccaacguggucaucaaagugugcgaguuccaguucugcaacgaccccuuccugggcgucuacuaccacaagaacaacaagagcuggauggaaagcgaguuccggguguacagcagcgccaacaacugcaccuucgaguacgugucccagccuuuccugauggaccuggaaggcaagcagggcaacuucaagaaccugcgcgaguucguguucaagaacaucgacggcuacuucaaaaucuacagcaagcacaccccuaucaaccucgugcgggaucugccucagggcuucucugcucuggaaccccugguggaucugcccaucggcaucaacaucacccgguuucagacacugcuggcccugcacagaagcuaccugacaccuggcgauagcagcagcggauggacagcuggugccgccgcuuacuaugugggcuaccugcagccuagaaccuuccugcugaaguacaacgagaacggcaccaucaccgacgccguggauugugcucuggauccucugagcgagacaaagugcacccugaaguccuucaccguggaaaagggcaucuaccagaccagcaacuuccgggugcagcccaccgaauccaucgugcgguuccccaauaucaccaaucugugccccuucggcgagguguucaaugccaccagauucgccucuguguacgccuggaaccggaagcggaucagcaauugcguggccgacuacuccgugcuguacaacuccgccagcuucagcaccuucaagugcuacggcguguccccuaccaagcugaacgaccugugcuucacaaacguguacgccgacagcuucgugauccggggagaugaagugcggcagauugccccuggacagacaggcaagaucgccgacuacaacuacaagcugcccgacgacuucaccggcugugugauugccuggaacagcaagaaccuggacuccaaagucggcggcaacuacaauuaccuguaccggcuguuccggaaguccaaucugaagcccuucgagcgggacaucagcaccgaaaucuaucaggccggcagcaccccuugcaacggcguggaaggcuucaacugcuacuucccacugcaguccuacggcuuucagcccacaaauggcgugggcuaucagcccuacagagugguggugcugagcuucgaacugcugcaugcuccugccacagugugcggcccuaagaaaagcaccaaucucgugaagaacaaaugcgugaacuucaacuucaacggccugaccggcaccggcgugcugacagagagcaacaagaaguuccugccauuccagcaguuuggccgggauaucgccgauaccacagacgccguuagagauccccagacacuggaaauccuggacaucaccccaugcagcuucggcggagugucugugaucaccccuggcaccaacaccagcaaucagguggcagugcuguaccagggcgugaacuguaccgaagugcccguggccauucacgccgaucagcugacaccuacauggcggguguacuccaccggcagcaauguguuucagaccagagccggcugucugaucggagccgagcacgugaacaauagcuacgagugcgacauccccaucggcgcuggcaucugugccagcuaccagacacagacaaacagccccagacgggcuagaagcguggccagccagagcaucauugccuacacaaugucucugggcgccgagaacagcguggccuacuccaacaacucuaucgcuauccccaccaacuucaccaucagcgugaccaccgagauccugccuguguccaugaccaagaccagcguggacugcaccauguacaucugcggcgauuccaccgagugcuccaaccugcugcugcaguacggcagcuucugcacccagcugaauagagcccugacagggaucgccguggaacaggacaagaacacccaagagguguucgcccaagugaagcaaaucuacaagaccccuccuaucaaggacuucggcggcuucaauuucagccagauucugcccgauccuagcaagcccagcaagcggagcuucaucgaggaccugcuguucaacaaagugacacuggccgacgccggcuucaucaagcaguauggcgauugucugggcgacauugccgccagggaucugauuugcgcccagaaguuuaacggacugacagugcugccuccucugcugaccgaugagaugaucgcccaguacacaucugcccugcuggccggcacaaucacaagcggcuggacauuuggagcuggcgccgcucugcagauccccuuugcuaugcagauggccuaccgguucaacggcaucggagugacccagaaugugcuguacgagaaccagaagcugaucgccaaccaguucaacagcgccaucggcaagauccaggacagccugagcagcacagcaagcgcccugggaaagcugcaggacguggucaaccagaaugcccaggcacugaacacccuggucaagcagcuguccuccaacuucggcgccaucagcucugugcugaacgauauccugagcagacuggacccuccugaggccgaggugcagaucgacagacugaucacaggcagacugcagagccuccagacauacgugacccagcagcugaucagagccgccgagauuagagccucugccaaucuggccgccaccaagaugucugagugugugcugggccagagcaagagaguggacuuuugcggcaagggcuaccaccugaugagcuucccucagucugccccucacggcgugguguuucugcacgugacauaugugcccgcucaagagaagaauuucaccaccgcuccagccaucugccacgacggcaaagcccacuuuccuagagaaggcguguucguguccaacggcacccauugguucgugacacagcggaacuucuacgagccccagaucaucaccaccgacaacaccuucgugucuggcaacugcgacguugugaucggcauugugaacaauaccguguacgacccucugcagcccgagcuggacagcuucaaagaggaacuggacaaguacuuuaagaaccacacaagccccgacguggaccugggcgauaucagcggaaucaaugccagcgucgugaacauccagaaagagaucgaccggcugaacgagguggccaagaaucugaacgagagccugaucgaccugcaagaacuggggaaguacgagcaguacaucaaguggcccugguacaucuggcugggcuuuaucgccggacugauugccaucgugauggucacaaucaugcuguguugcaugaccagcugcuguagcugccugaagggcuguuguagcuguggcagcugcugcaaguucgacgaggacgauucugagcccgugcugaagggcgugaaacugcacuacaccugaggacuaguuauaagacugacuagcccgaugggccucccaacgggcccuccuccccuccuugcaccgagauuaauagaucuaaaaaaaaaaaaaaaaaaaaaaaaaaaaaaaaaaaaaaaaaaaaaaaaaaaaaaaaaaaaaaaaaaaaaaaaaaaaaaaaaaaaaaaaaaaaaaaaaaaa

SEQ ID NO: 25793 - RNA, 4017 nt, Artificial Sequence
  SARS-CoV-2/Wuhan/WIV05/2019__EPI_ISL_402128 spike protein mRNA gc mod (1-1273)(K986P_V987P_S477N_D614G)
aggagaaagcuuaccauguucguguuucuggugcugcugccccugguguccagccagugugugaaccugaccaccagaacacagcugccuccagccuacaccaacagcuucaccagaggcguguacuaccccgacaagguguucagauccagcgugcugcacucuacccaggaccuguuccugccuuucuucagcaacgugaccugguuccacgccauccacguguccggcaccaauggcaccaagagauucgacaaccccgugcugcccuucaacgacgggguguacuuugccagcaccgagaaguccaacaucaucagaggcuggaucuucggcaccacacuggacagcaagacccagagccugcugaucgugaacaacgccaccaacguggucaucaaagugugcgaguuccaguucugcaacgaccccuuccugggcgucuacuaccacaagaacaacaagagcuggauggaaagcgaguuccggguguacagcagcgccaacaacugcaccuucgaguacgugucccagccuuuccugauggaccuggaaggcaagcagggcaacuucaagaaccugcgcgaguucguguucaagaacaucgacggcuacuucaaaaucuacagcaagcacaccccuaucaaccucgugcgggaucugccucagggcuucucugcucuggaaccccugguggaucugcccaucggcaucaacaucacccgguuucagacacugcuggcccugcacagaagcuaccugacaccuggcgauagcagcagcggauggacagcuggugccgccgcuuacuaugugggcuaccugcagccuagaaccuuccugcugaaguacaacgagaacggcaccaucaccgacgccguggauugugcucuggauccucugagcgagacaaagugcacccugaaguccuucaccguggaaaagggcaucuaccagaccagcaacuuccgggugcagcccaccgaauccaucgugcgguuccccaauaucaccaaucugugccccuucggcgagguguucaaugccaccagauucgccucuguguacgccuggaaccggaagcggaucagcaauugcguggccgacuacuccgugcuguacaacuccgccagcuucagcaccuucaagugcuacggcguguccccuaccaagcugaacgaccugugcuucacaaacguguacgccgacagcuucgugauccggggagaugaagugcggcagauugccccuggacagacaggcaagaucgccgacuacaacuacaagcugcccgacgacuucaccggcugugugauugccuggaacagcaacaaccuggacuccaaagucggcggcaacuacaauuaccuguaccggcuguuccggaaguccaaucugaagcccuucgagcgggacaucagcaccgaaaucuaucaggccggcaacaccccuugcaacggcguggaaggcuucaacugcuacuucccacugcaguccuacggcuuucagcccacaaauggcgugggcuaucagcccuacagagugguggugcugagcuucgaacugcugcaugcuccugccacagugugcggcccuaagaaaagcaccaaucucgugaagaacaaaugcgugaacuucaacuucaacggccugaccggcaccggcgugcugacagagagcaacaagaaguuccugccauuccagcaguuuggccgggauaucgccgauaccacagacgccguuagagauccccagacacuggaaauccuggacaucaccccaugcagcuucggcggagugucugugaucaccccuggcaccaacaccagcaaucagguggcagugcuguaccagggcgugaacuguaccgaagugcccguggccauucacgccgaucagcugacaccuacauggcggguguacuccaccggcagcaauguguuucagaccagagccggcugucugaucggagccgagcacgugaacaauagcuacgagugcgacauccccaucggcgcuggcaucugugccagcuaccagacacagacaaacagccccagacgggcuagaagcguggccagccagagcaucauugccuacacaaugucucugggcgccgagaacagcguggccuacuccaacaacucuaucgcuauccccaccaacuucaccaucagcgugaccaccgagauccugccuguguccaugaccaagaccagcguggacugcaccauguacaucugcggcgauuccaccgagugcuccaaccugcugcugcaguacggcagcuucugcacccagcugaauagagcccugacagggaucgccguggaacaggacaagaacacccaagagguguucgcccaagugaagcaaaucuacaagaccccuccuaucaaggacuucggcggcuucaauuucagccagauucugcccgauccuagcaagcccagcaagcggagcuucaucgaggaccugcuguucaacaaagugacacuggccgacgccggcuucaucaagcaguauggcgauugucugggcgacauugccgccagggaucugauuugcgcccagaaguuuaacggacugacagugcugccuccucugcugaccgaugagaugaucgcccaguacacaucugcccugcuggccggcacaaucacaagcggcuggacauuuggagcuggcgccgcucugcagauccccuuugcuaugcagauggccuaccgguucaacggcaucggagugacccagaaugugcuguacgagaaccagaagcugaucgccaaccaguucaacagcgccaucggcaagauccaggacagccugagcagcacagcaagcgcccugggaaagcugcaggacguggucaaccagaaugcccaggcacugaacacccuggucaagcagcuguccuccaacuucggcgccaucagcucugugcugaacgauauccugagcagacuggacccuccugaggccgaggugcagaucgacagacugaucacaggcagacugcagagccuccagacauacgugacccagcagcugaucagagccgccgagauuagagccucugccaaucuggccgccaccaagaugucugagugugugcugggccagagcaagagaguggacuuuugcggcaagggcuaccaccugaugagcuucccucagucugccccucacggcgugguguuucugcacgugacauaugugcccgcucaagagaagaauuucaccaccgcuccagccaucugccacgacggcaaagcccacuuuccuagagaaggcguguucguguccaacggcacccauugguucgugacacagcggaacuucuacgagccccagaucaucaccaccgacaacaccuucgugucuggcaacugcgacguugugaucggcauugugaacaauaccguguacgacccucugcagcccgagcuggacagcuucaaagaggaacuggacaaguacuuuaagaaccacacaagccccgacguggaccugggcgauaucagcggaaucaaugccagcgucgugaacauccagaaagagaucgaccggcugaacgagguggccaagaaucugaacgagagccugaucgaccugcaagaacuggggaaguacgagcaguacaucaaguggcccugguacaucuggcugggcuuuaucgccggacugauugccaucgugauggucacaaucaugcuguguugcaugaccagcugcuguagcugccugaagggcuguuguagcuguggcagcugcugcaaguucgacgaggacgauucugagcccgugcugaagggcgugaaacugcacuacaccugaggacuaguuauaagacugacuagcccgaugggccucccaacgggcccuccuccccuccuugcaccgagauuaauagaucuaaaaaaaaaaaaaaaaaaaaaaaaaaaaaaaaaaaaaaaaaaaaaaaaaaaaaaaaaaaaaaaaaaaaaaaaaaaaaaaaaaaaaaaaaaaaaaaaaaaa

SEQ ID NO: 25794 - RNA, 4017 nt, Artificial Sequence
  SARS-CoV-2/Wuhan/WIV05/2019__EPI_ISL_402128 spike protein mRNA gc mod (1-1273)(K986P_V987P_N501Y_D614G)
aggagaaagcuuaccauguucguguuucuggugcugcugccccugguguccagccagugugugaaccugaccaccagaacacagcugccuccagccuacaccaacagcuucaccagaggcguguacuaccccgacaagguguucagauccagcgugcugcacucuacccaggaccuguuccugccuuucuucagcaacgugaccugguuccacgccauccacguguccggcaccaauggcaccaagagauucgacaaccccgugcugcccuucaacgacgggguguacuuugccagcaccgagaaguccaacaucaucagaggcuggaucuucggcaccacacuggacagcaagacccagagccugcugaucgugaacaacgccaccaacguggucaucaaagugugcgaguuccaguucugcaacgaccccuuccugggcgucuacuaccacaagaacaacaagagcuggauggaaagcgaguuccggguguacagcagcgccaacaacugcaccuucgaguacgugucccagccuuuccugauggaccuggaaggcaagcagggcaacuucaagaaccugcgcgaguucguguucaagaacaucgacggcuacuucaaaaucuacagcaagcacaccccuaucaaccucgugcgggaucugccucagggcuucucugcucuggaaccccugguggaucugcccaucggcaucaacaucacccgguuucagacacugcuggcccugcacagaagcuaccugacaccuggcgauagcagcagcggauggacagcuggugccgccgcuuacuaugugggcuaccugcagccuagaaccuuccugcugaaguacaacgagaacggcaccaucaccgacgccguggauugugcucuggauccucugagcgagacaaagugcacccugaaguccuucaccguggaaaagggcaucuaccagaccagcaacuuccgggugcagcccaccgaauccaucgugcgguuccccaauaucaccaaucugugccccuucggcgagguguucaaugccaccagauucgccucuguguacgccuggaaccggaagcggaucagcaauugcguggccgacuacuccgugcuguacaacuccgccagcuucagcaccuucaagugcuacggcguguccccuaccaagcugaacgaccugugcuucacaaacguguacgccgacagcuucgugauccggggagaugaagugcggcagauugccccuggacagacaggcaagaucgccgacuacaacuacaagcugcccgacgacuucaccggcugugugauugccuggaacagcaacaaccuggacuccaaagucggcggcaacuacaauuaccuguaccggcuguuccggaaguccaaucugaagcccuucgagcgggacaucagcaccgaaaucuaucaggccggcagcaccccuugcaacggcguggaaggcuucaacugcuacuucccacugcaguccuacggcuuucagcccacauacggcgugggcuaucagcccuacagagugguggugcugagcuucgaacugcugcaugcuccugccacagugugcggcccuaagaaaagcaccaaucucgugaagaacaaaugcgugaacuucaacuucaacggccugaccggcaccggcgugcugacagagagcaacaagaaguuccugccauuccagcaguuuggccgggauaucgccgauaccacagacgccguuagagauccccagacacuggaaauccuggacaucaccccaugcagcuucggcggagugucugugaucaccccuggcaccaacaccagcaaucagguggcagugcuguaccagggcgugaacuguaccgaagugcccguggccauucacgccgaucagcugacaccuacauggcggguguacuccaccggcagcaauguguuucagaccagagccggcugucugaucggagccgagcacgugaacaauagcuacgagugcgacauccccaucggcgcuggcaucugugccagcuaccagacacagacaaacagccccagacgggcuagaagcguggccagccagagcaucauugccuacacaaugucucugggcgccgagaacagcguggccuacuccaacaacucuaucgcuauccccaccaacuucaccaucagcgugaccaccgagauccugccuguguccaugaccaagaccagcguggacugcaccauguacaucugcggcgauuccaccgagugcuccaaccugcugcugcaguacggcagcuucugcacccagcugaauagagcccugacagggaucgccguggaacaggacaagaacacccaagagguguucgcccaagugaagcaaaucuacaagaccccuccuaucaaggacuucggcggcuucaauuucagccagauucugcccgauccuagcaagcccagcaagcggagcuucaucgaggaccugcuguucaacaaagugacacuggccgacgccggcuucaucaagcaguauggcgauugucugggcgacauugccgccagggaucugauuugcgcccagaaguuuaacggacugacagugcugccuccucugcugaccgaugagaugaucgcccaguacacaucugcccugcuggccggcacaaucacaagcggcuggacauuuggagcuggcgccgcucugcagauccccuuugcuaugcagauggccuaccgguucaacggcaucggagugacccagaaugugcuguacgagaaccagaagcugaucgccaaccaguucaacagcgccaucggcaagauccaggacagccugagcagcacagcaagcgcccugggaaagcugcaggacguggucaaccagaaugcccaggcacugaacacccuggucaagcagcuguccuccaacuucggcgccaucagcucugugcugaacgauauccugagcagacuggacccuccugaggccgaggugcagaucgacagacugaucacaggcagacugcagagccuccagacauacgugacccagcagcugaucagagccgccgagauuagagccucugccaaucuggccgccaccaagaugucugagugugugcugggccagagcaagagaguggacuuuugcggcaagggcuaccaccugaugagcuucccucagucugccccucacggcgugguguuucugcacgugacauaugugcccgcucaagagaagaauuucaccaccgcuccagccaucugccacgacggcaaagcccacuuuccuagagaaggcguguucguguccaacggcacccauugguucgugacacagcggaacuucuacgagccccagaucaucaccaccgacaacaccuucgugucuggcaacugcgacguugugaucggcauugugaacaauaccguguacgacccucugcagcccgagcuggacagcuucaaagaggaacuggacaaguacuuuaagaaccacacaagccccgacguggaccugggcgauaucagcggaaucaaugccagcgucgugaacauccagaaagagaucgaccggcugaacgagguggccaagaaucugaacgagagccugaucgaccugcaagaacuggggaaguacgagcaguacaucaaguggcccugguacaucuggcugggcuuuaucgccggacugauugccaucgugauggucacaaucaugcuguguugcaugaccagcugcuguagcugccugaagggcuguuguagcuguggcagcugcugcaaguucgacgaggacgauucugagcccgugcugaagggcgugaaacugcacuacaccugaggacuaguuauaagacugacuagcccgaugggccucccaacgggcccuccuccccuccuugcaccgagauuaauagaucuaaaaaaaaaaaaaaaaaaaaaaaaaaaaaaaaaaaaaaaaaaaaaaaaaaaaaaaaaaaaaaaaaaaaaaaaaaaaaaaaaaaaaaaaaaaaaaaaaaaa

SEQ ID NO: 25795 - RNA, 4011 nt, Artificial Sequence
  SARS-CoV-2/Wuhan/WIV05/2019__EPI_ISL_402128 spike protein mRNA gc mod (1-1273)(K986P_V987P_H69del_V70del_D614G)
aggagaaagcuuaccauguucguguuucuggugcugcugccccugguguccagccagugugugaaccugaccaccagaacacagcugccuccagccuacaccaacagcuucaccagaggcguguacuaccccgacaagguguucagauccagcgugcugcacucuacccaggaccuguuccugccuuucuucagcaacgugaccugguuccacgccaucuccggcaccaauggcaccaagagauucgacaaccccgugcugcccuucaacgacgggguguacuuugccagcaccgagaaguccaacaucaucagaggcuggaucuucggcaccacacuggacagcaagacccagagccugcugaucgugaacaacgccaccaacguggucaucaaagugugcgaguuccaguucugcaacgaccccuuccugggcgucuacuaccacaagaacaacaagagcuggauggaaagcgaguuccggguguacagcagcgccaacaacugcaccuucgaguacgugucccagccuuuccugauggaccuggaaggcaagcagggcaacuucaagaaccugcgcgaguucguguucaagaacaucgacggcuacuucaaaaucuacagcaagcacaccccuaucaaccucgugcgggaucugccucagggcuucucugcucuggaaccccugguggaucugcccaucggcaucaacaucacccgguuucagacacugcuggcccugcacagaagcuaccugacaccuggcgauagcagcagcggauggacagcuggugccgccgcuuacuaugugggcuaccugcagccuagaaccuuccugcugaaguacaacgagaacggcaccaucaccgacgccguggauugugcucuggauccucugagcgagacaaagugcacccugaaguccuucaccguggaaaagggcaucuaccagaccagcaacuuccgggugcagcccaccgaauccaucgugcgguuccccaauaucaccaaucugugccccuucggcgagguguucaaugccaccagauucgccucuguguacgccuggaaccggaagcggaucagcaauugcguggccgacuacuccgugcuguacaacuccgccagcuucagcaccuucaagugcuacggcguguccccuaccaagcugaacgaccugugcuucacaaacguguacgccgacagcuucgugauccggggagaugaagugcggcagauugccccuggacagacaggcaagaucgccgacuacaacuacaagcugcccgacgacuucaccggcugugugauugccuggaacagcaacaaccuggacuccaaagucggcggcaacuacaauuaccuguaccggcuguuccggaaguccaaucugaagcccuucgagcgggacaucagcaccgaaaucuaucaggccggcagcaccccuugcaacggcguggaaggcuucaacugcuacuucccacugcaguccuacggcuuucagcccacaaauggcgugggcuaucagcccuacagagugguggugcugagcuucgaacugcugcaugcuccugccacagugugcggcccuaagaaaagcaccaaucucgugaagaacaaaugcgugaacuucaacuucaacggccugaccggcaccggcgugcugacagagagcaacaagaaguuccugccauuccagcaguuuggccgggauaucgccgauaccacagacgccguuagagauccccagacacuggaaauccuggacaucaccccaugcagcuucggcggagugucugugaucaccccuggcaccaacaccagcaaucagguggcagugcuguaccagggcgugaacuguaccgaagugcccguggccauucacgccgaucagcugacaccuacauggcggguguacuccaccggcagcaauguguuucagaccagagccggcugucugaucggagccgagcacgugaacaauagcuacgagugcgacauccccaucggcgcuggcaucugugccagcuaccagacacagacaaacagccccagacgggcuagaagcguggccagccagagcaucauugccuacacaaugucucugggcgccgagaacagcguggccuacuccaacaacucuaucgcuauccccaccaacuucaccaucagcgugaccaccgagauccugccuguguccaugaccaagaccagcguggacugcaccauguacaucugcggcgauuccaccgagugcuccaaccugcugcugcaguacggcagcuucugcacccagcugaauagagcccugacagggaucgccguggaacaggacaagaacacccaagagguguucgcccaagugaagcaaaucuacaagaccccuccuaucaaggacuucggcggcuucaauuucagccagauucugcccgauccuagcaagcccagcaagcggagcuucaucgaggaccugcuguucaacaaagugacacuggccgacgccggcuucaucaagcaguauggcgauugucugggcgacauugccgccagggaucugauuugcgcccagaaguuuaacggacugacagugcugccuccucugcugaccgaugagaugaucgcccaguacacaucugcccugcuggccggcacaaucacaagcggcuggacauuuggagcuggcgccgcucugcagauccccuuugcuaugcagauggccuaccgguucaacggcaucggagugacccagaaugugcuguacgagaaccagaagcugaucgccaaccaguucaacagcgccaucggcaagauccaggacagccugagcagcacagcaagcgcccugggaaagcugcaggacguggucaaccagaaugcccaggcacugaacacccuggucaagcagcuguccuccaacuucggcgccaucagcucugugcugaacgauauccugagcagacuggacccuccugaggccgaggugcagaucgacagacugaucacaggcagacugcagagccuccagacauacgugacccagcagcugaucagagccgccgagauuagagccucugccaaucuggccgccaccaagaugucugagugugugcugggccagagcaagagaguggacuuuugcggcaagggcuaccaccugaugagcuucccucagucugccccucacggcgugguguuucugcacgugacauaugugcccgcucaagagaagaauuucaccaccgcuccagccaucugccacgacggcaaagcccacuuuccuagagaaggcguguucguguccaacggcacccauugguucgugacacagcggaacuucuacgagccccagaucaucaccaccgacaacaccuucgugucuggcaacugcgacguugugaucggcauugugaacaauaccguguacgacccucugcagcccgagcuggacagcuucaaagaggaacuggacaaguacuuuaagaaccacacaagccccgacguggaccugggcgauaucagcggaaucaaugccagcgucgugaacauccagaaagagaucgaccggcugaacgagguggccaagaaucugaacgagagccugaucgaccugcaagaacuggggaaguacgagcaguacaucaaguggcccugguacaucuggcugggcuuuaucgccggacugauugccaucgugauggucacaaucaugcuguguugcaugaccagcugcuguagcugccugaagggcuguuguagcuguggcagcugcugcaaguucgacgaggacgauucugagcccgugcugaagggcgugaaacugcacuacaccugaggacuaguuauaagacugacuagcccgaugggccucccaacgggcccuccuccccuccuugcaccgagauuaauagaucuaaaaaaaaaaaaaaaaaaaaaaaaaaaaaaaaaaaaaaaaaaaaaaaaaaaaaaaaaaaaaaaaaaaaaaaaaaaaaaaaaaaaaaaaaaaaaaaaaaaa

SEQ ID NO: 25796 - RNA, 4017 nt, Artificial Sequence
  SARS-CoV-2/Wuhan/WIV05/2019__EPI_ISL_402128 spike protein mRNA gc mod (1-1273)(K986P_V987P_Y453F_D614G)
aggagaaagcuuaccauguucguguuucuggugcugcugccccugguguccagccagugugugaaccugaccaccagaacacagcugccuccagccuacaccaacagcuucaccagaggcguguacuaccccgacaagguguucagauccagcgugcugcacucuacccaggaccuguuccugccuuucuucagcaacgugaccugguuccacgccauccacguguccggcaccaauggcaccaagagauucgacaaccccgugcugcccuucaacgacgggguguacuuugccagcaccgagaaguccaacaucaucagaggcuggaucuucggcaccacacuggacagcaagacccagagccugcugaucgugaacaacgccaccaacguggucaucaaagugugcgaguuccaguucugcaacgaccccuuccugggcgucuacuaccacaagaacaacaagagcuggauggaaagcgaguuccggguguacagcagcgccaacaacugcaccuucgaguacgugucccagccuuuccugauggaccuggaaggcaagcagggcaacuucaagaaccugcgcgaguucguguucaagaacaucgacggcuacuucaaaaucuacagcaagcacaccccuaucaaccucgugcgggaucugccucagggcuucucugcucuggaaccccugguggaucugcccaucggcaucaacaucacccgguuucagacacugcuggcccugcacagaagcuaccugacaccuggcgauagcagcagcggauggacagcuggugccgccgcuuacuaugugggcuaccugcagccuagaaccuuccugcugaaguacaacgagaacggcaccaucaccgacgccguggauugugcucuggauccucugagcgagacaaagugcacccugaaguccuucaccguggaaaagggcaucuaccagaccagcaacuuccgggugcagcccaccgaauccaucgugcgguuccccaauaucaccaaucugugccccuucggcgagguguucaaugccaccagauucgccucuguguacgccuggaaccggaagcggaucagcaauugcguggccgacuacuccgugcuguacaacuccgccagcuucagcaccuucaagugcuacggcguguccccuaccaagcugaacgaccugugcuucacaaacguguacgccgacagcuucgugauccggggagaugaagugcggcagauugccccuggacagacaggcaagaucgccgacuacaacuacaagcugcccgacgacuucaccggcugugugauugccuggaacagcaacaaccuggacuccaaagucggcggcaacuacaauuaccuguuccggcuguuccggaaguccaaucugaagcccuucgagcgggacaucagcaccgaaaucuaucaggccggcagcaccccuugcaacggcguggaaggcuucaacugcuacuucccacugcaguccuacggcuuucagcccacaaauggcgugggcuaucagcccuacagagugguggugcugagcuucgaacugcugcaugcuccugccacagugugcggcccuaagaaaagcaccaaucucgugaagaacaaaugcgugaacuucaacuucaacggccugaccggcaccggcgugcugacagagagcaacaagaaguuccugccauuccagcaguuuggccgggauaucgccgauaccacagacgccguuagagauccccagacacuggaaauccuggacaucaccccaugcagcuucggcggagugucugugaucaccccuggcaccaacaccagcaaucagguggcagugcuguaccagggcgugaacuguaccgaagugcccguggccauucacgccgaucagcugacaccuacauggcggguguacuccaccggcagcaauguguuucagaccagagccggcugucugaucggagccgagcacgugaacaauagcuacgagugcgacauccccaucggcgcuggcaucugugccagcuaccagacacagacaaacagccccagacgggcuagaagcguggccagccagagcaucauugccuacacaaugucucugggcgccgagaacagcguggccuacuccaacaacucuaucgcuauccccaccaacuucaccaucagcgugaccaccgagauccugccuguguccaugaccaagaccagcguggacugcaccauguacaucugcggcgauuccaccgagugcuccaaccugcugcugcaguacggcagcuucugcacccagcugaauagagcccugacagggaucgccguggaacaggacaagaacacccaagagguguucgcccaagugaagcaaaucuacaagaccccuccuaucaaggacuucggcggcuucaauuucagccagauucugcccgauccuagcaagcccagcaagcggagcuucaucgaggaccugcuguucaacaaagugacacuggccgacgccggcuucaucaagcaguauggcgauugucugggcgacauugccgccagggaucugauuugcgcccagaaguuuaacggacugacagugcugccuccucugcugaccgaugagaugaucgcccaguacacaucugcccugcuggccggcacaaucacaagcggcuggacauuuggagcuggcgccgcucugcagauccccuuugcuaugcagauggccuaccgguucaacggcaucggagugacccagaaugugcuguacgagaaccagaagcugaucgccaaccaguucaacagcgccaucggcaagauccaggacagccugagcagcacagcaagcgcccugggaaagcugcaggacguggucaaccagaaugcccaggcacugaacacccuggucaagcagcuguccuccaacuucggcgccaucagcucugugcugaacgauauccugagcagacuggacccuccugaggccgaggugcagaucgacagacugaucacaggcagacugcagagccuccagacauacgugacccagcagcugaucagagccgccgagauuagagccucugccaaucuggccgccaccaagaugucugagugugugcugggccagagcaagagaguggacuuuugcggcaagggcuaccaccugaugagcuucccucagucugccccucacggcgugguguuucugcacgugacauaugugcccgcucaagagaagaauuucaccaccgcuccagccaucugccacgacggcaaagcccacuuuccuagagaaggcguguucguguccaacggcacccauugguucgugacacagcggaacuucuacgagccccagaucaucaccaccgacaacaccuucgugucuggcaacugcgacguugugaucggcauugugaacaauaccguguacgacccucugcagcccgagcuggacagcuucaaagaggaacuggacaaguacuuuaagaaccacacaagccccgacguggaccugggcgauaucagcggaaucaaugccagcgucgugaacauccagaaagagaucgaccggcugaacgagguggccaagaaucugaacgagagccugaucgaccugcaagaacuggggaaguacgagcaguacaucaaguggcccugguacaucuggcugggcuuuaucgccggacugauugccaucgugauggucacaaucaugcuguguugcaugaccagcugcuguagcugccugaagggcuguuguagcuguggcagcugcugcaaguucgacgaggacgauucugagcccgugcugaagggcgugaaacugcacuacaccugaggacuaguuauaagacugacuagcccgaugggccucccaacgggcccuccuccccuccuugcaccgagauuaauagaucuaaaaaaaaaaaaaaaaaaaaaaaaaaaaaaaaaaaaaaaaaaaaaaaaaaaaaaaaaaaaaaaaaaaaaaaaaaaaaaaaaaaaaaaaaaaaaaaaaaaa

SEQ ID NO: 25797 - RNA, 4017 nt, Artificial Sequence
  SARS-CoV-2/Wuhan/WIV05/2019__EPI_ISL_402128 spike protein mRNA gc mod (1-1273)(K986P_V987P_D614G_I692V)
aggagaaagcuuaccauguucguguuucuggugcugcugccccugguguccagccagugugugaaccugaccaccagaacacagcugccuccagccuacaccaacagcuucaccagaggcguguacuaccccgacaagguguucagauccagcgugcugcacucuacccaggaccuguuccugccuuucuucagcaacgugaccugguuccacgccauccacguguccggcaccaauggcaccaagagauucgacaaccccgugcugcccuucaacgacgggguguacuuugccagcaccgagaaguccaacaucaucagaggcuggaucuucggcaccacacuggacagcaagacccagagccugcugaucgugaacaacgccaccaacguggucaucaaagugugcgaguuccaguucugcaacgaccccuuccugggcgucuacuaccacaagaacaacaagagcuggauggaaagcgaguuccggguguacagcagcgccaacaacugcaccuucgaguacgugucccagccuuuccugauggaccuggaaggcaagcagggcaacuucaagaaccugcgcgaguucguguucaagaacaucgacggcuacuucaaaaucuacagcaagcacaccccuaucaaccucgugcgggaucugccucagggcuucucugcucuggaaccccugguggaucugcccaucggcaucaacaucacccgguuucagacacugcuggcccugcacagaagcuaccugacaccuggcgauagcagcagcggauggacagcuggugccgccgcuuacuaugugggcuaccugcagccuagaaccuuccugcugaaguacaacgagaacggcaccaucaccgacgccguggauugugcucuggauccucugagcgagacaaagugcacccugaaguccuucaccguggaaaagggcaucuaccagaccagcaacuuccgggugcagcccaccgaauccaucgugcgguuccccaauaucaccaaucugugccccuucggcgagguguucaaugccaccagauucgccucuguguacgccuggaaccggaagcggaucagcaauugcguggccgacuacuccgugcuguacaacuccgccagcuucagcaccuucaagugcuacggcguguccccuaccaagcugaacgaccugugcuucacaaacguguacgccgacagcuucgugauccggggagaugaagugcggcagauugccccuggacagacaggcaagaucgccgacuacaacuacaagcugcccgacgacuucaccggcugugugauugccuggaacagcaacaaccuggacuccaaagucggcggcaacuacaauuaccuguaccggcuguuccggaaguccaaucugaagcccuucgagcgggacaucagcaccgaaaucuaucaggccggcagcaccccuugcaacggcguggaaggcuucaacugcuacuucccacugcaguccuacggcuuucagcccacaaauggcgugggcuaucagcccuacagagugguggugcugagcuucgaacugcugcaugcuccugccacagugugcggcccuaagaaaagcaccaaucucgugaagaacaaaugcgugaacuucaacuucaacggccugaccggcaccggcgugcugacagagagcaacaagaaguuccugccauuccagcaguuuggccgggauaucgccgauaccacagacgccguuagagauccccagacacuggaaauccuggacaucaccccaugcagcuucggcggagugucugugaucaccccuggcaccaacaccagcaaucagguggcagugcuguaccagggcgugaacuguaccgaagugcccguggccauucacgccgaucagcugacaccuacauggcggguguacuccaccggcagcaauguguuucagaccagagccggcugucugaucggagccgagcacgugaacaauagcuacgagugcgacauccccaucggcgcuggcaucugugccagcuaccagacacagacaaacagccccagacgggcuagaagcguggccagccagagcgugauugccuacacaaugucucugggcgccgagaacagcguggccuacuccaacaacucuaucgcuauccccaccaacuucaccaucagcgugaccaccgagauccugccuguguccaugaccaagaccagcguggacugcaccauguacaucugcggcgauuccaccgagugcuccaaccugcugcugcaguacggcagcuucugcacccagcugaauagagcccugacagggaucgccguggaacaggacaagaacacccaagagguguucgcccaagugaagcaaaucuacaagaccccuccuaucaaggacuucggcggcuucaauuucagccagauucugcccgauccuagcaagcccagcaagcggagcuucaucgaggaccugcuguucaacaaagugacacuggccgacgccggcuucaucaagcaguauggcgauugucugggcgacauugccgccagggaucugauuugcgcccagaaguuuaacggacugacagugcugccuccucugcugaccgaugagaugaucgcccaguacacaucugcccugcuggccggcacaaucacaagcggcuggacauuuggagcuggcgccgcucugcagauccccuuugcuaugcagauggccuaccgguucaacggcaucggagugacccagaaugugcuguacgagaaccagaagcugaucgccaaccaguucaacagcgccaucggcaagauccaggacagccugagcagcacagcaagcgcccugggaaagcugcaggacguggucaaccagaaugcccaggcacugaacacccuggucaagcagcuguccuccaacuucggcgccaucagcucugugcugaacgauauccugagcagacuggacccuccugaggccgaggugcagaucgacagacugaucacaggcagacugcagagccuccagacauacgugacccagcagcugaucagagccgccgagauuagagccucugccaaucuggccgccaccaagaugucugagugugugcugggccagagcaagagaguggacuuuugcggcaagggcuaccaccugaugagcuucccucagucugccccucacggcgugguguuucugcacgugacauaugugcccgcucaagagaagaauuucaccaccgcuccagccaucugccacgacggcaaagcccacuuuccuagagaaggcguguucguguccaacggcacccauugguucgugacacagcggaacuucuacgagccccagaucaucaccaccgacaacaccuucgugucuggcaacugcgacguugugaucggcauugugaacaauaccguguacgacccucugcagcccgagcuggacagcuucaaagaggaacuggacaaguacuuuaagaaccacacaagccccgacguggaccugggcgauaucagcggaaucaaugccagcgucgugaacauccagaaagagaucgaccggcugaacgagguggccaagaaucugaacgagagccugaucgaccugcaagaacuggggaaguacgagcaguacaucaaguggcccugguacaucuggcugggcuuuaucgccggacugauugccaucgugauggucacaaucaugcuguguugcaugaccagcugcuguagcugccugaagggcuguuguagcuguggcagcugcugcaaguucgacgaggacgauucugagcccgugcugaagggcgugaaacugcacuacaccugaggacuaguuauaagacugacuagcccgaugggccucccaacgggcccuccuccccuccuugcaccgagauuaauagaucuaaaaaaaaaaaaaaaaaaaaaaaaaaaaaaaaaaaaaaaaaaaaaaaaaaaaaaaaaaaaaaaaaaaaaaaaaaaaaaaaaaaaaaaaaaaaaaaaaaaa

SEQ ID NO: 25798 - RNA, 4017 nt, Artificial Sequence
  SARS-CoV-2/Wuhan/WIV05/2019__EPI_ISL_402128 spike protein mRNA gc mod (1-1273)(K986P_V987P_D614G_M1229I)
aggagaaagcuuaccauguucguguuucuggugcugcugccccugguguccagccagugugugaaccugaccaccagaacacagcugccuccagccuacaccaacagcuucaccagaggcguguacuaccccgacaagguguucagauccagcgugcugcacucuacccaggaccuguuccugccuuucuucagcaacgugaccugguuccacgccauccacguguccggcaccaauggcaccaagagauucgacaaccccgugcugcccuucaacgacgggguguacuuugccagcaccgagaaguccaacaucaucagaggcuggaucuucggcaccacacuggacagcaagacccagagccugcugaucgugaacaacgccaccaacguggucaucaaagugugcgaguuccaguucugcaacgaccccuuccugggcgucuacuaccacaagaacaacaagagcuggauggaaagcgaguuccggguguacagcagcgccaacaacugcaccuucgaguacgugucccagccuuuccugauggaccuggaaggcaagcagggcaacuucaagaaccugcgcgaguucguguucaagaacaucgacggcuacuucaaaaucuacagcaagcacaccccuaucaaccucgugcgggaucugccucagggcuucucugcucuggaaccccugguggaucugcccaucggcaucaacaucacccgguuucagacacugcuggcccugcacagaagcuaccugacaccuggcgauagcagcagcggauggacagcuggugccgccgcuuacuaugugggcuaccugcagccuagaaccuuccugcugaaguacaacgagaacggcaccaucaccgacgccguggauugugcucuggauccucugagcgagacaaagugcacccugaaguccuucaccguggaaaagggcaucuaccagaccagcaacuuccgggugcagcccaccgaauccaucgugcgguuccccaauaucaccaaucugugccccuucggcgagguguucaaugccaccagauucgccucuguguacgccuggaaccggaagcggaucagcaauugcguggccgacuacuccgugcuguacaacuccgccagcuucagcaccuucaagugcuacggcguguccccuaccaagcugaacgaccugugcuucacaaacguguacgccgacagcuucgugauccggggagaugaagugcggcagauugccccuggacagacaggcaagaucgccgacuacaacuacaagcugcccgacgacuucaccggcugugugauugccuggaacagcaacaaccuggacuccaaagucggcggcaacuacaauuaccuguaccggcuguuccggaaguccaaucugaagcccuucgagcgggacaucagcaccgaaaucuaucaggccggcagcaccccuugcaacggcguggaaggcuucaacugcuacuucccacugcaguccuacggcuuucagcccacaaauggcgugggcuaucagcccuacagagugguggugcugagcuucgaacugcugcaugcuccugccacagugugcggcccuaagaaaagcaccaaucucgugaagaacaaaugcgugaacuucaacuucaacggccugaccggcaccggcgugcugacagagagcaacaagaaguuccugccauuccagcaguuuggccgggauaucgccgauaccacagacgccguuagagauccccagacacuggaaauccuggacaucaccccaugcagcuucggcggagugucugugaucaccccuggcaccaacaccagcaaucagguggcagugcuguaccagggcgugaacuguaccgaagugcccguggccauucacgccgaucagcugacaccuacauggcggguguacuccaccggcagcaauguguuucagaccagagccggcugucugaucggagccgagcacgugaacaauagcuacgagugcgacauccccaucggcgcuggcaucugugccagcuaccagacacagacaaacagccccagacgggcuagaagcguggccagccagagcaucauugccuacacaaugucucugggcgccgagaacagcguggccuacuccaacaacucuaucgcuauccccaccaacuucaccaucagcgugaccaccgagauccugccuguguccaugaccaagaccagcguggacugcaccauguacaucugcggcgauuccaccgagugcuccaaccugcugcugcaguacggcagcuucugcacccagcugaauagagcccugacagggaucgccguggaacaggacaagaacacccaagagguguucgcccaagugaagcaaaucuacaagaccccuccuaucaaggacuucggcggcuucaauuucagccagauucugcccgauccuagcaagcccagcaagcggagcuucaucgaggaccugcuguucaacaaagugacacuggccgacgccggcuucaucaagcaguauggcgauugucugggcgacauugccgccagggaucugauuugcgcccagaaguuuaacggacugacagugcugccuccucugcugaccgaugagaugaucgcccaguacacaucugcccugcuggccggcacaaucacaagcggcuggacauuuggagcuggcgccgcucugcagauccccuuugcuaugcagauggccuaccgguucaacggcaucggagugacccagaaugugcuguacgagaaccagaagcugaucgccaaccaguucaacagcgccaucggcaagauccaggacagccugagcagcacagcaagcgcccugggaaagcugcaggacguggucaaccagaaugcccaggcacugaacacccuggucaagcagcuguccuccaacuucggcgccaucagcucugugcugaacgauauccugagcagacuggacccuccugaggccgaggugcagaucgacagacugaucacaggcagacugcagagccuccagacauacgugacccagcagcugaucagagccgccgagauuagagccucugccaaucuggccgccaccaagaugucugagugugugcugggccagagcaagagaguggacuuuugcggcaagggcuaccaccugaugagcuucccucagucugccccucacggcgugguguuucugcacgugacauaugugcccgcucaagagaagaauuucaccaccgcuccagccaucugccacgacggcaaagcccacuuuccuagagaaggcguguucguguccaacggcacccauugguucgugacacagcggaacuucuacgagccccagaucaucaccaccgacaacaccuucgugucuggcaacugcgacguugugaucggcauugugaacaauaccguguacgacccucugcagcccgagcuggacagcuucaaagaggaacuggacaaguacuuuaagaaccacacaagccccgacguggaccugggcgauaucagcggaaucaaugccagcgucgugaacauccagaaagagaucgaccggcugaacgagguggccaagaaucugaacgagagccugaucgaccugcaagaacuggggaaguacgagcaguacaucaaguggcccugguacaucuggcugggcuuuaucgccggacugauugccaucgugaucgucacaaucaugcuguguugcaugaccagcugcuguagcugccugaagggcuguuguagcuguggcagcugcugcaaguucgacgaggacgauucugagcccgugcugaagggcgugaaacugcacuacaccugaggacuaguuauaagacugacuagcccgaugggccucccaacgggcccuccuccccuccuugcaccgagauuaauagaucuaaaaaaaaaaaaaaaaaaaaaaaaaaaaaaaaaaaaaaaaaaaaaaaaaaaaaaaaaaaaaaaaaaaaaaaaaaaaaaaaaaaaaaaaaaaaaaaaaaaa

SEQ ID NO: 25799 - RNA, 4011 nt, Artificial Sequence
  SARS-CoV-2/Wuhan/WIV05/2019__EPI_ISL_402128 spike protein mRNA gc mod (1-1273)(K986P_V987P_H69del_V70del_A222V_Y453F_S477N_D614G_I692V)
aggagaaagcuuaccauguucguguuucuggugcugcugccccugguguccagccagugugugaaccugaccaccagaacacagcugccuccagccuacaccaacagcuucaccagaggcguguacuaccccgacaagguguucagauccagcgugcugcacucuacccaggaccuguuccugccuuucuucagcaacgugaccugguuccacgccaucuccggcaccaauggcaccaagagauucgacaaccccgugcugcccuucaacgacgggguguacuuugccagcaccgagaaguccaacaucaucagaggcuggaucuucggcaccacacuggacagcaagacccagagccugcugaucgugaacaacgccaccaacguggucaucaaagugugcgaguuccaguucugcaacgaccccuuccugggcgucuacuaccacaagaacaacaagagcuggauggaaagcgaguuccggguguacagcagcgccaacaacugcaccuucgaguacgugucccagccuuuccugauggaccuggaaggcaagcagggcaacuucaagaaccugcgcgaguucguguucaagaacaucgacggcuacuucaaaaucuacagcaagcacaccccuaucaaccucgugcgggaucugccucagggcuucucugugcuggaaccccugguggaucugcccaucggcaucaacaucacccgguuucagacacugcuggcccugcacagaagcuaccugacaccuggcgauagcagcagcggauggacagcuggugccgccgcuuacuaugugggcuaccugcagccuagaaccuuccugcugaaguacaacgagaacggcaccaucaccgacgccguggauugugcucuggauccucugagcgagacaaagugcacccugaaguccuucaccguggaaaagggcaucuaccagaccagcaacuuccgggugcagcccaccgaauccaucgugcgguuccccaauaucaccaaucugugccccuucggcgagguguucaaugccaccagauucgccucuguguacgccuggaaccggaagcggaucagcaauugcguggccgacuacuccgugcuguacaacuccgccagcuucagcaccuucaagugcuacggcguguccccuaccaagcugaacgaccugugcuucacaaacguguacgccgacagcuucgugauccggggagaugaagugcggcagauugccccuggacagacaggcaagaucgccgacuacaacuacaagcugcccgacgacuucaccggcugugugauugccuggaacagcaacaaccuggacuccaaagucggcggcaacuacaauuaccuguuccggcuguuccggaaguccaaucugaagcccuucgagcgggacaucagcaccgaaaucuaucaggccggcaacaccccuugcaacggcguggaaggcuucaacugcuacuucccacugcaguccuacggcuuucagcccacaaauggcgugggcuaucagcccuacagagugguggugcugagcuucgaacugcugcaugcuccugccacagugugcggcccuaagaaaagcaccaaucucgugaagaacaaaugcgugaacuucaacuucaacggccugaccggcaccggcgugcugacagagagcaacaagaaguuccugccauuccagcaguuuggccgggauaucgccgauaccacagacgccguuagagauccccagacacuggaaauccuggacaucaccccaugcagcuucggcggagugucugugaucaccccuggcaccaacaccagcaaucagguggcagugcuguaccagggcgugaacuguaccgaagugcccguggccauucacgccgaucagcugacaccuacauggcggguguacuccaccggcagcaauguguuucagaccagagccggcugucugaucggagccgagcacgugaacaauagcuacgagugcgacauccccaucggcgcuggcaucugugccagcuaccagacacagacaaacagccccagacgggcuagaagcguggccagccagagcgugauugccuacacaaugucucugggcgccgagaacagcguggccuacuccaacaacucuaucgcuauccccaccaacuucaccaucagcgugaccaccgagauccugccuguguccaugaccaagaccagcguggacugcaccauguacaucugcggcgauuccaccgagugcuccaaccugcugcugcaguacggcagcuucugcacccagcugaauagagcccugacagggaucgccguggaacaggacaagaacacccaagagguguucgcccaagugaagcaaaucuacaagaccccuccuaucaaggacuucggcggcuucaauuucagccagauucugcccgauccuagcaagcccagcaagcggagcuucaucgaggaccugcuguucaacaaagugacacuggccgacgccggcuucaucaagcaguauggcgauugucugggcgacauugccgccagggaucugauuugcgcccagaaguuuaacggacugacagugcugccuccucugcugaccgaugagaugaucgcccaguacacaucugcccugcuggccggcacaaucacaagcggcuggacauuuggagcuggcgccgcucugcagauccccuuugcuaugcagauggccuaccgguucaacggcaucggagugacccagaaugugcuguacgagaaccagaagcugaucgccaaccaguucaacagcgccaucggcaagauccaggacagccugagcagcacagcaagcgcccugggaaagcugcaggacguggucaaccagaaugcccaggcacugaacacccuggucaagcagcuguccuccaacuucggcgccaucagcucugugcugaacgauauccugagcagacuggacccuccugaggccgaggugcagaucgacagacugaucacaggcagacugcagagccuccagacauacgugacccagcagcugaucagagccgccgagauuagagccucugccaaucuggccgccaccaagaugucugagugugugcugggccagagcaagagaguggacuuuugcggcaagggcuaccaccugaugagcuucccucagucugccccucacggcgugguguuucugcacgugacauaugugcccgcucaagagaagaauuucaccaccgcuccagccaucugccacgacggcaaagcccacuuuccuagagaaggcguguucguguccaacggcacccauugguucgugacacagcggaacuucuacgagccccagaucaucaccaccgacaacaccuucgugucuggcaacugcgacguugugaucggcauugugaacaauaccguguacgacccucugcagcccgagcuggacagcuucaaagaggaacuggacaaguacuuuaagaaccacacaagccccgacguggaccugggcgauaucagcggaaucaaugccagcgucgugaacauccagaaagagaucgaccggcugaacgagguggccaagaaucugaacgagagccugaucgaccugcaagaacuggggaaguacgagcaguacaucaaguggcccugguacaucuggcugggcuuuaucgccggacugauugccaucgugauggucacaaucaugcuguguugcaugaccagcugcuguagcugccugaagggcuguuguagcuguggcagcugcugcaaguucgacgaggacgauucugagcccgugcugaagggcgugaaacugcacuacaccugaggacuaguuauaagacugacuagcccgaugggccucccaacgggcccuccuccccuccuugcaccgagauuaauagaucuaaaaaaaaaaaaaaaaaaaaaaaaaaaaaaaaaaaaaaaaaaaaaaaaaaaaaaaaaaaaaaaaaaaaaaaaaaaaaaaaaaaaaaaaaaaaaaaaaaaa

SEQ ID NO: 25800 - RNA, 4011 nt, Artificial Sequence
  SARS-CoV-2/Wuhan/WIV05/2019__EPI_ISL_402128 spike protein mRNA gc mod (1-1273)(K986P_V987P_H69del_V70del_Y453F_D614G_I692V_M1229I)
aggagaaagcuuaccauguucguguuucuggugcugcugccccugguguccagccagugugugaaccugaccaccagaacacagcugccuccagccuacaccaacagcuucaccagaggcguguacuaccccgacaagguguucagauccagcgugcugcacucuacccaggaccuguuccugccuuucuucagcaacgugaccugguuccacgccaucuccggcaccaauggcaccaagagauucgacaaccccgugcugcccuucaacgacgggguguacuuugccagcaccgagaaguccaacaucaucagaggcuggaucuucggcaccacacuggacagcaagacccagagccugcugaucgugaacaacgccaccaacguggucaucaaagugugcgaguuccaguucugcaacgaccccuuccugggcgucuacuaccacaagaacaacaagagcuggauggaaagcgaguuccggguguacagcagcgccaacaacugcaccuucgaguacgugucccagccuuuccugauggaccuggaaggcaagcagggcaacuucaagaaccugcgcgaguucguguucaagaacaucgacggcuacuucaaaaucuacagcaagcacaccccuaucaaccucgugcgggaucugccucagggcuucucugcucuggaaccccugguggaucugcccaucggcaucaacaucacccgguuucagacacugcuggcccugcacagaagcuaccugacaccuggcgauagcagcagcggauggacagcuggugccgccgcuuacuaugugggcuaccugcagccuagaaccuuccugcugaaguacaacgagaacggcaccaucaccgacgccguggauugugcucuggauccucugagcgagacaaagugcacccugaaguccuucaccguggaaaagggcaucuaccagaccagcaacuuccgggugcagcccaccgaauccaucgugcgguuccccaauaucaccaaucugugccccuucggcgagguguucaaugccaccagauucgccucuguguacgccuggaaccggaagcggaucagcaauugcguggccgacuacuccgugcuguacaacuccgccagcuucagcaccuucaagugcuacggcguguccccuaccaagcugaacgaccugugcuucacaaacguguacgccgacagcuucgugauccggggagaugaagugcggcagauugccccuggacagacaggcaagaucgccgacuacaacuacaagcugcccgacgacuucaccggcugugugauugccuggaacagcaacaaccuggacuccaaagucggcggcaacuacaauuaccuguuccggcuguuccggaaguccaaucugaagcccuucgagcgggacaucagcaccgaaaucuaucaggccggcagcaccccuugcaacggcguggaaggcuucaacugcuacuucccacugcaguccuacggcuuucagcccacaaauggcgugggcuaucagcccuacagagugguggugcugagcuucgaacugcugcaugcuccugccacagugugcggcccuaagaaaagcaccaaucucgugaagaacaaaugcgugaacuucaacuucaacggccugaccggcaccggcgugcugacagagagcaacaagaaguuccugccauuccagcaguuuggccgggauaucgccgauaccacagacgccguuagagauccccagacacuggaaauccuggacaucaccccaugcagcuucggcggagugucugugaucaccccuggcaccaacaccagcaaucagguggcagugcuguaccagggcgugaacuguaccgaagugcccguggccauucacgccgaucagcugacaccuacauggcggguguacuccaccggcagcaauguguuucagaccagagccggcugucugaucggagccgagcacgugaacaauagcuacgagugcgacauccccaucggcgcuggcaucugugccagcuaccagacacagacaaacagccccagacgggcuagaagcguggccagccagagcgugauugccuacacaaugucucugggcgccgagaacagcguggccuacuccaacaacucuaucgcuauccccaccaacuucaccaucagcgugaccaccgagauccugccuguguccaugaccaagaccagcguggacugcaccauguacaucugcggcgauuccaccgagugcuccaaccugcugcugcaguacggcagcuucugcacccagcugaauagagcccugacagggaucgccguggaacaggacaagaacacccaagagguguucgcccaagugaagcaaaucuacaagaccccuccuaucaaggacuucggcggcuucaauuucagccagauucugcccgauccuagcaagcccagcaagcggagcuucaucgaggaccugcuguucaacaaagugacacuggccgacgccggcuucaucaagcaguauggcgauugucugggcgacauugccgccagggaucugauuugcgcccagaaguuuaacggacugacagugcugccuccucugcugaccgaugagaugaucgcccaguacacaucugcccugcuggccggcacaaucacaagcggcuggacauuuggagcuggcgccgcucugcagauccccuuugcuaugcagauggccuaccgguucaacggcaucggagugacccagaaugugcuguacgagaaccagaagcugaucgccaaccaguucaacagcgccaucggcaagauccaggacagccugagcagcacagcaagcgcccugggaaagcugcaggacguggucaaccagaaugcccaggcacugaacacccuggucaagcagcuguccuccaacuucggcgccaucagcucugugcugaacgauauccugagcagacuggacccuccugaggccgaggugcagaucgacagacugaucacaggcagacugcagagccuccagacauacgugacccagcagcugaucagagccgccgagauuagagccucugccaaucuggccgccaccaagaugucugagugugugcugggccagagcaagagaguggacuuuugcggcaagggcuaccaccugaugagcuucccucagucugccccucacggcgugguguuucugcacgugacauaugugcccgcucaagagaagaauuucaccaccgcuccagccaucugccacgacggcaaagcccacuuuccuagagaaggcguguucguguccaacggcacccauugguucgugacacagcggaacuucuacgagccccagaucaucaccaccgacaacaccuucgugucuggcaacugcgacguugugaucggcauugugaacaauaccguguacgacccucugcagcccgagcuggacagcuucaaagaggaacuggacaaguacuuuaagaaccacacaagccccgacguggaccugggcgauaucagcggaaucaaugccagcgucgugaacauccagaaagagaucgaccggcugaacgagguggccaagaaucugaacgagagccugaucgaccugcaagaacuggggaaguacgagcaguacaucaaguggcccugguacaucuggcugggcuuuaucgccggacugauugccaucgugaucgucacaaucaugcuguguugcaugaccagcugcuguagcugccugaagggcuguuguagcuguggcagcugcugcaaguucgacgaggacgauucugagcccgugcugaagggcgugaaacugcacuacaccugaggacuaguuauaagacugacuagcccgaugggccucccaacgggcccuccuccccuccuugcaccgagauuaauagaucuaaaaaaaaaaaaaaaaaaaaaaaaaaaaaaaaaaaaaaaaaaaaaaaaaaaaaaaaaaaaaaaaaaaaaaaaaaaaaaaaaaaaaaaaaaaaaaaaaaaa

SEQ ID NO: 25801 - RNA, 4008 nt, Artificial Sequence
  SARS-CoV-2/Wuhan/WIV05/2019__EPI_ISL_402128 spike protein mRNA gc mod (1-1273)(K986P_V987P_K986P_V987P_H69del_V70del_Y144del_N501Y_A570 D_D614G_P681H_T716I_S982A_D1118H)
aggagaaagcuuaccauguucguguuucuggugcugcugccccugguguccagccagugugugaaccugaccaccagaacacagcugccuccagccuacaccaacagcuucaccagaggcguguacuaccccgacaagguguucagauccagcgugcugcacucuacccaggaccuguuccugccuuucuucagcaacgugaccugguuccacgccaucuccggcaccaauggcaccaagagauucgacaaccccgugcugcccuucaacgacgggguguacuuugccagcaccgagaaguccaacaucaucagaggcuggaucuucggcaccacacuggacagcaagacccagagccugcugaucgugaacaacgccaccaacguggucaucaaagugugcgaguuccaguucugcaacgaccccuuccugggcgucuaccacaagaacaacaagagcuggauggaaagcgaguuccggguguacagcagcgccaacaacugcaccuucgaguacgugucccagccuuuccugauggaccuggaaggcaagcagggcaacuucaagaaccugcgcgaguucguguucaagaacaucgacggcuacuucaaaaucuacagcaagcacaccccuaucaaccucgugcgggaucugccucagggcuucucugcucuggaaccccugguggaucugcccaucggcaucaacaucacccgguuucagacacugcuggcccugcacagaagcuaccugacaccuggcgauagcagcagcggauggacagcuggugccgccgcuuacuaugugggcuaccugcagccuagaaccuuccugcugaaguacaacgagaacggcaccaucaccgacgccguggauugugcucuggauccucugagcgagacaaagugcacccugaaguccuucaccguggaaaagggcaucuaccagaccagcaacuuccgggugcagcccaccgaauccaucgugcgguuccccaauaucaccaaucugugccccuucggcgagguguucaaugccaccagauucgccucuguguacgccuggaaccggaagcggaucagcaauugcguggccgacuacuccgugcuguacaacuccgccagcuucagcaccuucaagugcuacggcguguccccuaccaagcugaacgaccugugcuucacaaacguguacgccgacagcuucgugauccggggagaugaagugcggcagauugccccuggacagacaggcaagaucgccgacuacaacuacaagcugcccgacgacuucaccggcugugugauugccuggaacagcaacaaccuggacuccaaagucggcggcaacuacaauuaccuguaccggcuguuccggaaguccaaucugaagcccuucgagcgggacaucagcaccgaaaucuaucaggccggcagcaccccuugcaacggcguggaaggcuucaacugcuacuucccacugcaguccuacggcuuucagcccacauacggcgugggcuaucagcccuacagagugguggugcugagcuucgaacugcugcaugcuccugccacagugugcggcccuaagaaaagcaccaaucucgugaagaacaaaugcgugaacuucaacuucaacggccugaccggcaccggcgugcugacagagagcaacaagaaguuccugccauuccagcaguuuggccgggauaucgacgauaccacagacgccguuagagauccccagacacuggaaauccuggacaucaccccaugcagcuucggcggagugucugugaucaccccuggcaccaacaccagcaaucagguggcagugcuguaccagggcgugaacuguaccgaagugcccguggccauucacgccgaucagcugacaccuacauggcggguguacuccaccggcagcaauguguuucagaccagagccggcugucugaucggagccgagcacgugaacaauagcuacgagugcgacauccccaucggcgcuggcaucugugccagcuaccagacacagacaaacagccacagacgggcuagaagcguggccagccagagcaucauugccuacacaaugucucugggcgccgagaacagcguggccuacuccaacaacucuaucgcuauccccaucaacuucaccaucagcgugaccaccgagauccugccuguguccaugaccaagaccagcguggacugcaccauguacaucugcggcgauuccaccgagugcuccaaccugcugcugcaguacggcagcuucugcacccagcugaauagagcccugacagggaucgccguggaacaggacaagaacacccaagagguguucgcccaagugaagcaaaucuacaagaccccuccuaucaaggacuucggcggcuucaauuucagccagauucugcccgauccuagcaagcccagcaagcggagcuucaucgaggaccugcuguucaacaaagugacacuggccgacgccggcuucaucaagcaguauggcgauugucugggcgacauugccgccagggaucugauuugcgcccagaaguuuaacggacugacagugcugccuccucugcugaccgaugagaugaucgcccaguacacaucugcccugcuggccggcacaaucacaagcggcuggacauuuggagcuggcgccgcucugcagauccccuuugcuaugcagauggccuaccgguucaacggcaucggagugacccagaaugugcuguacgagaaccagaagcugaucgccaaccaguucaacagcgccaucggcaagauccaggacagccugagcagcacagcaagcgcccugggaaagcugcaggacguggucaaccagaaugcccaggcacugaacacccuggucaagcagcuguccuccaacuucggcgccaucagcucugugcugaacgauauccuggccagacuggacccuccugaggccgaggugcagaucgacagacugaucacaggcagacugcagagccuccagacauacgugacccagcagcugaucagagccgccgagauuagagccucugccaaucuggccgccaccaagaugucugagugugugcugggccagagcaagagaguggacuuuugcggcaagggcuaccaccugaugagcuucccucagucugccccucacggcgugguguuucugcacgugacauaugugcccgcucaagagaagaauuucaccaccgcuccagccaucugccacgacggcaaagcccacuuuccuagagaaggcguguucguguccaacggcacccauugguucgugacacagcggaacuucuacgagccccagaucaucaccacccacaacaccuucgugucuggcaacugcgacguugugaucggcauugugaacaauaccguguacgacccucugcagcccgagcuggacagcuucaaagaggaacuggacaaguacuuuaagaaccacacaagccccgacguggaccugggcgauaucagcggaaucaaugccagcgucgugaacauccagaaagagaucgaccggcugaacgagguggccaagaaucugaacgagagccugaucgaccugcaagaacuggggaaguacgagcaguacaucaaguggcccugguacaucuggcugggcuuuaucgccggacugauugccaucgugauggucacaaucaugcuguguugcaugaccagcugcuguagcugccugaagggcuguuguagcuguggcagcugcugcaaguucgacgaggacgauucugagcccgugcugaagggcgugaaacugcacuacaccugaggacuaguuauaagacugacuagcccgaugggccucccaacgggcccuccuccccuccuugcaccgagauuaauagaucuaaaaaaaaaaaaaaaaaaaaaaaaaaaaaaaaaaaaaaaaaaaaaaaaaaaaaaaaaaaaaaaaaaaaaaaaaaaaaaaaaaaaaaaaaaaaaaaaaaaa

SEQ ID NO: 25802 - RNA, 4017 nt, Artificial Sequence
  SARS-CoV-2/Wuhan/WIV05/2019__EPI_ISL_402128 spike protein mRNA gc mod (1-1273)(K986P_V987P_K986P_V987P_K417N_E484K_N501Y_D614G)
aggagaaagcuuaccauguucguguuucuggugcugcugccccugguguccagccagugugugaaccugaccaccagaacacagcugccuccagccuacaccaacagcuucaccagaggcguguacuaccccgacaagguguucagauccagcgugcugcacucuacccaggaccuguuccugccuuucuucagcaacgugaccugguuccacgccauccacguguccggcaccaauggcaccaagagauucgacaaccccgugcugcccuucaacgacgggguguacuuugccagcaccgagaaguccaacaucaucagaggcuggaucuucggcaccacacuggacagcaagacccagagccugcugaucgugaacaacgccaccaacguggucaucaaagugugcgaguuccaguucugcaacgaccccuuccugggcgucuacuaccacaagaacaacaagagcuggauggaaagcgaguuccggguguacagcagcgccaacaacugcaccuucgaguacgugucccagccuuuccugauggaccuggaaggcaagcagggcaacuucaagaaccugcgcgaguucguguucaagaacaucgacggcuacuucaaaaucuacagcaagcacaccccuaucaaccucgugcgggaucugccucagggcuucucugcucuggaaccccugguggaucugcccaucggcaucaacaucacccgguuucagacacugcuggcccugcacagaagcuaccugacaccuggcgauagcagcagcggauggacagcuggugccgccgcuuacuaugugggcuaccugcagccuagaaccuuccugcugaaguacaacgagaacggcaccaucaccgacgccguggauugugcucuggauccucugagcgagacaaagugcacccugaaguccuucaccguggaaaagggcaucuaccagaccagcaacuuccgggugcagcccaccgaauccaucgugcgguuccccaauaucaccaaucugugccccuucggcgagguguucaaugccaccagauucgccucuguguacgccuggaaccggaagcggaucagcaauugcguggccgacuacuccgugcuguacaacuccgccagcuucagcaccuucaagugcuacggcguguccccuaccaagcugaacgaccugugcuucacaaacguguacgccgacagcuucgugauccggggagaugaagugcggcagauugccccuggacagacaggcaacaucgccgacuacaacuacaagcugcccgacgacuucaccggcugugugauugccuggaacagcaacaaccuggacuccaaagucggcggcaacuacaauuaccuguaccggcuguuccggaaguccaaucugaagcccuucgagcgggacaucagcaccgaaaucuaucaggccggcagcaccccuugcaacggcgugaagggcuucaacugcuacuucccacugcaguccuacggcuuucagcccacauacggcgugggcuaucagcccuacagagugguggugcugagcuucgaacugcugcaugcuccugccacagugugcggcccuaagaaaagcaccaaucucgugaagaacaaaugcgugaacuucaacuucaacggccugaccggcaccggcgugcugacagagagcaacaagaaguuccugccauuccagcaguuuggccgggauaucgccgauaccacagacgccguuagagauccccagacacuggaaauccuggacaucaccccaugcagcuucggcggagugucugugaucaccccuggcaccaacaccagcaaucagguggcagugcuguaccagggcgugaacuguaccgaagugcccguggccauucacgccgaucagcugacaccuacauggcggguguacuccaccggcagcaauguguuucagaccagagccggcugucugaucggagccgagcacgugaacaauagcuacgagugcgacauccccaucggcgcuggcaucugugccagcuaccagacacagacaaacagccccagacgggcuagaagcguggccagccagagcaucauugccuacacaaugucucugggcgccgagaacagcguggccuacuccaacaacucuaucgcuauccccaccaacuucaccaucagcgugaccaccgagauccugccuguguccaugaccaagaccagcguggacugcaccauguacaucugcggcgauuccaccgagugcuccaaccugcugcugcaguacggcagcuucugcacccagcugaauagagcccugacagggaucgccguggaacaggacaagaacacccaagagguguucgcccaagugaagcaaaucuacaagaccccuccuaucaaggacuucggcggcuucaauuucagccagauucugcccgauccuagcaagcccagcaagcggagcuucaucgaggaccugcuguucaacaaagugacacuggccgacgccggcuucaucaagcaguauggcgauugucugggcgacauugccgccagggaucugauuugcgcccagaaguuuaacggacugacagugcugccuccucugcugaccgaugagaugaucgcccaguacacaucugcccugcuggccggcacaaucacaagcggcuggacauuuggagcuggcgccgcucugcagauccccuuugcuaugcagauggccuaccgguucaacggcaucggagugacccagaaugugcuguacgagaaccagaagcugaucgccaaccaguucaacagcgccaucggcaagauccaggacagccugagcagcacagcaagcgcccugggaaagcugcaggacguggucaaccagaaugcccaggcacugaacacccuggucaagcagcuguccuccaacuucggcgccaucagcucugugcugaacgauauccugagcagacuggacccuccugaggccgaggugcagaucgacagacugaucacaggcagacugcagagccuccagacauacgugacccagcagcugaucagagccgccgagauuagagccucugccaaucuggccgccaccaagaugucugagugugugcugggccagagcaagagaguggacuuuugcggcaagggcuaccaccugaugagcuucccucagucugccccucacggcgugguguuucugcacgugacauaugugcccgcucaagagaagaauuucaccaccgcuccagccaucugccacgacggcaaagcccacuuuccuagagaaggcguguucguguccaacggcacccauugguucgugacacagcggaacuucuacgagccccagaucaucaccaccgacaacaccuucgugucuggcaacugcgacguugugaucggcauugugaacaauaccguguacgacccucugcagcccgagcuggacagcuucaaagaggaacuggacaaguacuuuaagaaccacacaagccccgacguggaccugggcgauaucagcggaaucaaugccagcgucgugaacauccagaaagagaucgaccggcugaacgagguggccaagaaucugaacgagagccugaucgaccugcaagaacuggggaaguacgagcaguacaucaaguggcccugguacaucuggcugggcuuuaucgccggacugauugccaucgugauggucacaaucaugcuguguugcaugaccagcugcuguagcugccugaagggcuguuguagcuguggcagcugcugcaaguucgacgaggacgauucugagcccgugcugaagggcgugaaacugcacuacaccugaggacuaguuauaagacugacuagcccgaugggccucccaacgggcccuccuccccuccuugcaccgagauuaauagaucuaaaaaaaaaaaaaaaaaaaaaaaaaaaaaaaaaaaaaaaaaaaaaaaaaaaaaaaaaaaaaaaaaaaaaaaaaaaaaaaaaaaaaaaaaaaaaaaaaaaa

SEQ ID NO: 25803 - RNA, 4008 nt, Artificial Sequence
  SARS-CoV-2/Wuhan/WIV05/2019__EPI_ISL_402128 spike protein mRNA gc mod (1-1273)(K986P_V987P_K986P_V987P_L18F_D80A_D215G_L242del_A243del_ L244del_R246I_K417N_E484K_N501Y_D614G_A701V)
aggagaaagcuuaccauguucguguuucuggugcugcugccccugguguccagccagugugugaacuucaccaccagaacacagcugccuccagccuacaccaacagcuucaccagaggcguguacuaccccgacaagguguucagauccagcgugcugcacucuacccaggaccuguuccugccuuucuucagcaacgugaccugguuccacgccauccacguguccggcaccaauggcaccaagagauucgccaaccccgugcugcccuucaacgacgggguguacuuugccagcaccgagaaguccaacaucaucagaggcuggaucuucggcaccacacuggacagcaagacccagagccugcugaucgugaacaacgccaccaacguggucaucaaagugugcgaguuccaguucugcaacgaccccuuccugggcgucuacuaccacaagaacaacaagagcuggauggaaagcgaguuccggguguacagcagcgccaacaacugcaccuucgaguacgugucccagccuuuccugauggaccuggaaggcaagcagggcaacuucaagaaccugcgcgaguucguguucaagaacaucgacggcuacuucaaaaucuacagcaagcacaccccuaucaaccucgugcggggccugccucagggcuucucugcucuggaaccccugguggaucugcccaucggcaucaacaucacccgguuucagacacugcacaucagcuaccugacaccuggcgauagcagcagcggauggacagcuggugccgccgcuuacuaugugggcuaccugcagccuagaaccuuccugcugaaguacaacgagaacggcaccaucaccgacgccguggauugugcucuggauccucugagcgagacaaagugcacccugaaguccuucaccguggaaaagggcaucuaccagaccagcaacuuccgggugcagcccaccgaauccaucgugcgguuccccaauaucaccaaucugugccccuucggcgagguguucaaugccaccagauucgccucuguguacgccuggaaccggaagcggaucagcaauugcguggccgacuacuccgugcuguacaacuccgccagcuucagcaccuucaagugcuacggcguguccccuaccaagcugaacgaccugugcuucacaaacguguacgccgacagcuucgugauccggggagaugaagugcggcagauugccccuggacagacaggcaacaucgccgacuacaacuacaagcugcccgacgacuucaccggcugugugauugccuggaacagcaacaaccuggacuccaaagucggcggcaacuacaauuaccuguaccggcuguuccggaaguccaaucugaagcccuucgagcgggacaucagcaccgaaaucuaucaggccggcagcaccccuugcaacggcgugaagggcuucaacugcuacuucccacugcaguccuacggcuuucagcccacauacggcgugggcuaucagcccuacagagugguggugcugagcuucgaacugcugcaugcuccugccacagugugcggcccuaagaaaagcaccaaucucgugaagaacaaaugcgugaacuucaacuucaacggccugaccggcaccggcgugcugacagagagcaacaagaaguuccugccauuccagcaguuuggccgggauaucgccgauaccacagacgccguuagagauccccagacacuggaaauccuggacaucaccccaugcagcuucggcggagugucugugaucaccccuggcaccaacaccagcaaucagguggcagugcuguaccagggcgugaacuguaccgaagugcccguggccauucacgccgaucagcugacaccuacauggcggguguacuccaccggcagcaauguguuucagaccagagccggcugucugaucggagccgagcacgugaacaauagcuacgagugcgacauccccaucggcgcuggcaucugugccagcuaccagacacagacaaacagccccagacgggcuagaagcguggccagccagagcaucauugccuacacaaugucucugggcguggagaacagcguggccuacuccaacaacucuaucgcuauccccaccaacuucaccaucagcgugaccaccgagauccugccuguguccaugaccaagaccagcguggacugcaccauguacaucugcggcgauuccaccgagugcuccaaccugcugcugcaguacggcagcuucugcacccagcugaauagagcccugacagggaucgccguggaacaggacaagaacacccaagagguguucgcccaagugaagcaaaucuacaagaccccuccuaucaaggacuucggcggcuucaauuucagccagauucugcccgauccuagcaagcccagcaagcggagcuucaucgaggaccugcuguucaacaaagugacacuggccgacgccggcuucaucaagcaguauggcgauugucugggcgacauugccgccagggaucugauuugcgcccagaaguuuaacggacugacagugcugccuccucugcugaccgaugagaugaucgcccaguacacaucugcccugcuggccggcacaaucacaagcggcuggacauuuggagcuggcgccgcucugcagauccccuuugcuaugcagauggccuaccgguucaacggcaucggagugacccagaaugugcuguacgagaaccagaagcugaucgccaaccaguucaacagcgccaucggcaagauccaggacagccugagcagcacagcaagcgcccugggaaagcugcaggacguggucaaccagaaugcccaggcacugaacacccuggucaagcagcuguccuccaacuucggcgccaucagcucugugcugaacgauauccugagcagacuggacccuccugaggccgaggugcagaucgacagacugaucacaggcagacugcagagccuccagacauacgugacccagcagcugaucagagccgccgagauuagagccucugccaaucuggccgccaccaagaugucugagugugugcugggccagagcaagagaguggacuuuugcggcaagggcuaccaccugaugagcuucccucagucugccccucacggcgugguguuucugcacgugacauaugugcccgcucaagagaagaauuucaccaccgcuccagccaucugccacgacggcaaagcccacuuuccuagagaaggcguguucguguccaacggcacccauugguucgugacacagcggaacuucuacgagccccagaucaucaccaccgacaacaccuucgugucuggcaacugcgacguugugaucggcauugugaacaauaccguguacgacccucugcagcccgagcuggacagcuucaaagaggaacuggacaaguacuuuaagaaccacacaagccccgacguggaccugggcgauaucagcggaaucaaugccagcgucgugaacauccagaaagagaucgaccggcugaacgagguggccaagaaucugaacgagagccugaucgaccugcaagaacuggggaaguacgagcaguacaucaaguggcccugguacaucuggcugggcuuuaucgccggacugauugccaucgugauggucacaaucaugcuguguugcaugaccagcugcuguagcugccugaagggcuguuguagcuguggcagcugcugcaaguucgacgaggacgauucugagcccgugcugaagggcgugaaacugcacuacaccugaggacuaguuauaagacugacuagcccgaugggccucccaacgggcccuccuccccuccuugcaccgagauuaauagaucuaaaaaaaaaaaaaaaaaaaaaaaaaaaaaaaaaaaaaaaaaaaaaaaaaaaaaaaaaaaaaaaaaaaaaaaaaaaaaaaaaaaaaaaaaaaaaaaaaaaa

SEQ ID NO: 25804 - RNA, 4017 nt, Artificial Sequence
  SARS-CoV-2/Wuhan/WIV05/2019__EPI_ISL_402128 spike protein mRNA gc mod (1-1273)(K986P_V987P_K986P_V987P_E484K_D614G)
aggagaaagcuuaccauguucguguuucuggugcugcugccccugguguccagccagugugugaaccugaccaccagaacacagcugccuccagccuacaccaacagcuucaccagaggcguguacuaccccgacaagguguucagauccagcgugcugcacucuacccaggaccuguuccugccuuucuucagcaacgugaccugguuccacgccauccacguguccggcaccaauggcaccaagagauucgacaaccccgugcugcccuucaacgacgggguguacuuugccagcaccgagaaguccaacaucaucagaggcuggaucuucggcaccacacuggacagcaagacccagagccugcugaucgugaacaacgccaccaacguggucaucaaagugugcgaguuccaguucugcaacgaccccuuccugggcgucuacuaccacaagaacaacaagagcuggauggaaagcgaguuccggguguacagcagcgccaacaacugcaccuucgaguacgugucccagccuuuccugauggaccuggaaggcaagcagggcaacuucaagaaccugcgcgaguucguguucaagaacaucgacggcuacuucaaaaucuacagcaagcacaccccuaucaaccucgugcgggaucugccucagggcuucucugcucuggaaccccugguggaucugcccaucggcaucaacaucacccgguuucagacacugcuggcccugcacagaagcuaccugacaccuggcgauagcagcagcggauggacagcuggugccgccgcuuacuaugugggcuaccugcagccuagaaccuuccugcugaaguacaacgagaacggcaccaucaccgacgccguggauugugcucuggauccucugagcgagacaaagugcacccugaaguccuucaccguggaaaagggcaucuaccagaccagcaacuuccgggugcagcccaccgaauccaucgugcgguuccccaauaucaccaaucugugccccuucggcgagguguucaaugccaccagauucgccucuguguacgccuggaaccggaagcggaucagcaauugcguggccgacuacuccgugcuguacaacuccgccagcuucagcaccuucaagugcuacggcguguccccuaccaagcugaacgaccugugcuucacaaacguguacgccgacagcuucgugauccggggagaugaagugcggcagauugccccuggacagacaggcaagaucgccgacuacaacuacaagcugcccgacgacuucaccggcugugugauugccuggaacagcaacaaccuggacuccaaagucggcggcaacuacaauuaccuguaccggcuguuccggaaguccaaucugaagcccuucgagcgggacaucagcaccgaaaucuaucaggccggcagcaccccuugcaacggcgugaagggcuucaacugcuacuucccacugcaguccuacggcuuucagcccacaaauggcgugggcuaucagcccuacagagugguggugcugagcuucgaacugcugcaugcuccugccacagugugcggcccuaagaaaagcaccaaucucgugaagaacaaaugcgugaacuucaacuucaacggccugaccggcaccggcgugcugacagagagcaacaagaaguuccugccauuccagcaguuuggccgggauaucgccgauaccacagacgccguuagagauccccagacacuggaaauccuggacaucaccccaugcagcuucggcggagugucugugaucaccccuggcaccaacaccagcaaucagguggcagugcuguaccagggcgugaacuguaccgaagugcccguggccauucacgccgaucagcugacaccuacauggcggguguacuccaccggcagcaauguguuucagaccagagccggcugucugaucggagccgagcacgugaacaauagcuacgagugcgacauccccaucggcgcuggcaucugugccagcuaccagacacagacaaacagccccagacgggcuagaagcguggccagccagagcaucauugccuacacaaugucucugggcgccgagaacagcguggccuacuccaacaacucuaucgcuauccccaccaacuucaccaucagcgugaccaccgagauccugccuguguccaugaccaagaccagcguggacugcaccauguacaucugcggcgauuccaccgagugcuccaaccugcugcugcaguacggcagcuucugcacccagcugaauagagcccugacagggaucgccguggaacaggacaagaacacccaagagguguucgcccaagugaagcaaaucuacaagaccccuccuaucaaggacuucggcggcuucaauuucagccagauucugcccgauccuagcaagcccagcaagcggagcuucaucgaggaccugcuguucaacaaagugacacuggccgacgccggcuucaucaagcaguauggcgauugucugggcgacauugccgccagggaucugauuugcgcccagaaguuuaacggacugacagugcugccuccucugcugaccgaugagaugaucgcccaguacacaucugcccugcuggccggcacaaucacaagcggcuggacauuuggagcuggcgccgcucugcagauccccuuugcuaugcagauggccuaccgguucaacggcaucggagugacccagaaugugcuguacgagaaccagaagcugaucgccaaccaguucaacagcgccaucggcaagauccaggacagccugagcagcacagcaagcgcccugggaaagcugcaggacguggucaaccagaaugcccaggcacugaacacccuggucaagcagcuguccuccaacuucggcgccaucagcucugugcugaacgauauccugagcagacuggacccuccugaggccgaggugcagaucgacagacugaucacaggcagacugcagagccuccagacauacgugacccagcagcugaucagagccgccgagauuagagccucugccaaucuggccgccaccaagaugucugagugugugcugggccagagcaagagaguggacuuuugcggcaagggcuaccaccugaugagcuucccucagucugccccucacggcgugguguuucugcacgugacauaugugcccgcucaagagaagaauuucaccaccgcuccagccaucugccacgacggcaaagcccacuuuccuagagaaggcguguucguguccaacggcacccauugguucgugacacagcggaacuucuacgagccccagaucaucaccaccgacaacaccuucgugucuggcaacugcgacguugugaucggcauugugaacaauaccguguacgacccucugcagcccgagcuggacagcuucaaagaggaacuggacaaguacuuuaagaaccacacaagccccgacguggaccugggcgauaucagcggaaucaaugccagcgucgugaacauccagaaagagaucgaccggcugaacgagguggccaagaaucugaacgagagccugaucgaccugcaagaacuggggaaguacgagcaguacaucaaguggcccugguacaucuggcugggcuuuaucgccggacugauugccaucgugauggucacaaucaugcuguguugcaugaccagcugcuguagcugccugaagggcuguuguagcuguggcagcugcugcaaguucgacgaggacgauucugagcccgugcugaagggcgugaaacugcacuacaccugaggacuaguuauaagacugacuagcccgaugggccucccaacgggcccuccuccccuccuugcaccgagauuaauagaucuaaaaaaaaaaaaaaaaaaaaaaaaaaaaaaaaaaaaaaaaaaaaaaaaaaaaaaaaaaaaaaaaaaaaaaaaaaaaaaaaaaaaaaaaaaaaaaaaaaaa

SEQ ID NO: 25805 - RNA, 4017 nt, Artificial Sequence
  SARS-CoV-2/Wuhan/WIV05/2019__EPI_ISL_402128 spike protein mRNA gc mod (1-1273)(K986P_V987P_K986P_V987P_L18F_T20N_P26S_D138Y_R190S_K417T _E484K_N501Y_D614G_H655Y_T1027I)
aggagaaagcuuaccauguucguguuucuggugcugcugccccugguguccagccagugugugaacuucaccaacagaacacagcugccuagcgccuacaccaacagcuucaccagaggcguguacuaccccgacaagguguucagauccagcgugcugcacucuacccaggaccuguuccugccuuucuucagcaacgugaccugguuccacgccauccacguguccggcaccaauggcaccaagagauucgacaaccccgugcugcccuucaacgacgggguguacuuugccagcaccgagaaguccaacaucaucagaggcuggaucuucggcaccacacuggacagcaagacccagagccugcugaucgugaacaacgccaccaacguggucaucaaagugugcgaguuccaguucugcaacuaccccuuccugggcgucuacuaccacaagaacaacaagagcuggauggaaagcgaguuccggguguacagcagcgccaacaacugcaccuucgaguacgugucccagccuuuccugauggaccuggaaggcaagcagggcaacuucaagaaccugagcgaguucguguucaagaacaucgacggcuacuucaaaaucuacagcaagcacaccccuaucaaccucgugcgggaucugccucagggcuucucugcucuggaaccccugguggaucugcccaucggcaucaacaucacccgguuucagacacugcuggcccugcacagaagcuaccugacaccuggcgauagcagcagcggauggacagcuggugccgccgcuuacuaugugggcuaccugcagccuagaaccuuccugcugaaguacaacgagaacggcaccaucaccgacgccguggauugugcucuggauccucugagcgagacaaagugcacccugaaguccuucaccguggaaaagggcaucuaccagaccagcaacuuccgggugcagcccaccgaauccaucgugcgguuccccaauaucaccaaucugugccccuucggcgagguguucaaugccaccagauucgccucuguguacgccuggaaccggaagcggaucagcaauugcguggccgacuacuccgugcuguacaacuccgccagcuucagcaccuucaagugcuacggcguguccccuaccaagcugaacgaccugugcuucacaaacguguacgccgacagcuucgugauccggggagaugaagugcggcagauugccccuggacagacaggcaccaucgccgacuacaacuacaagcugcccgacgacuucaccggcugugugauugccuggaacagcaacaaccuggacuccaaagucggcggcaacuacaauuaccuguaccggcuguuccggaaguccaaucugaagcccuucgagcgggacaucagcaccgaaaucuaucaggccggcagcaccccuugcaacggcgugaagggcuucaacugcuacuucccacugcaguccuacggcuuucagcccacauacggcgugggcuaucagcccuacagagugguggugcugagcuucgaacugcugcaugcuccugccacagugugcggcccuaagaaaagcaccaaucucgugaagaacaaaugcgugaacuucaacuucaacggccugaccggcaccggcgugcugacagagagcaacaagaaguuccugccauuccagcaguuuggccgggauaucgccgauaccacagacgccguuagagauccccagacacuggaaauccuggacaucaccccaugcagcuucggcggagugucugugaucaccccuggcaccaacaccagcaaucagguggcagugcuguaccagggcgugaacuguaccgaagugcccguggccauucacgccgaucagcugacaccuacauggcggguguacuccaccggcagcaauguguuucagaccagagccggcugucugaucggagccgaguacgugaacaauagcuacgagugcgacauccccaucggcgcuggcaucugugccagcuaccagacacagacaaacagccccagacgggcuagaagcguggccagccagagcaucauugccuacacaaugucucugggcgccgagaacagcguggccuacuccaacaacucuaucgcuauccccaccaacuucaccaucagcgugaccaccgagauccugccuguguccaugaccaagaccagcguggacugcaccauguacaucugcggcgauuccaccgagugcuccaaccugcugcugcaguacggcagcuucugcacccagcugaauagagcccugacagggaucgccguggaacaggacaagaacacccaagagguguucgcccaagugaagcaaaucuacaagaccccuccuaucaaggacuucggcggcuucaauuucagccagauucugcccgauccuagcaagcccagcaagcggagcuucaucgaggaccugcuguucaacaaagugacacuggccgacgccggcuucaucaagcaguauggcgauugucugggcgacauugccgccagggaucugauuugcgcccagaaguuuaacggacugacagugcugccuccucugcugaccgaugagaugaucgcccaguacacaucugcccugcuggccggcacaaucacaagcggcuggacauuuggagcuggcgccgcucugcagauccccuuugcuaugcagauggccuaccgguucaacggcaucggagugacccagaaugugcuguacgagaaccagaagcugaucgccaaccaguucaacagcgccaucggcaagauccaggacagccugagcagcacagcaagcgcccugggaaagcugcaggacguggucaaccagaaugcccaggcacugaacacccuggucaagcagcuguccuccaacuucggcgccaucagcucugugcugaacgauauccugagcagacuggacccuccugaggccgaggugcagaucgacagacugaucacaggcagacugcagagccuccagacauacgugacccagcagcugaucagagccgccgagauuagagccucugccaaucuggccgccaucaagaugucugagugugugcugggccagagcaagagaguggacuuuugcggcaagggcuaccaccugaugagcuucccucagucugccccucacggcgugguguuucugcacgugacauaugugcccgcucaagagaagaauuucaccaccgcuccagccaucugccacgacggcaaagcccacuuuccuagagaaggcguguucguguccaacggcacccauugguucgugacacagcggaacuucuacgagccccagaucaucaccaccgacaacaccuucgugucuggcaacugcgacguugugaucggcauugugaacaauaccguguacgacccucugcagcccgagcuggacagcuucaaagaggaacuggacaaguacuuuaagaaccacacaagccccgacguggaccugggcgauaucagcggaaucaaugccagcgucgugaacauccagaaagagaucgaccggcugaacgagguggccaagaaucugaacgagagccugaucgaccugcaagaacuggggaaguacgagcaguacaucaaguggcccugguacaucuggcugggcuuuaucgccggacugauugccaucgugauggucacaaucaugcuguguugcaugaccagcugcuguagcugccugaagggcuguuguagcuguggcagcugcugcaaguucgacgaggacgauucugagcccgugcugaagggcgugaaacugcacuacaccugaggacuaguuauaagacugacuagcccgaugggccucccaacgggcccuccuccccuccuugcaccgagauuaauagaucuaaaaaaaaaaaaaaaaaaaaaaaaaaaaaaaaaaaaaaaaaaaaaaaaaaaaaaaaaaaaaaaaaaaaaaaaaaaaaaaaaaaaaaaaaaaaaaaaaaaa

SEQ ID NO: 25806 - RNA, 4017 nt, Artificial Sequence
  SARS-CoV-2/Wuhan/WIV05/2019__EPI_ISL_402128 spike protein mRNA gc mod (1-1273)(K986P_V987P_K986P_V987P_S13I_W152C_L452R_D614G)
aggagaaagcuuaccauguucguguuucuggugcugcugccccugguguccauccagugugugaaccugaccaccagaacacagcugccuccagccuacaccaacagcuucaccagaggcguguacuaccccgacaagguguucagauccagcgugcugcacucuacccaggaccuguuccugccuuucuucagcaacgugaccugguuccacgccauccacguguccggcaccaauggcaccaagagauucgacaaccccgugcugcccuucaacgacgggguguacuuugccagcaccgagaaguccaacaucaucagaggcuggaucuucggcaccacacuggacagcaagacccagagccugcugaucgugaacaacgccaccaacguggucaucaaagugugcgaguuccaguucugcaacgaccccuuccugggcgucuacuaccacaagaacaacaagagcugcauggaaagcgaguuccggguguacagcagcgccaacaacugcaccuucgaguacgugucccagccuuuccugauggaccuggaaggcaagcagggcaacuucaagaaccugcgcgaguucguguucaagaacaucgacggcuacuucaaaaucuacagcaagcacaccccuaucaaccucgugcgggaucugccucagggcuucucugcucuggaaccccugguggaucugcccaucggcaucaacaucacccgguuucagacacugcuggcccugcacagaagcuaccugacaccuggcgauagcagcagcggauggacagcuggugccgccgcuuacuaugugggcuaccugcagccuagaaccuuccugcugaaguacaacgagaacggcaccaucaccgacgccguggauugugcucuggauccucugagcgagacaaagugcacccugaaguccuucaccguggaaaagggcaucuaccagaccagcaacuuccgggugcagcccaccgaauccaucgugcgguuccccaauaucaccaaucugugccccuucggcgagguguucaaugccaccagauucgccucuguguacgccuggaaccggaagcggaucagcaauugcguggccgacuacuccgugcuguacaacuccgccagcuucagcaccuucaagugcuacggcguguccccuaccaagcugaacgaccugugcuucacaaacguguacgccgacagcuucgugauccggggagaugaagugcggcagauugccccuggacagacaggcaagaucgccgacuacaacuacaagcugcccgacgacuucaccggcugugugauugccuggaacagcaacaaccuggacuccaaagucggcggcaacuacaauuaccgcuaccggcuguuccggaaguccaaucugaagcccuucgagcgggacaucagcaccgaaaucuaucaggccggcagcaccccuugcaacggcguggaaggcuucaacugcuacuucccacugcaguccuacggcuuucagcccacaaauggcgugggcuaucagcccuacagagugguggugcugagcuucgaacugcugcaugcuccugccacagugugcggcccuaagaaaagcaccaaucucgugaagaacaaaugcgugaacuucaacuucaacggccugaccggcaccggcgugcugacagagagcaacaagaaguuccugccauuccagcaguuuggccgggauaucgccgauaccacagacgccguuagagauccccagacacuggaaauccuggacaucaccccaugcagcuucggcggagugucugugaucaccccuggcaccaacaccagcaaucagguggcagugcuguaccagggcgugaacuguaccgaagugcccguggccauucacgccgaucagcugacaccuacauggcggguguacuccaccggcagcaauguguuucagaccagagccggcugucugaucggagccgagcacgugaacaauagcuacgagugcgacauccccaucggcgcuggcaucugugccagcuaccagacacagacaaacagccccagacgggcuagaagcguggccagccagagcaucauugccuacacaaugucucugggcgccgagaacagcguggccuacuccaacaacucuaucgcuauccccaccaacuucaccaucagcgugaccaccgagauccugccuguguccaugaccaagaccagcguggacugcaccauguacaucugcggcgauuccaccgagugcuccaaccugcugcugcaguacggcagcuucugcacccagcugaauagagcccugacagggaucgccguggaacaggacaagaacacccaagagguguucgcccaagugaagcaaaucuacaagaccccuccuaucaaggacuucggcggcuucaauuucagccagauucugcccgauccuagcaagcccagcaagcggagcuucaucgaggaccugcuguucaacaaagugacacuggccgacgccggcuucaucaagcaguauggcgauugucugggcgacauugccgccagggaucugauuugcgcccagaaguuuaacggacugacagugcugccuccucugcugaccgaugagaugaucgcccaguacacaucugcccugcuggccggcacaaucacaagcggcuggacauuuggagcuggcgccgcucugcagauccccuuugcuaugcagauggccuaccgguucaacggcaucggagugacccagaaugugcuguacgagaaccagaagcugaucgccaaccaguucaacagcgccaucggcaagauccaggacagccugagcagcacagcaagcgcccugggaaagcugcaggacguggucaaccagaaugcccaggcacugaacacccuggucaagcagcuguccuccaacuucggcgccaucagcucugugcugaacgauauccugagcagacuggacccuccugaggccgaggugcagaucgacagacugaucacaggcagacugcagagccuccagacauacgugacccagcagcugaucagagccgccgagauuagagccucugccaaucuggccgccaccaagaugucugagugugugcugggccagagcaagagaguggacuuuugcggcaagggcuaccaccugaugagcuucccucagucugccccucacggcgugguguuucugcacgugacauaugugcccgcucaagagaagaauuucaccaccgcuccagccaucugccacgacggcaaagcccacuuuccuagagaaggcguguucguguccaacggcacccauugguucgugacacagcggaacuucuacgagccccagaucaucaccaccgacaacaccuucgugucuggcaacugcgacguugugaucggcauugugaacaauaccguguacgacccucugcagcccgagcuggacagcuucaaagaggaacuggacaaguacuuuaagaaccacacaagccccgacguggaccugggcgauaucagcggaaucaaugccagcgucgugaacauccagaaagagaucgaccggcugaacgagguggccaagaaucugaacgagagccugaucgaccugcaagaacuggggaaguacgagcaguacaucaaguggcccugguacaucuggcugggcuuuaucgccggacugauugccaucgugauggucacaaucaugcuguguugcaugaccagcugcuguagcugccugaagggcuguuguagcuguggcagcugcugcaaguucgacgaggacgauucugagcccgugcugaagggcgugaaacugcacuacaccugaggacuaguuauaagacugacuagcccgaugggccucccaacgggcccuccuccccuccuugcaccgagauuaauagaucuaaaaaaaaaaaaaaaaaaaaaaaaaaaaaaaaaaaaaaaaaaaaaaaaaaaaaaaaaaaaaaaaaaaaaaaaaaaaaaaaaaaaaaaaaaaaaaaaaaaa

SEQ ID NO: 25807 - RNA, 4017 nt, Artificial Sequence
  SARS-CoV-2/Wuhan/WIV05/2019__EPI_ISL_402128 spike protein mRNA gc mod (1-1273)(K986P_V987P)
aggagaaagcuuaccauguucguguuccuggugcugcugccucugguguccagccagugugugaaccugaccaccagaacacagcugccuccagccuacaccaacagcuuuaccagaggcguguacuaccccgacaagguguucagauccagcgugcugcacucuacccaggaccuguuccugccuuucuucagcaacgugaccugguuccacgccauccacguguccggcaccaauggcaccaagagauucgacaaccccgugcugcccuucaacgacgggguguacuuugccagcaccgagaaguccaacaucaucagaggcuggaucuucggcaccacacuggacagcaagacccagagccugcugaucgugaacaacgccaccaacguggucaucaaagugugcgaguuccaguucugcaacgaccccuuccugggcgucuacuaccacaagaacaacaagagcuggauggaaagcgaguuccggguguacagcagcgccaacaacugcaccuucgaguacgugucccagccuuuccugauggaccuggaaggcaagcagggcaacuucaagaaccugcgcgaguucguguuuaagaacaucgacggcuacuucaagaucuacagcaagcacaccccuaucaaccucgugcgggaucugccucagggcuucucugcucuggaaccccugguggaucugcccaucggcaucaacaucacccgguuucagacacugcuggcccugcacagaagcuaccugacaccuggcgauagcagcagcggauggacagcuggugccgccgcuuacuaugugggcuaccugcagccuagaaccuuccugcugaaguacaacgagaacggcaccaucaccgacgccguggauugugcucuggauccucugagcgagacaaagugcacccugaaguccuucaccguggaaaagggcaucuaccagaccagcaacuuccgggugcagcccaccgaauccaucgugcgguuccccaauaucaccaaucugugccccuucggcgagguguucaaugccaccagauucgccucuguguacgccuggaaccggaagcggaucagcaauugcguggccgacuacuccgugcuguacaacuccgccagcuucagcaccuucaagugcuacggcguguccccuaccaagcugaacgaccugugcuucacaaacguguacgccgacagcuucgugauccggggagaugaagugcggcagauugccccuggacagacaggcaagaucgccgacuacaacuacaagcugcccgacgacuucaccggcugugugauugccuggaacagcaacaaccuggacuccaaagucggcggcaacuacaauuaccuguaccggcuguuccggaaguccaaucugaagcccuucgagcgggacaucuccaccgagaucuaucaggccggcagcaccccuuguaacggcguggaaggcuucaacugcuacuucccacugcaguccuacggcuuucagcccacaaauggcgugggcuaucagcccuacagagugguggugcugagcuucgaacugcugcaugccccugccacagugugcggcccuaagaaaagcaccaaucucgugaagaacaaaugcgugaacuucaacuucaacggccugaccggcaccggcgugcugacagagagcaacaagaaguuccugccauuccagcaguuuggccgggauaucgccgauaccacagacgccguuagagauccccagacacuggaaauccuggacaucaccccuugcagcuucggcggagugucugugaucaccccuggcaccaacaccagcaaucagguggcagugcuguaccaggacgugaacuguaccgaagugcccguggccauucacgccgaucagcugacaccuacauggcggguguacuccaccggcagcaauguguuucagaccagagccggcugucugaucggagccgagcacgugaacaauagcuacgagugcgacauccccaucggcgcuggaaucugcgccagcuaccagacacagacaaacagcccucggagagccagaagcguggccagccagagcaucauugccuacacaaugucucugggcgccgagaacagcguggccuacuccaacaacucuaucgcuauccccaccaacuucaccaucagcgugaccacagagauccugccuguguccaugaccaagaccagcguggacugcaccauguacaucugcggcgauuccaccgagugcuccaaccugcugcugcaguacggcagcuucugcacccagcugaauagagcccugacagggaucgccguggaacaggacaagaacacccaagagguguucgcccaagugaagcagaucuacaagaccccuccuaucaaggacuucggcggcuucaauuucagccagauucugcccgauccuagcaagcccagcaagcggagcuucaucgaggaccugcuguucaacaaagugacacuggccgacgccggcuucaucaagcaguauggcgauugucugggcgacauugccgccagggaucugauuugcgcccagaaguuuaacggacugacagugcugccuccucugcugaccgaugagaugaucgcccaguacacaucugcccugcuggccggcacaaucacaagcggcuggacauuuggagcaggcgccgcucugcagauccccuuugcuaugcagauggccuaccgguucaacggcaucggagugacccagaaugugcuguacgagaaccagaagcugaucgccaaccaguucaacagcgccaucggcaagauccaggacagccugagcagcacagcaagcgcccugggaaagcugcaggacguggucaaccagaaugcccaggcacugaacacccuggucaagcagcuguccuccaacuucggcgccaucagcucugugcugaacgauauccugagcagacuggacccuccugaggccgaggugcagaucgacagacugaucacaggcagacugcagagccuccagacauacgugacccagcagcugaucagagccgccgagauuagagccucugccaaucuggccgccaccaagaugucugagugugugcugggccagagcaagagaguggacuuuugcggcaagggcuaccaccugaugagcuucccucagucugccccucacggcgugguguuucugcacgugacauaugugcccgcucaagagaagaauuucaccaccgcuccagccaucugccacgacggcaaagcccacuuuccuagagaaggcguguucguguccaacggcacccauugguucgugacacagcggaacuucuacgagccccagaucaucaccaccgacaacaccuucgugucuggcaacugcgacgucgugaucggcauugugaacaauaccguguacgacccucugcagcccgagcuggacagcuucaaagaggaacuggacaaguacuuuaagaaccacacaagccccgacguggaccugggcgauaucagcggaaucaaugccagcgucgugaacauccagaaagagaucgaccggcugaacgagguggccaagaaucugaacgagagccugaucgaccugcaagaacuggggaaguacgagcaguacaucaaguggcccugguacaucuggcugggcuuuaucgccggacugauugccaucgugauggucacaaucaugcuguguugcaugaccagcugcuguagcugccugaagggcuguuguagcuguggcagcugcugcaaguucgacgaggacgauucugagcccgugcugaagggcgugaaacugcacuacacaugaggacuaguuauaagacugacuagcccgaugggccucccaacgggcccuccuccccuccuugcaccgagauuaauagaucuaaaaaaaaaaaaaaaaaaaaaaaaaaaaaaaaaaaaaaaaaaaaaaaaaaaaaaaaaaaaaaaaaaaaaaaaaaaaaaaaaaaaaaaaaaaaaaaaaaaa

SEQ ID NO: 25808 - RNA, 4017 nt, Artificial Sequence
  SARS-CoV-2/Wuhan/WIV05/2019__EPI_ISL_402128 spike protein mRNA gc mod (1-1273)(K986P_V987P_ D614G)
aggagaaagcuuaccauguucguguuccuggugcugcugccucugguguccagccagugugugaaccugaccaccagaacacagcugccuccagccuacaccaacagcuuuaccagaggcguguacuaccccgacaagguguucagauccagcgugcugcacucuacccaggaccuguuccugccuuucuucagcaacgugaccugguuccacgccauccacguguccggcaccaauggcaccaagagauucgacaaccccgugcugcccuucaacgacgggguguacuuugccagcaccgagaaguccaacaucaucagaggcuggaucuucggcaccacacuggacagcaagacccagagccugcugaucgugaacaacgccaccaacguggucaucaaagugugcgaguuccaguucugcaacgaccccuuccugggcgucuacuaccacaagaacaacaagagcuggauggaaagcgaguuccggguguacagcagcgccaacaacugcaccuucgaguacgugucccagccuuuccugauggaccuggaaggcaagcagggcaacuucaagaaccugcgcgaguucguguuuaagaacaucgacggcuacuucaagaucuacagcaagcacaccccuaucaaccucgugcgggaucugccucagggcuucucugcucuggaaccccugguggaucugcccaucggcaucaacaucacccgguuucagacacugcuggcccugcacagaagcuaccugacaccuggcgauagcagcagcggauggacagcuggugccgccgcuuacuaugugggcuaccugcagccuagaaccuuccugcugaaguacaacgagaacggcaccaucaccgacgccguggauugugcucuggauccucugagcgagacaaagugcacccugaaguccuucaccguggaaaagggcaucuaccagaccagcaacuuccgggugcagcccaccgaauccaucgugcgguuccccaauaucaccaaucugugccccuucggcgagguguucaaugccaccagauucgccucuguguacgccuggaaccggaagcggaucagcaauugcguggccgacuacuccgugcuguacaacuccgccagcuucagcaccuucaagugcuacggcguguccccuaccaagcugaacgaccugugcuucacaaacguguacgccgacagcuucgugauccggggagaugaagugcggcagauugccccuggacagacaggcaagaucgccgacuacaacuacaagcugcccgacgacuucaccggcugugugauugccuggaacagcaacaaccuggacuccaaagucggcggcaacuacaauuaccuguaccggcuguuccggaaguccaaucugaagcccuucgagcgggacaucuccaccgagaucuaucaggccggcagcaccccuuguaacggcguggaaggcuucaacugcuacuucccacugcaguccuacggcuuucagcccacaaauggcgugggcuaucagcccuacagagugguggugcugagcuucgaacugcugcaugccccugccacagugugcggcccuaagaaaagcaccaaucucgugaagaacaaaugcgugaacuucaacuucaacggccugaccggcaccggcgugcugacagagagcaacaagaaguuccugccauuccagcaguuuggccgggauaucgccgauaccacagacgccguuagagauccccagacacuggaaauccuggacaucaccccuugcagcuucggcggagugucugugaucaccccuggcaccaacaccagcaaucagguggcagugcuguaccagggcgugaacuguaccgaagugcccguggccauucacgccgaucagcugacaccuacauggcggguguacuccaccggcagcaauguguuucagaccagagccggcugucugaucggagccgagcacgugaacaauagcuacgagugcgacauccccaucggcgcuggaaucugcgccagcuaccagacacagacaaacagcccucggagagccagaagcguggccagccagagcaucauugccuacacaaugucucugggcgccgagaacagcguggccuacuccaacaacucuaucgcuauccccaccaacuucaccaucagcgugaccacagagauccugccuguguccaugaccaagaccagcguggacugcaccauguacaucugcggcgauuccaccgagugcuccaaccugcugcugcaguacggcagcuucugcacccagcugaauagagcccugacagggaucgccguggaacaggacaagaacacccaagagguguucgcccaagugaagcagaucuacaagaccccuccuaucaaggacuucggcggcuucaauuucagccagauucugcccgauccuagcaagcccagcaagcggagcuucaucgaggaccugcuguucaacaaagugacacuggccgacgccggcuucaucaagcaguauggcgauugucugggcgacauugccgccagggaucugauuugcgcccagaaguuuaacggacugacagugcugccuccucugcugaccgaugagaugaucgcccaguacacaucugcccugcuggccggcacaaucacaagcggcuggacauuuggagcaggcgccgcucugcagauccccuuugcuaugcagauggccuaccgguucaacggcaucggagugacccagaaugugcuguacgagaaccagaagcugaucgccaaccaguucaacagcgccaucggcaagauccaggacagccugagcagcacagcaagcgcccugggaaagcugcaggacguggucaaccagaaugcccaggcacugaacacccuggucaagcagcuguccuccaacuucggcgccaucagcucugugcugaacgauauccugagcagacuggacccuccugaggccgaggugcagaucgacagacugaucacaggcagacugcagagccuccagacauacgugacccagcagcugaucagagccgccgagauuagagccucugccaaucuggccgccaccaagaugucugagugugugcugggccagagcaagagaguggacuuuugcggcaagggcuaccaccugaugagcuucccucagucugccccucacggcgugguguuucugcacgugacauaugugcccgcucaagagaagaauuucaccaccgcuccagccaucugccacgacggcaaagcccacuuuccuagagaaggcguguucguguccaacggcacccauugguucgugacacagcggaacuucuacgagccccagaucaucaccaccgacaacaccuucgugucuggcaacugcgacgucgugaucggcauugugaacaauaccguguacgacccucugcagcccgagcuggacagcuucaaagaggaacuggacaaguacuuuaagaaccacacaagccccgacguggaccugggcgauaucagcggaaucaaugccagcgucgugaacauccagaaagagaucgaccggcugaacgagguggccaagaaucugaacgagagccugaucgaccugcaagaacuggggaaguacgagcaguacaucaaguggcccugguacaucuggcugggcuuuaucgccggacugauugccaucgugauggucacaaucaugcuguguugcaugaccagcugcuguagcugccugaagggcuguuguagcuguggcagcugcugcaaguucgacgaggacgauucugagcccgugcugaagggcgugaaacugcacuacacaugaggacuaguuauaagacugacuagcccgaugggccucccaacgggcccuccuccccuccuugcaccgagauuaauagaucuaaaaaaaaaaaaaaaaaaaaaaaaaaaaaaaaaaaaaaaaaaaaaaaaaaaaaaaaaaaaaaaaaaaaaaaaaaaaaaaaaaaaaaaaaaaaaaaaaaaa
